United States Patent Application Publication US 2024/0131193 A1 - sequence listing, part 10

SEQ ID NO: 17980 - DNA, 6201 bp, synthetic construct
  source 1..6201: mol_type = other DNA; note = Synthetic coding sequence
atgtgcagcacaccaggcatgccagcccctggggcctctctcgctctaagggtgtccttcgtcgatgtgcacccagatgtgattccagtccaattatgggggctggtgggagaaaggcggggcgaatacctccgcttgtcccgcgagatccaggaagcagcagccactagggggcaatgggctctgggatctgcctcagcatcccctggcgaactatgtctggtgcaggtaggtctcctttggcataggtgcagagtcgtgtctcgccaagcccaagagagcagagttttccttctggatgagggtcggaccataacagcaggagcgggcagtctggcccccggccgcagagagtttttcaacctcccttcggaagtgttgggctgcgtgctggctggcctggtgcctgccgggtgcggtgccggttccggcgaacccccgcagcactggccagcggacgccgttgacttcctctccaacttgcagggaaaagaggtgcatgggtgtgtgctggacgtcctattgctgcaccgcttagtgctcctggaggtaccagatgtttttcagcagatgagagagctcggacttgcaagacgggtgcctgattccctttttaggtcgctgctggagcggtacttgaccgctgctacagcctctgtgggtagcggggtccccgtcctctctagagtcccactgaaacagaaacagcctggacttgattatttttaccctcagctacagcttggggtgactgaagccgtggtaattacccaggtgtgccaccctcaccgcattcactgccagctgaggtccgtctcccaagagatccacagactgagcgaaagcatggctcaggtgtaccgaggcagcactggcactggggacgagaatagtacgagcgccacttgggaggagcgtgaggagagtcccgacaaacctgggtccccttgtgctagctgcggcctcgatggacactggtatcgtgctctgctgctggaaacgttccgtccccagagatgtgctcaagtgctgcatgtcgactacggtcggaaagaactcgtctcatgctcttcattacgatatctactgcccgagtactttaggatgcccgtcgttacgtacccgtgcgctctgtatggcttgtgggacgggggccgagggtggtctaggtcccaagtgggagatcttaaaactctgatactgggcaaggcagtaaatgcaaaaatcgagttttattgttcatttgaacacgtctactatgtcagtctgtacggtgaggacggcattaacctgaatagagtattcggcgtccaatcctgctgcctggctgaccgagtgttacagagtcaggccacagaggaagaggagccggaaacttcccagagccagtccccagctgaagaagtagatgaggaaatttccctgcccgctttgcgctccatacgccttaagatgaatgcattctacgatgcgcaagtggagtttgtaaaaaatccatccgaattctggatccggctgagaaagcataacgttactttctccaaactcatgcgtcgaatgtgcggtttttatagcagtgccagcaagctggatggggttgttttgaaacccgagccggatgacctgtgctgtgtgaagtggaaagagaacggatactaccgcgccatcgtaacgaaactggatgataagtctgtggacgtctttcttgtggatcgtggcaattcagagaatgttgactggtacgacgtgaggatgttgctcccccagttccggcaactgccgatcctggctgtgaagtgcactcttgcagatatctggccactggggaaaacttggtcgcaagaggccgtgtcattttttaagaagacagtgcttcacaaagaactcgttattcatatactggacaaacaggatcaccagtacgttatagagatcttggacgagtcacgcacaggcgaggaaaatatttctaaggtgattgctcaggcaggttatgctaaataccaggaattcgagacaaaagaaaacatcttggtgaacgcccattccccagggcacgtgagtaatcacttcaccaccgagagcaacaagattccattcgccaagacaggggaaggagagcagaaagccaaacgggagaataagaccacctcagtgagtaaggcgctttctgacacaaccgttgtgacaaacggcagtactgaactggtggtccaggagaaagtgaaacgggcgagtgtgtatttcccattgatgcagaattgtttggaaataaaacctggctccagcagcaagggagaactggaggtggggtcgacagtggaagtcagagtgagctacgtagagaacccggggtacttttggtgccagctgacaagaaacatacagggactgaaaaccctgatgtcagatatccagtactattgtaagaatacagctgcccctcaccagcgcaacaccctggcatgtctagccaaacgcacagtcaaccggcagtggagcagggccctcatcagtggcattcagagcgtggaacacgtaaacgttaccttcgtagattacggggaccgggagatggtctccgtaaagaacatctactctatctctgaagagtttctgaaggtaaaggcgcaggcctttagatgctctctctacaatctgatacagccagtgggtcaaaatccttttgtctgggatgtgaaagctattcaggccttcaatgaatttatcgacaacgcgtggcaaaagaatctggaacttaagtgtacaatttttgcactggcctctattaacgaagaactgttcaatatcgtggatctgctgactccgtttcagtctgcgtgccactttttggtagagaagcgcctcgccaggcccgtgaagctccagaagcccctcgagtcctccgtgcagctgcacagttatttctactcaacccacgacatgaaaatcgggtctgaggaacttgtctatattactcacattgacgacccctggacgttttattgccagctggccaggaatgcaaatatcctggagcaacttagctgctctataactcagctgtccaaggtattgctaaacctgaaaacgtcccccttgaaccccggcacactgtgcctcgcaaaatataccgatggcaactggtatcgcgggatcgtgatcgaaaaggaacctaagaaggttttctttgtggactttggaaacatatatgtggtcacaagtgatgaccttctgcctatcccaagcgatgcgtatgacgttctgctgttgcctatgcaggcagtaaggtgttctttgtctgacattcccgatcatatacccgaagaggtggtggtgtggttccaggaaacgatcttggacaagagtctgaaggctctggtggtcgcaaaagatcctgatggtactctcataatcgaattgtacggagacaacatccagatttccgcttcaataaataagaaactgggcctgctgagctataaggatcgtatccgaaagaaagaaagcgaagtgttgtgtagcactaccgaaacactggaggagaagaacgagaatatgaaactgccttgcaccgagtatctgagcaaaagtgtcggctataagctacctaataaggaaattcttgaggaaagttataagcctcagataaatagctcctacaaagaattgaagctgctacagagcctgaccaagacaaatctggtcacccagtaccaagattccgttggcaacaagaattcccaagtttttcctctgaccactgagaagaaagaggagataagtgccgagacacccttaaaaaccgcacgtgttgaggcaactctatctgagcgcaagattggcgacagctgtgacaaagatcttcctcttaagttttgtgagttcccacagaagactatcatgcctggatttaaaactaccgtctacgtttcacatattaacgacctctctgatttctacgtgcagctaatagaggacgaggctgaaatttcccatttatctgagaggcttaacagtgtgaaaacacggcctgaatattatgtgggccccccccttcagcgcggcgatatgatctgcgcagtgttccctgaagataacctgtggtatcgcgccgttatcaaagaacagcagcccaacgacttgctatccgtgcagtttatcgattacggaaatgtcagcgtggtccatacaaacaagatagggagactggacttggtcaacgctatcttaccaggcctatgcattcactgcagtctccagggctttgaggtgcccgacaataaaaatagcaagaaaatgatgcactattttagtcagagaaccagtgaagctgccatcagatgcgagtttgtaaaattccaagataggtgggaggtgatcctggctgacgagcatgggatcatcgcagacgatatgatttcacgctacgcacttagcgaaaagtcacaagttgagctgtcaacacaggtgatcaaaagcgcttcatcaaaaagcgtgaataagtctgatattgatacttctgtttttctcaattggtataaccctgagaaaaaaatgataagggcctacgccacagtcattgatggacccgaatatttctggtgtcagttcgcagataccgagaagctgcaatgcctggaagttgaggtgcagacagctggggaacaggttgccgataggcgtaattgtatcccttgtccatatataggcgatccctgcattgtgcgctaccgggaggatggacactattaccgagctctgattactaatatctgtgaagattacctggtatctgtcaggctggtggattttgggaacatcgaagattgtgtcgaccccaaggctctctgggcaatcccctccgagttgctgagcgtgccaatgcaagcatttccttgttgtctgtcgggatttaacatttcggaagggctgtgttctcaggagggtaatgactatttctacgaaatcattacggaggacgtcttagagatcactatcctggaaatccggcgcgatgtatgcgatattcctctcgccattgtggatttgaaatctaaaggaaagagcatcaatgaaaaaatggagaaatattctaagacaggcataaaaagcgccctaccgtacgagaatatagattccgagattaagcagaccctggggagttataacttggacgtgggtctgaagaaattgtccaataaagcagttcagaacaagatctatatggaacaacagacagatgagctcgctgagatcacagaaaaagacgttaacatcattgggactaagccttccaattttcgggaccccaagaccgataacatctgcgagggcttcgagaacccatgcaaagacaaaattgatacagaggagctcgaaggggagttggagtgccatctagtcgacaaggcggagtttgacgataagtacctgatcaccggtttcaacaccctgctgcctcatgctaacgagacaaaggagatccttgagttgaattctctcgaggttccactctccccagacgatgaaagtaaagagttcttggaattggaatctattgagcttcagaattccttagttgtcgacgaagaaaagggggaactcagtcccgtccccccaaacgtccctctcagccaggaatgtgttaccaagggagctatggaattgtttactctgcagttgccattgtcctgtgaggccgaaaaacaacctgagcttgagctgccaaccgcccaactgcccctcgacgacaagatggatccactgtcactcggtgtgagccaaaaagctcaagaaagtatgtgcacagaagacatgcggaaaagcagctgtgttgagtcctttgacgatcagcggcggatgtcgttacatttgcatggggctgactgtgatcctaaaacccagaacgagatgaacatctgtgaggaagagttcgtggagtataagaatagagatgccatcagcgccttaatgccgcttttttcagaggaagagagtagcgatggttctaaacacaataatggtctccccgaccacatctcagcacagttgcagaacacatatactctgaaggctttcaccgtcggatcaaagtgcgtggtatggtcctccctgaggaatacttggagcaaatgtgaaatcctggagacagccgaagaaggaactcgcaagcgagggctcgaggtcatggaaatctag

SEQ ID NO: 17981 - DNA, 264 bp, synthetic construct
  source 1..264: mol_type = other DNA; note = Synthetic coding sequence
atgtcctcttgtgtgagtagccaaccctccagcaatagagccgcgcctcaagacgaattgggcgggaggggcagttcgagtagcgagtctcagaagccttgtgaagccctaagaggactgtccagtctttcaatccacctggggatggaatcctttattgttgttacagaatgtgaacctggatgtgcggtggatctgggcctggcacgcgataggcctcttgaggccgatggacaggaggtacctctggacacgtcggggtag

SEQ ID NO: 17982 - DNA, 2469 bp, synthetic construct
  source 1..2469: mol_type = other DNA; note = Synthetic coding sequence
atggccgccgagggagatccagagtgggggcccactccaccgtccacatccgccacgactgcggctcgccgagctgtcaacaaggttgtgtacgacgatcacgaatccgaggaggaggaggaagaagaggacatggtctctgaggaggaagaggaagaagatggcgacgcggaggaaactcaggactccgaagacgatgaggaggatgagatggaagaggatgacgacgactcagactatccagaagagatggaggatgatgatgatgacgcttcttattgcacagagtccagcttcaggtcccatagtacatacagctccacccctggccgcaggaaacctcgagtccaccgacctcgatcaccaatcctggaggaaaaggacattccgccccttgaatttcccaagtcgagtgaggatctcatggttcctaacgagcatatcatgaatgtgatcgcgatatatgaagttttgaggaatttcggcactgtgctcaggctttcgccctttagatttgaagacttctgtgcagccctggtttctcaggagcagtgcactctgatggcagagatgcatgtagtcttgctcaaggccgtgctgcgggaagaagacacttctaatactacatttggccctgcagacttaaaggatagcgtcaattccactctctacttcattgacggcatgacctggcccgaggtgctaagggtgtactgtgaaagtgacaaagagtatcatcatgtcctgccataccaggaggccgaggattatccttacggacctgtcgaaaataagattaaagtcctgcaattcctcgtggaccagttcttgacaaccaatatcgctcgggaggaacttatgtccgagggggtcatccagtatgatgaccattgtcgagtgtgccacaagttaggagatctgctgtgttgtgaaacttgttctgcggtgtatcatctggaatgtgtaaaaccgcccttagaggaggtccctgaggatgaatggcagtgcgaggtctgtgtcgctcacaaggttcctggagtgacagactgtgtcgctgaaattcagaaaaataagccttatatcaggcatgaacctattggatacgatcgtagtagacggaaatactggtttctcaatagaagactaatcatcgaggaagacaccgagaacgaaaacgagaagaagatatggtactactccacgaaagttcagttggcggagttgatagactgcctggacaaggactattgggaagctgagctgtgcaagatcttggaggagatgagggaagagattcaccgacacatggatatcacggaggacctaacaaacaaggcaaggggctctaataaatcttttctggccgctgccaatgaagaaatactcgagagtatccgcgccaaaaagggtgacatagacaatgtcaagagtccggaagagactgaaaaggacaagaatgagactgaaaatgacagcaaagacgccgagaagaatcgggaagagttcgaggaccagagtctcgaaaaagatagcgacgacaagacgcccgacgacgatcctgaacagggcaaaagtgaggagccaactgaagtaggcgacaaaggtaactctgtgagtgccaatctaggggacaacacaacaaacgctaccagcgaagaaacctccccctctgaggggcgctccccagtgggatgtctttctgagactccagactctagtaatatggcagaaaaaaaggtagcttctgagctgccccaggacgtgcctgaggagccaaacaagacctgcgagtcatcgaacacaagtgccacgacgacatcaattcaacccaatctggaaaatagtaacagttcctccgaacttaatagcagccaatccgaatccgcaaaagcggccgatgatcccgagaacggtgaaagggaatctcacactccagtttccatccaggaagagatagttggggacttcaaaagcgagaagagtaatggcgagctaagcgagtctcctggcgcgggaaagggagcctctggtagtacccgtattatcacccgccttagaaaccctgattccaaactgtcacagttaaaatcacaacaggtggctgccgcagctcacgaggccaacaaactgttcaaagagggaaaggaggtccttgtcgttaattcacaaggcgagatcagccgcctgagcacgaagaaagaggtcatcatgaaaggaaacatcaacaactacttcaagctggggcaggagggtaagtatcgagtgtaccataatcagtactctactaatagcttcgccctgaataaacaccagcatcgagaggaccatgacaaacggaggcatctggcacataagttttgcctgaccccggctggagagtttaagtggaacggctccgtacatggctctaaagtgttaaccatttccaccttaaggcttacaataacacagtatggggagaatctttag

SEQ ID NO: 17983 - DNA, 552 bp, synthetic construct
  source 1..552: mol_type = other DNA; note = Synthetic coding sequence
atgctgcagcaaacttggacgtcgcgatgcttgatgaagttctacgccgtcgtggcgacctccccagcttcatgggaaagccataagattgcggaacgcattgagcaacgaatactaaacagtaatccagtgatggaggcattcggcaacgcctgtacattgaggaacaataattcttctcgttttggcaaattcattcaattacagctcaatcgtgcacaacagatgaccggcgccgcagtccagacatatttgcttgagaaaacaagggtcgcctgtcaagcgtcatcagagaggaattttcatatattctaccaaatctgtaaaggcgcgagcgaagacgaacgccttcagtggcacctgccagaaggagccgctttttcctggctcccaaatcccgaacggtccctggaggaggactgctttgaggtgacaagggaagcaatgcttcatctggggatcgacactcccactcagaacaacattttcaaggtgcgccggaaggccactccgctgaagttcggaagagatgacggtcaaccttttgcatag

SEQ ID NO: 17984 - DNA, 744 bp, synthetic construct
  source 1..744: mol_type = other DNA; note = Synthetic coding sequence
atgctgaaattccttgtctggtttcttcagtggtgcgtttgcgtgttggtgcagccggccaaggaactcctgcactgcctaaaaatgcagatgaggattagtaagtacacaaaatgcttgcaggctcagattgcaatcacggtaccaaagacctggaaaaaaccaaaggaccggacacgtaccacagaagaaatgctagaagccgaactcgaactgaaggcggaagaggaactgagtattgataaagtgcttgagtctgagcaagataagatgagccagggtttccatcccgagcgcgaccctagcgaccttaaaaaggtgaaagcagtcgaagagaatggagaggaagccgaacctgtcagaaacggggccgaaagtgtcagcgagggcgagggtattgacgccaacagtggcagtacggacagctctggcgatggggtcacatttccatttaagccagagtcttggaagccaacggatactgagggcaagaaacagtacgaccgcgagtttcttctggatttccagttcatgcccgcctgcatccagaaacccgagggcctcccccccatctccgatgtggtgttagacaagattaaccaacccaagttgcccatgaggaccttagaccccagaatcctgcctaggggccctgatttcactcccgcctttgcggacttcggtcggcagaccccagggggcagaggtgtgcccgttagcgccagttccttgcagctgacctag

SEQ ID NO: 17985 - DNA, 981 bp, synthetic construct
  source 1..981: mol_type = other DNA; note = Synthetic coding sequence
atgctggggggcgtgggtgaagagaatgaaaagctgtggtcattcaccaaaaaagcttctcacatccaattagacagtctcccagaggtccctctgctggtggatgtgccgtgcttgtcagcacagctggatgacagcatcctcaatattgttaaggaccatatcttcaagcatggtaccgtggctagccggcctccagtgcagatcgaggagcttatcgagaagccgggcggtatcatcgtgcgatggtgtaaggtggatgacgactttacagcccaggactacaggttacagtttaggaagtgcaccagcaatcatttcgaggacgtctacgtgggatccgagacagagttcattgtcctccatatcgatcctaacgtggattaccagttccgagtctgcgctcgcggtgatggccgccaagagtggagcccatggtccgtgccacaaatcggccattcaaccctggttcctcacgaatggacggctggcttcgagggctattcactgtcatcacgcagaaatatcgccttgcggaacgactctgagagcagtggtgtcttgtactctcgtgcacccacctacttttgcggccagacgctcaccttcagagttgagacagtcgggcagcctgaccgccgcgacagtatcggcgtgtgcgctgaaaaacaggacggctatgactctctgcagagagatcaggccgtgtgcatcagtacaaacggtgccgtgtttgtgaacgggaaggagatgaccaaccagctgccagcagttactagcggttccactgtcacatttgacatcgaagctgtaaccctcgggaccactagtaataatgaaggagggcactttaaacttagggtgactattagcagtaacaacagagaagtcgtttttgattggctgctggaccagtcttgtgggagcctgtacttcggctgctccttcttctaccccggctggaaggtgcttgtgttttag

SEQ ID NO: 17986 - DNA, 2436 bp, synthetic construct
  source 1..2436: mol_type = other DNA; note = Synthetic coding sequence
atggtatctgaggaagaggaagaggaagacggcgacgctgaggagacccaggatagcgaggatgatgaggaagacgaaatggaggaagacgacgatgacagtgactaccctgaggaaatggaggatgacgacgatgatgcctcatactgtaccgagtctagtttccggtcccacagcacctactcgtctacccctggccgaagaaagccccgcgtgcatagacctcggtcacccattttggaggaaaaggacatccccccccttgaatttccaaagagcagtgaggacctcatggtgcccaacgagcatatcatgaatgtgattgctatttacgaggtcctcagaaactttggaaccgtgctgcggctgagccctttccgcttcgaggacttttgcgccgcgcttgtttctcaggaacagtgtacattaatggctgagatgcatgtggtgcttctgaaagccgtgctccgggaggaggatacatccaatactacctttgggcccgcggacctcaaggatagtgtgaactctactctgtattttatcgatggcatgacatggcctgaagtactgcgagtgtattgcgaaagtgataaggagtatcaccatgtcctgccctaccaggaggccgaggattatccctacggacctgtggagaataaaattaaggtgttacagttcttggtggaccagttccttacaaccaatatcgccagggaggagctgatgagtgagggtgtgattcagtatgatgatcattgcagggtctgccacaagttaggtgacctcctgtgttgtgagacttgctctgcagtttaccacttagagtgtgtgaaaccccctcttgaagaagttccagaagatgagtggcagtgcgaagtctgtgtggcgcataaggtccctggcgtaactgattgcgtcgctgagatacagaaaaataagccatacatccggcacgagcctataggttacgaccgcagtcgtcgtaagtattggttcctcaaccgcagactgataatcgaagaggataccgaaaacgagaatgagaagaagatttggtactactccacaaaggtgcagctggccgaactaatcgattgcctggataaggactactgggaggccgaactgtgtaaaatacttgaagaaatgcgtgaggaaatccatcgtcatatggatataacggaagacctgacaaataaagcgaggggttcaaataagagcttccttgccgccgccaatgaggaaatcctggaatctattcgcgccaagaagggtgacatcgacaatgttaagtcccctgaggaaacagaaaaagataagaacgaaaccgagaacgactctaaagacgctgagaaaaatcgggaggaattcgaggatcaatctttagagaaagacagcgacgataagacacccgacgacgaccctgagcagggcaagagtgaggagcctaccgaggttggcgacaaggggaactctgtatctgccaacctgggcgataatacaaccaatgcaacaagcgaggagactagcccctccgaagggcggtccccagtgggttgtctgtcggaaactcctgattcatcaaatatggctgaaaagaaggtagcctccgagcttcctcaggacgtgcccgtgggggatttcaagagcgagaagtccaatggggaactgtcagaatcgccaggtgcaggaaaaggggctagcgggtccacgcgtatcatcacccgactgaggaatccggattcaaaactctcccaactcaagtctcagcaggtcgctgcagccgctcatgaggccaacaagctgttcaaagaaggaaaggaggtcctcgtggtgaactcccagggtgaaataagtcgcctgtcaaccaaaaaggaggttatcatgaaaggcaatatcaacaattattttaagctcggtcaagagggcaaataccgggtctatcacaatcagtacagcactaactccttcgccctgaacaagcaccagcacagggaggaccatgataagagacgacacctggctcacaagttttgtttgactcccgctggggagttcaagtggaatggttccgtgcacggctctaaagtgctgacgatatcaaccttgaggctcactattacacagctagagaataatattcccagtagtttcttacacccgaattgggcatcccaccgggcaaactggattaaggccgtgcagatgtgtagtaaaccgagggagtttgccttagccctcgccatcctggaatgcgcagtgaagcccgtcgtgatgctgcccatatggcgcgagtcactcggccatacgcgcttgcaccgtatgaccagtatcgaacgtgaggaaaaggagaaagtgaagaaaagggaagagacgggccggcgccgcaatgatgccgcttcagacatgggcaagattcacatttccagctag

SEQ ID NO: 17987 - DNA, 1752 bp, synthetic construct
  source 1..1752: mol_type = other DNA; note = Synthetic coding sequence
atggcacccgaattgacccccgaagaagagcaggccaccaaacagtttctcgaggagattaacaagtggactgtacagtacaacgtctcccctctgagttggaacgtggccgtgaaattcttaatggctcgcaaatttgatgtgctgcgggctatagagctgttccacagctatcgggagactaggcgcaaggaggggatcgttaagctgaaacctcatgaagagcctctgcgcagcgaaatcctcagtggtaaatttacaattctgaacgtaagagatccaacaggggcgagcatcgcattgtttaccgcccggttgcaccaccctcacaagtcagttcagcatgtggtactccaggccctattttacctgctcgaccgcgccgtggactcattcgagacccagcgcaacggacttgtgtttatttatgacatgtgcggttcaaattacgcgaatttcgaactggacttaggaaaaaaagtactcaacctcctgaaaggggcttttcccgcgaggttgaaaaaggtactcatagtcggagcgcccatttggttccgagtgccctactccatcatctccctgctgctgaaggataaagtgagggaacgtatccagatacttaaaactagtgaagttactcagcacctgccacgggagtgcctgccggagaatttggggggctatgtgaagatcgacctggccacctggaactttcagttcctgccgcaggttaacggccatccagatccattcgacgaaattatcctgttttctcttcccccggccctggattgggactcggttcatgttcctggtccccatgctatgactattcaggagttagtggattacgtgaacgccaggcaaaagcagggcatctatgaagaatacgaagacatacgacgcgagaatcctgtgggcacctttcactgctcgatgagcccaggaaatctcgagaagaaccgctacggtgacgtgccatgtctcgaccagacccgggtaaaattaacaaaacggagtggccacactcaaacagactacattaacgcttcgttcatggatggatacaaacagaagaatgcatatataggcacacagggaccactcgagaacacttatcgcgacttttggctcatggtatgggagcagaaggtgctcgtgattgtcatgactacgcggttcgaggagggggggcgaagaaagtgtggacagtattggccgttggagaaagatagcagaattcgtttcggtttcctgacagtgacaaatcttggagtcgagaacatgaaccactacaaaaagacgaccctggagattcataacacggaagagaggcagaagcgacaggtgactcacttccaattcctgtcctggccagactacggtgtgccctcgtccgcagcatcactaatagatttcctgagagtcgttcggaaccagcagagcctggcagtgtctaatatgggggcgcgaagtaaaggtcagtgcccagagcctcccatagtggtccattgttctgcagggatcggacgcaccggcactttttgttcccttgacatctgcctggcccagttagaggagctgggcactcttaacgtgttccagacagtcagccgcatgaggacccagagggctttttcaatacagactcccgagcaatactatttctgttacaaagcgattctggaatttgctgaaaaagaagggatggtgtcttccgggcagaaccttttagccgtggaatctcagtag

SEQ ID NO: 17988 - DNA, 396 bp, synthetic construct
  source 1..396: mol_type = other DNA; note = Synthetic coding sequence
atggctatgaccgcgggaaccacgacaaccttccccatgagtaatcacacccgagagagggtgaccgttgcgaagctgacactcgagaacttttattctaacctcattttgcagcatgaggaaagagaaacaaggcagaaaaaattggaggtggccatggaagaggagggtctcgccgacgaggagaaaaagttacggaggagccaacacgctagaaaagaaaccgagttcttacggttaaaacgcactcggctaggacttgatgatttcgagtccttgaaggttattggtaggggagccttcggggaagtgaggcttgtccaaaaaaaggacaccggtcacatctacgccatgaagatccttcgcaagtccgatatgcttgaaaaagaacagtag

SEQ ID NO: 17989 - DNA, 435 bp, synthetic construct
  source 1..435: mol_type = other DNA; note = Synthetic coding sequence
atggcgtcagttgcggccgcaagggctgtacccgtgggaagcggactcagaggcttgcagcgcaccttgccccttgtggtaattctaggtgcgactggtacaggcaagtccaccctggccctgcagctaggacagcgcctgggcggagagattgtctccgctgatagtatgcaggtctatgagggcctcgacatcattaccaacaaggtctcggcccaagagcagaggatctgtagacaccacatgatcagttttgtcgacccactggtcaccaattatacggttgtcgattttaggaaccgcgccacggctctgatcgaagatatcttcgcccgcgataaaattccaatcgtggtcggaggaactaactattatattgaatctctgctgtggaaagttcttgtgaacaccaaggtgtctctcgttcacagctag

SEQ ID NO: 17990 - DNA, 1386 bp, synthetic construct
  source 1..1386: mol_type = other DNA; note = Synthetic coding sequence
atggcggcctccagtcttgagcaaaagctcagccggctggaagccaaactgaaacaagagaacagggaagcccggaggaggatcgacctaaatctggacataagtccacagcgcccccgccctaccctgcagcttcctcttgcaaacgatggggggtcgcggtctcccagctcggaatcgtcgcctcagcatcctaccccccctgctaggcctaggcacatgctgggcctccccagcactctattcaccccgcgaagcatggaaagtattgagatagaccaaaaactacaagagattatgaaacagactggctatcttactatcggtggccaggtacctccttcactgtggcggggggaaggaggcgggccagcgcggctggatccttcctgggagcgccagtggggggctgggggcggtggtcggcctgggactctgcagccctcacttagcagccagagatatcaggctgagatcaatgacctggaaaatctgggagaaatgggctctggaacctgcggccaggtgtggaaaatgagatttcggaaaactggccacgtgatcgccgtgaagcagatgcggcgttccggaaataaagaggaaaataagcgaattctcatggatcttgatgtggttttaaaatcacacgattgcccatacattgtccagtgcttcgggacttttatcaccaacaccgatgtgttcatcgccatggagctgatgggaacctgtgcagaaaaactgaaaaaacgcatgcaggggcctatccctgagagaatcctggggaagatgacagtggccatcgttaaagcgctctactacctcaaggaaaagcacggcgttatccaccgagatgtaaaacccagcaatatcctgttagacgaaagagggcagataaagttatgtgacttcgggatttcaggccggcttgtagatagtaaggccaaaaccaggtcggccggatgtgccgcctatatggcgccggagcgaatcgatccccccgacccgactaaaccagattacgacatacgggccgacgtctggtccctgggcatctctctggttgagctggctacaggacagttcccatataagaattgtaagactgattttgaggtccttactaaggtcctccaggaggaacctccactgttacctggacatatggggttttccggggattttcaatccttcgtcaaggattgtctgaccaaggatcatcgtaaaagaccgaaatacaacaagttattggagcattccttcattaagagatacgagacacttgaggtcgatgtggccagttggttcaaggatgtgatggcgaagaccgaaagtccaaggacatccggggtgctgtcgcaaccccacctgccgttctttaggtag

SEQ ID NO: 17991 - DNA, 1611 bp, synthetic construct
  source 1..1611: mol_type = other DNA; note = Synthetic coding sequence
atggagacttcagatattcaaatcttctatcaagaggatcctgaatgtcagaatctgagtgaaaactcctgccccccaagtgaggtgtccgatacaaacctgtactcgccttttaaacccaggaactaccagctggagttggcgcttcctgctatgaagggaaagaacactatcatctgcgccccaacaggctgcgggaaaactttcgtaagtcttttaatatgtgagcatcatctcaagaaattcccgcaaggacaaaaaggcaaagtggtcttctttgcaaaccagatccccgtgtatgagcaacaaaagtcagttttcagtaagtactttgagcggcacggttaccgcgtgacagggatttccggggctacagcagagaacgtgccagtggaacagattgttgaaaataacgacattatcatactcacaccgcagattttggtgaataatcttaaaaaaggcaccattccgtcgctttcaatctttactctgatgatttttgatgaatgtcacaatacatctaagcagcacccctacaatatgattatgttcaattatctcgatcaaaaattaggtggtagctctggtccgctcccgcaagtaataggcctgacagcgagtgttggggtgggagatgctaagaatacggacgaagcccttgactatatttgcaaactgtgtgcctccttagacgcctcagttatcgccactgtaaagcacaacctggaggagcttgaacaggtcgtgtataaaccacaaaagttctttaggaaggtggagtcccgaatctcagacaaattcaagtacatcatcgcccaactgatgcgtgacacagaatctctggccaaaaggatctgtaaagatttggaaaacctatctcaaatacagaatcgcgagttcggtacccagaagtacgagcaatggatcgtaacagtacagaaagcatgcatggtgttccagatgccagacaaggacgaggagtcaaggatctgtaaagcgctctttctttacacctctcatttacgtaaatacaacgacgccctgatcattagcgaacatgcccggatgaaggacgctttggactatctgaaagattttttctctaatgtccgggccgccggttttgacgaaatcgagcaagacctaacgcagcgctttgaagaaaaactgcaggaactggagagtgtcagcagagacccttcaaatgaaaatccaaagctggaagacttatgtttcatactgcaggaggagtaccacctaaacccagagactataactattctcttcgtgaaaacacgcgctctggtcgatgcgctcaagaattggattgaaggaaaccccaagctgtctttcttgaagcccggaatcctgactggaaggggcaaaacgaatcagaatacagggatgacattaccagcccagaagtgtattcttgacgcctttaaggcctctggagaccacaatattttgatcgcaacatctgtagccgatgaaggcatcgacatagcacagtgtaacctcgtcattctgtatgagtacgtcggcaacgtaattaagatgattcaaactcgcgaagaggagcaggaagtggcatcagcctcattctag

SEQ ID NO: 17992 - DNA, 2883 bp, synthetic construct
  source 1..2883: mol_type = other DNA; note = Synthetic coding sequence
atgtcaagattgatcgtcaaaaacctcccgaacggaatgaaggaagaacgatttaggcagctattcgctgcttttggcacgttgaccgactgcagcctcaagttcacaaaggacggcaaattccggaagttcggtttcataggtttcaagtctgaggaagaagcacagaaggcccaaaaacattttaataaaagcttcattgacaccagccgtattacagttgagttttgtaaatcttttggagatcctgccaaaccaagggcctggtcaaaacacgctcagaagcctagtcagccaaagcagcccccaaaggactccacgacacccgagattaagaaagatgaaaaaaagaagaaggtcgcaggtcagctggagaaactgaaagaggacacagagtttcaagaatttctgagcgtacaccagagaagagctcaggcagccacatgggcgaatgacggattggatgcagaaccatcaaagggtaaatctaaacctgccagcgactacctgaatttcgactcagatagtgggcaagagtctgaagaagagggagcaggggaggacctggaagaagaggcctcgcttgagcccaaggccgccgtgcagaaggaactttccgacatggactaccttaaatctaagatggtgaaggcaggatcctcttcgagctctgaagaggaggaatccgaggatgaagcagtgcattgcgatgaaggctcagaagccgaagaagaagacagcagcgctacacctgtgctgcaggaaagggacagtaaaggagccggccaggaacaaggcatgccagctggcaagaaaagacctcccgaggcacgggcagaaacggagaaacctgcaaaccagaaggaacctactacatgtcatacggtgaagttgcgcggcgcaccctttaacgtgactgagaagaacgttatggagtttctcgctcccctgaaacctgttgctattcggattgtccggaatgcgcatggtaacaaaaccggctacatctttgtggatttcagcaatgaagaggaagttaaacaggcattgaaatgcaatcgcgagtacatgggcggcagatatatcgaggtctttcgcgagaagaatgtgcctactacaaaaggcgcccccaagaataccactaagtcatggcagggacggatcctgggtgaaaatgaggaggaagaggacctcgccgaatctggacgtttgttcgtgcgcaacctgccttacacctctaccgaagaagatcttgaaaaactattctccaagtatggccccctgagtgaactgcattaccccattgactccctgacaaagaaacctaaaggcttcgcctttattacatttatgttccccgaacacgccgtcaaagcatatagcgaggtggacggccaggtgtttcaaggcagaatgctccatgtgctgcccagcacaataaaaaaggaggcttccgaggacgctagcgcgctggggagtagcagctataaaaagaagaaggaagcccaggataaggccaatagtgcgtcctcacacaattggaatacgctgttcatgggccccaacgccgtcgccgacgctatagctcagaaatataacgctactaagtcgcaagtgtttgatcacgagaccaaggggtccgtggctgtgcgcgtagccctgggggaaactcagcttgtacaggaggtgcgtcggttcctgatagataacggagtctccctggacagtttcagccaagctgctgccgagagaagcaagacagtgatcttagtaaagaatctgcctgcaggaactctcgccgcacaactgcaggagacttttggccattttggttccctggggcgcgtcctgctgccagagggtggaattaccgccatcgtggaatttctggaacctctggaggctaggaaagctttccgccacctcgcatacagcaagtttcaccatgtacctctttatctagagtgggccccggtgggagtgttctcctcaactgctccacaaaagaaaaagctgcaggacaccccaagcgagccaatggaaaaggatcccgcagagcccgagaccgtacccgatggcgagaccccagaggacgagaacccaacagaggagggcgcagacaactcaagcgccaaaatggaagaggaggaggaggaagaagaggaggaggaagaatcattacccggatgtactttatttattaagaatctgaacttcgacacgacagaagagaagttgaaagaggtgttttcgaaggtgggaactgtgaagagctgcagcatctccaaaaagaaaaacaaggctggggttctgctttcaatgggtttcggttttgtggagtaccgtaaacccgagcaagcccagaaggctctcaaacagctgcagggacacgtagtggatggccacaagttggaagttagaatttccgaaagggcgacaaaacctgccgtaacactggccagaaaaaagcaggtaccccggaaacagaccacttccaagattcttgtgagaaatattccattccaagcacacagccgcgagattcgcgaactctttagtacctttggcgagctcaagacagtgcgattgcctaagaaaatgaccgggactgggacacaccggggattcggatttgtcgatttccttaccaaacaggacgctaagcgtgcgttcaacgccttatgccattctacccacctgtatggcagaaggcttgtcctggaatgggccgacagtgaagtaactctgcaagcgctccgaagaaagacggctgcccacttccatgaaccacctaagaagaaacgctccgtcgtgcttgatgagattcttgaacagctggaagggtcagattctgatagtgaggagcaaacactccagttgtag

SEQ ID NO: 17993 - DNA, 666 bp, synthetic construct
  source 1..666: mol_type = other DNA; note = Synthetic coding sequence
atgctcgccgccgggctcctggaagaactccgggacttccaccgcagatataaccaaaagaatgttagcgaaaactcccaagattatcagcatggtatctttcaatcaatagggttcaaagaattccacgagtaccttatcacagagggaaagtgtacgttggagacaagcaaccagctccttaaaaaaggaattgaggctctcaaacaggtaaccaagcgctacgctcggaaacagaacaggtgggtgaagaataggttcctgtcacgccctggaccaatagtcccccccgtatatgggctcgaggtgagcgacgtgtccaaatgggaggagagcgtgttggaaccagccctggaaatagtccaaagtttcatccagggacacaaacccacagctactcccatcaagatgccttacaatgaagcagagaacaaaaggagctaccacctctgcgatctgtgcgacaggatcatcattggcgatcgcgaatgggccgcccacatcaaatccaaatcccatctgaaccagctgaagaagaggagacgcttggacagcgatgcggtgaatactatagagagtcagtcagtgagcccggaccacaataaagagcccaaggaaaaagggtccccaggacaaaatgatcaagagttaaaatgcagtgtgtag

SEQ ID NO: 17994 - DNA, 2649 bp, synthetic construct
  source 1..2649: mol_type = other DNA; note = Synthetic coding sequence
atgcccagagtgaagcccaaactcgagaagcagctgcagaaggataaagaaaaggtggaggaatttaagagtatcccggctaagagtaacaacatcattaacgagactaccaccaggaataacgcactggaaaaggagaaagagaaagaggagaaaaagctcaaagaagtaatggatagcctcaagcaagaaacacagggcctacagaaagagaaagaaagcagggagaaggagctgatgggattttctaagagtgttaacgaggcccgatccaaaatggatgtggcccagagcgaactggacatctatctgtcacggcataacacagcggtatcccagctaacaaaggccaaagaggcccttatagctgctagtgagacactgaaagagcggaaggctgcaatcagagatattgagggcaagctccctcaaacggagcaagaactgaaagaaaaggaaaaagagctccagaaactaactcaggaggagaccaatttcaagtcgctggtccatgatctgtttcagaaagtcgaggaagccaaatcttcgctggccatgaatcggtccagaggcaaagtgctagatgcaatcatccaggagaaaaaatcggggaggatacctggcatctacggtcgcctcggtgacctaggagccatcgatgaaaaatatgacgtggccatatcctcttgctgccacgccctcgattacatcgttgtcgactctatcgacatcgcacaggagtgcgtgaactttctaaagagacagaacatcggagtggcaacgtttataggtctcgacaagatggccgtatgggcaaagaaaatgaccgagattcagacacccgagaatacaccacgactgttcgatttggttaaagtgaaggatgagaagattcgacaggccttctatttcgcactgcgagataccctcgtcgcggataatctggaccaagccactcgcgtcgcctaccagaaagaccggcgttggagagtggtgactctgcaggggcaaattatcgagcagtccggtacaatgaccggcggcggctccaaggtgatgaagggcaggatggggtccagtttagtgatagagatcagtgaggaggaagtgaataagatggagtcacagttgcaaaatgattccaagaaggccatgcagattcaagaacagaaggtacaactggaagagagagttgtgaaactgaggcatagcgaaagggaaatgcgtaatactctggaaaaatttaccgctagcatccagaggttgatcgaacaagaagaatacctcaatgtccaagtcaaagagctggaggcaaatgtccttgcaacagcaccggataagaagaagcagaagctactggaggagaacgtgtcagcctttaaaaccgaatatgacgccgtcgctgaaaaagctggtaaagttgaggctgaggtgaagcgactgcataacactattgttgagatcaataaccataagctcaaggcccaacaggacaaactagacaagattaataaacaactggacgagtgcgccagcgccataactaaggcccaagtagctatcaagactgccgatcggaaccttcagaaggctcaggactccgtgctgagaaccgagaaagaaatcaaggacacagagaaggaagtggatgacctaacagcggagctgaagtccctggaagataaggcagccgaggttgtcaaaaacactaacgcagccgaggagagccttcctgaaatacagaaggaacaccgcaacctattgcaggagttaaaggttatccaggaaaatgaacatgctttacagaaagatgcactgtcgattaagttaaaactcgaacaaatcgatggacacattgccgagcacaactcaaaaataaaatactggcataaggaaatctctaagatctccttacacccgattgaagacaacccaattgaagaaatttctgttctgtccccagaggaccttgaggcaataaaaaatccagattctatcacaaatcagatcgccctgttggaggctaggtgccatgagatgaaacccaacctcggcgctatagctgagtataagaagaaagaggagctctacctacaacgcgtcgcagagctggacaagatcacctacgaaagggacagcttccgacaggcctacgaggaccttcggaaacagaggctcaatgagttcatggcaggattttatatcataacgaacaagctgaaagaaaactaccagatgcttaccctaggcggagacgcagagctcgaactggtcgatagcctggatcccttttctgagggaatcatgttcagcgtgcgcccacctaaaaagtcttggaaaaaaatttttaacctgtctggcggggaaaagactctgtccagcctcgcccttgtgttcgcactccatcactacaagcctactccattgtactttatggatgagattgatgccgcactggatttcaagaacgtctcgatcgtcgcgttctatatttacgaacagacaaagaatgctcaattcataatcataagcttacggaacaacatgttcgagatatctgaccgtcttatcggaatctacaagacttacaacatcaccaagtctgtagccgttaaccctaaagagatagcatccaagggcttatgctag

SEQ ID NO: 17995 - DNA, 1038 bp, synthetic construct
  source 1..1038: mol_type = other DNA; note = Synthetic coding sequence
atgttcttgactcgccccaaggtgtgcgttgatcttaaccgtagggtcactctttacggagtcttcacaattcacttctctccgaatgtaccaagtcggtgtctgcttctagaactcttggacgtgtcggtctctgagcttttgctttacagctcccatcaggggtgcagcatgtggatgatacagcactgtgccagagatgtgctggaggcccttgctttcctgcaccatgaaggatatgtgcatgccgacttaaaaccacgcaacatattgtggagtgctgaaaatgagtgctttaagttgatcgactttgggttgtcttttaaggaagggaaccaagatgtgaagtacattcagaccgatgggtacagagcgcccgaggctgagctgcagaactgtctggcacaggccgggctacagtccgatactgaatgtacgagcgcagtggatctgtggtctcttgggatcattctgttagagatgttctccggtatgaagctgaaacatactgtgaggtctcaagaatggaaggcaaatagtagcgcaatcattgaccatatatttgcatctaaggctgttgtgaatgccgccatccctgcataccacctgagggatctgatcaagtcaatgcttcacgatgatccgagccgtcgtattccagccgaaatggctctgtgctccccattctttagcatcccattcgcaccccacatagaagacttggtcatgctacctactccggtgctgcgactcctaaatgtgctcgatgatgactacttggaaaatgaggaggaatacgaggacgtggtggaggatgttaaagaagaatgccagaaatatgggccagtggtttcgcttctagttcctaaagagaatcccgggcgtggtcaggtgtttgtggagtacgcaaacgctggagattctaaagccgcgcaaaagttacttaccggacggatgttcgacggcaagttcgtcgttgctactttttaccccctgagtgcctataagcggggttacctgtaccagaccctgctatag

SEQ ID NO: 17996 - DNA, 954 bp, synthetic construct
  source 1..954: mol_type = other DNA; note = Synthetic coding sequence
atgtggctcgcgcgcgaggggattgtcgccccactgccaggtgagtggaagccttgtcaggatattaccggggacatctactattttaacttcgccaatgggcagtctatgtgggaccacccgtgcgatgagcactatcgcagcctcgtaatccaggagagagctaagttaagtacatcgggcgcaatcaagaagaaaaagaaaaagaaagaaaagaaggataagaaggatcgagatccacccaaatctagtctggagacacagcccgaggaagggctgttgccaccctctagcttcctttgctccttatcaccccctagtgcccccggcctggcagacctcgaccttgaccaggagatgcaggccatcagcgaaggtagctataacaagggtaaatctcctggcatgttaggggacactccatggcggtttatgggagccctgccacgaaaattgcagccactgtcaaagggacaaccatctcagatccaccaagtgtttgcagatatggaaaaaatcctcgggcgagcaccagctcaatgcaggcgcgagctaggcgatcagcaaggtttggaaaagcttcagaaggcaaccgagaagatataccttggcttttccgatcccgagacagaagagctggagatgcggtctaggcagcagaaactaggcacccctgctccccagaacacgggcctcctgcagaacatgcaggatgtagttgagtcccgcaaccaagcttccgtccattcgaaactttccgaggccatcaagggactgcctctgaaaggagagcagcactcgcactctttggctaaactcagtcctacaggacccggtggcgataaaggccagagtccaattccaatgtggatttgctgtcgactgcgggcatcaaactgtcgcaacacatccgctgcatggcggcttaaactgaagagatcctcaacgtgttag

SEQ ID NO: 17997 - DNA, 162 bp, synthetic construct
  source 1..162: mol_type = other DNA; note = Synthetic coding sequence
atggggaattctgactcacagtacaccctgcagggcagcaagaaccacagcaatacaatcacaggcgccaaacagattccctgttcgctgaaaattaggggcatccacgccaaggaggagaaatccttacacggttggggacatgggagcaacggcgcttag

SEQ ID NO: 17998 - DNA, 1203 bp, synthetic construct
  source 1..1203: mol_type = other DNA; note = Synthetic coding sequence
gcttggctgcagtctgcaggcgagctcccctcggatgggggctgtagccggcttcgctggcaggcccatctcgaatttactcacaaccacgatgtcggggatctcacatgggataagatcgcagtttctctgcctcggagcgaaaagctgcggtccctggtcctagcaggaatcccacatggaatgaggccacagctgtggatgcggctgagcggtgctctgcagaagaagcgaaatagtgagctgtcttacagggagattgtgaaaaactcatcaaacgatgaaaccatcgcagccaaacagatcgaaaaggatctgctgaggactatgcctagcaacgcttgcttcgccagtatgggttctatcggtgtgccccgtttgcgccgggttcttagggccctcgcatggctttatcctgagataggctattgccagggaactggcatggtcgccgcttgtctgttgctattcttagaagaagaagatgctttctggatgatgtcagccatcatcgaggatttattacccgccagctatttctctaccacactgttaggcgtgcaaacagatcagcgtgtgcttcggcatttgatcgttcaatatctccccagactagacaaactgttacaggaacacgatattgagctgtctcttatcactcttcattggttcctaaccgccttcgctagcgtggtggacataaaactgcttctgcgaatatgggatctcttcttctacgagggctctagagttctttttcagttaacactagggatgctgcacctaaaagaagaagaactgattcaaagcgagaactccgcatccatctttaataccctgtcagatatcccttcacagatggaagacgccgaactgctgctcggtgtcgccatgagactggccggcagccttactgatgtcgcagttgagactcagaggagaaaacatctcgcttatctcatcgctgatcaaggccaactgttaggagccggtacactgactaacctgagccaggtggcacaggatggcgggcctcatcttgatcctcagcacacgggccgccgcggacacctggaagtgcagtccgccggcgcagctgagaataaacctgcactgcccgctctgcctccctctctggcccaaagtgatcactcatgcggggttatccaggccagcagcggtttcgtccatcttcggttttag

SEQ ID NO: 17999 - DNA, 294 bp, synthetic construct
  source 1..294: mol_type = other DNA; note = Synthetic coding sequence
atgctgcgaggcaccaaggaaatggacaacatgtcccccaggctgcgcgcttttctatctgagcctattggtgaaaaagacgtttgctgggtggacggaatctcccatgagttagccatcaacctggtaaccaagggaattaacaaagcttatatcctgttaggacaattcctgctcatgcataagaacgaggccgaattccaacggtggttgatctgctgtttcggagctaccgagtgcgaggcccagcagacctctcactgcttaaaggaatggtgcgcttgttttctgtag

SEQ ID NO: 18000 - DNA, 1011 bp, synthetic construct
  source 1..1011: mol_type = other DNA; note = Synthetic coding sequence
atggagtaccttggcggtggatctgcacttgacctcttaaagcccggtcctcttgaagaaacatatatcgccacaattcttagagaaatcctgaaggggctagattatctgcatagcgaacgcaaaatccatcgagatatcaaggcagccaatgtgctgttatcagaacagggagacgtcaagctggcggattttggagttgccggccagctcactgatactcagatcaaacgcaacacatttgtcggaacgcccttttggatggctcctgaggtcatcaaacagagtgcttatgacttcaaggctgacatttggagcctgggcattaccgcaatcgaactggccaagggcgaaccccctaatagcgatttgcatcctatgcgagtgttatttctaattccgaaaaattccccaccaacactggaaggacagcactccaagccattcaaggaatttgtggaagcctgcctgaacaaggatccccggtttagacccaccgcgaaggaactactgaagcataagtttatcactcgctacacaaagaagacctcattcctcacggaacttatcgaccgctataaaagatggaagtccgagggtcacggagaggagtcaagtagcgaggactctgatatcgacggggaagctgaagatggggaacagggccctatctggacattcccacctacaatcagacctagcccccattcaaagctgcacaagggcactgccttgcactccagtcagaagcctgccgagcctgtaaagcgtcaaccaaggtctcagtgcctcagcaccctcgtgcggccagtgttcggcgaggtgttttcgcagctgaaggagaagcacaagcagtctggcggcagcgtaggggcactggaagagctggagaatgcattcagtctcgcggaggaatcctgtcctggcatcagcgacaaattgatggtgcacctagtagaacgtgtacagcgcttttcgcacaatagaaaccatcttacaagtacacgttag

SEQ ID NO: 18001 - DNA, 1455 bp, synthetic construct
  source 1..1455: mol_type = other DNA; note = Synthetic coding sequence
atggtgcatgaaacaagttactccgcacagtttaaaggagaggcaagcaaacccactaccgccgataataaagtgattgaccggagacgaataaggtctctctactcagaaccattcaaggagccacctaaggtcgagaagccgtcagtccagtcctccaaacctaagaagacctctgcctcacataagcccacaaggaaagccaaagacaagcaggcagtgtcgggccaggccgcgaagaagaagagcgctgagggccccagtaccaccaaacctgacgataaagagcagagcaaagaaatgaacaataaactagccgaggccaaagaaagcctggctcaaccagtctcggactctagcaaaacccagggacctgtggctaccgagccagataaagaccaaggatcagtggtacccggcctcctgaagggccaggggcccatggtacaagaacccctcaagaaacagggatccgtcgttccaggtccccccaaggacctggggccgatgatccccttacccgtcaaagaccaggatcatactgtgcctgagcctctcaagaacgagagtcctgtgatttctgcacctgtgaaagaccaggggccttctgtgcctgtaccacctaagaaccagtctccaatggtccccgccaaggtgaaagatcagggatccgtggtcccagaatccctgaaggaccagggcccgagaattccagaacccgttaaaaatcaggcccccatggtgcccgctccggtgaaagacgagggtcccatggtttctgctagcgtgaaggatcagggccccatggtgagcgccccggtcaaggaccagggtcccattgtgccagctcccgtcaagggggaaggccctattgttcccgctcctgtgaaggacgaggggcccatggtgagcgctccaatcaaagaccaggatcctatggtgccggaacatccaaaagacgaatcagccatggctacagcacccatcaagaatcaaggctctatggtgtccgagcccgtaaaaaaccaaggtctggtagtcagtggcccggtgaaagatcaggacgttgtcgtgcccgaacacgccaaagtccacgatagcgcagttgtggccccggtgaagaatcaggggccagtggttccagaaagtgtcaaaaatcaggacccaattcttcccgtcttggtcaaggatcagggcccaactgtcttgcagcctcctaaaaatcaaggcagaattgtacccgaacccctgaaaaaccaggtgcctattgtcccagtgcccctcaaagaccaagacccactcgtgcccgtgcccgcgaaagatcagggaccggccgtgcctgagcccctaaaaactcaaggccctcgcgacccacagttgcctacggtttctccccttccaagggtcatgattcctacagcaccgcacacggagtatatcgagtcatccccttag

SEQ ID NO: 18002 - DNA, 2103 bp, synthetic construct
  source 1..2103: mol_type = other DNA; note = Synthetic coding sequence
atggctctgggagaggagaaggcggaggctgaggcttccgaagatacaaaggcgcaatcctacggtagggggagttgcagggaacaaccccctcggctagaggcagaaggagggcttatctcacctgtctggggcgcggaaggaatacctgctcctacctgctggatcggcaccgatcccggcggcccctcgagagctcatcagcctcaggcgagtgatgcgaacagggagccagtcgcagaacggagcgaaccagcactgtccggccttcccccagctactatgggttctggtgatctgcttctgtctggagaaagccaagtggagaaaactaagctgagctcgagcgaggaattcccccagaccttgagtctcccccgcacaactacgatttgttccggtcacgatgccgacactgaggatgacccttccctcgcagatctcccccaggccctggacctgtcacaacagcctcactcaagcggcctgtcttgcctgagtcagtggaagtccgtgctcagccctggcagtgcggcgcagcccagcagctgttctatcagtgcctctagtaccggaagcagcctgcaggggcatcaggaacgagcagaaccacgcggcgggtcccttgctaaggtttcttcaagtttagaacctgtggtgccacaggaaccgtcgtccgttgttgggctgggtccaagaccccaatggagcccacagccagtgttctccggcggggatgcatctggtctaggccgaaggagactctcctttcaagcggagtattgggcttgtgtcctgccagactccttaccccctagccctgacagacactcaccactctggaatcctaataaggagtacgaagacttgctagattacacataccctttgaggcccggaccacagttacctaaacacctcgatagtcgtgtcccagccgatcccgtgctgcaggatagcggggtcgatctggatagtttttctgtatctcctgccagcacactcaaatccccaactaatgtcagccctaactgcccgcctgccgaggctaccgcactgccgttttctggccctcgggaacccagcctaaagcagtggccatcgagggtgccgcaaaagcagggaggcatgggactcgcttcttggtcacagctggcaagcacgccacgcgcacccggaagccgagatgccagatgggagcgcagagaaccagccttgcgcggagccaaggaccgtctgacaatcggaaaacacctcgacatgggcagcccccaactccgcacccgtgaccgcggctggccatctccaaggcctgagagggagaagaggacttcccagtctgcaaggagaccaacgtgtactgaaagcagatggaaaagtgaggaagaagtggagtcggatgacgagtaccttgccctccctgcccggttaacgcaagtaagctcccttgtcagttacctggggtctattagtaccctcgtcaccttgccgaccggagacatcaaggggcagagccccctggaggtatcggatagcgatgggcctgcgtcatttccatctagctcaagccagagtcagctgcccccgggcgcggctctgcagggctctggcgaccctgagggacagaatccctgctttctccggagcttcgtgagggcccatgactccgcgggagaaggaagtttgggttcaagtcaagcgctcggagtgtcttctggactcttaaagactagaccgtcgttaccagcccggctcgacaggtggcccttctcagacccggatgtcgagggccaactgccaaggaaaggcggcgaacagggaaaagaaagcctggtgcagtgtgtgaaaacattctgttgtcaactagaagaacttatttgttggctgtataacgtagccgacgtgaccgaccatggcaccgctgctaggtcgaacctgacttcattaaagtccagcctgcagctatatagggtcatatgtggccccggcagcgggctgtttccgcacaaatccgtcgcaaagctgttggactacaaggtcaagtctcaaataactaacgtgtggtatgtgatcgcacagctgacgataatccccgagatttag

SEQ ID NO: 18003 - DNA, 1626 bp, synthetic construct
  source 1..1626: mol_type = other DNA; note = Synthetic coding sequence
atgaaaagctatgttagtgaaaccatggcttctcccggcaaagataattatcgcatgaagagctataagaataatgccttaaatccagaagaaatgcggcgacgtagggaggaggaaggcatccaacttagaaagcagaagcgagagcaacagctcttcaagaggcgcaatgtagaactcatcaacgaggaggccgcaatgttcgactccctgcttatggattcatacgtcagttccacaactggagaaagtgtgatcactagggaaatggtagagatgctgttttcagacgattcagatctccaactagccaccacccagaaatttaggaaactgcttagtaaagagccgtccccaccaatcgatgaggtaataaatacccctagagtggtggacaggtttgtcgaatttctcaagcgaaatgagaactgcactctacaattcgaagctgcctgggcactcactaacattgcatccggaacgtcacaacaaacaaagattgtaatcgaggcaggagccgtgcctatcttcatcgaacttcttaatagcgactttgaagatgtgcaggaacaagccgtctgggcactaggcaatatcgccggcgattcttcagtctgcagagattatgttctgaattgctctattctgaacccccttctcaccctgctgaccaaatctacaaggcttacaatgacacggaacgctgtgtgggcactctccaatctgtgtcggggtaaaaatcctccgcctgaattcgcgaaggtgtccccctgtctacccgttctctcaaggctcttgttttcgtctgattcagatcttctcgccgatgcttgctgggccctttcttacctcagtgatggccccaacgaaaagattcaggcagtcattgattcaggcgtctgccggagacttgtggaacttctgatgcacaacgattataaggtagcgagtcccgccctaagggctgtgggcaacatagttacgggcgatgacatacagacacaggtaattttaaattgtagcgccctcccatgtctgctccacctgctcagtagccccaaggaaagtatcaggaaagaagcctgctggacgatttctaacatcaccgccggcaatagggcacagatccaggctgtcatcgatgccaatattttccctgtcctcattgagatactgcaaaaggccgaattcaggacccggaaggaggccgcttgggcaatcactaatgcaacttctggggggaccccggagcagattcggtacctggtgtcactcggttgtataaaacccctatgtgacctcctgaccgtgatggacagcaaaattgtgcaagtggctctcaacggtctcgaaaacatacttagactcggtgaacaggaaggaaagagatctggctctggagtaaacccatactgcggccttattgaggaggcatacggtttggataagattgagttcctgcagtctcatgaaaatcaagaaatctaccagaaggccttcgatctcattgagcattacttcggagtggaagacgacgatagctccctcgccccacaggttgacgagacccagcaacagtttatttttcagcagccggaggcccccatggaagggttccagctctag

SEQ ID NO: 18004 - DNA, 1716 bp, synthetic construct
  source 1..1716: mol_type = other DNA; note = Synthetic coding sequence
atgctcgattgcggaatgcacatggggttcaatgacgatcgcaggtttcctgatttcagctatattacacagaatggcaggctgacagatttcctggactgcgttatcattagccatttccatcttgaccattgtggggctttgccatacttttcggagatggttggctatgacggaccgatctatatgacacatcctacccaagccatctgcccaatcctgctcgaggactaccgtaagatcgctgttgataagaagggggaggctaacttttttacctcccagatgataaaagattgtatgaaaaaggtggtggccgtgcacctccatcaaaccgtgcaagtcgacgacgagttggaaattaaggcctactacgcgggacacgtgctgggagctgccatgttccagatcaaggtggggtcagagtctgtggtctatacaggtgattacaatatgaccccagaccggcacttgggggcagcctggattgacaaatgcagacccaacttattgataactgaatccacatatgcgaccactattagagattctaagcgctgtagggagcgggatttcctgaagaaggtgcatgagaccgttgagagaggaggaaaggtcctcattccggtgtttgctctagggcgagcacaggagctgtgcatcctgttggagacgttctgggaaagaatgaatctcaaagtgcctatatatttctccacggggctcacagaaaaagccaatcattattacaaactgtttattccgtggacgaatcagaagattcgaaagacctttgtgcagaggaatatgttcgaatttaaacacatcaaagcatttgatcgcgccttcgccgataaccctggtcctatggtcgtgtttgcgactcctgggatgctccacgcagggcaatcattacaaatttttaggaaatgggcaggaaatgagaagaatatggtgatcatgcctggttattgtgtacaggggaccgttgggcataagatactttctgggcaaaggaaactcgaaatggaagggcggcaggttcttgaagtaaagatgcaggtcgagtacatgtctttcagcgcccacgctgatgccaaaggaatcatgcagctcgtgggccaggcagagcctgagtcggttctgcttgtgcacggggaagcaaaaaaaatggaattcctgaaacagaagatcgagcaagaattaagagtcaattgttatatgcccgctaacggcgaaacagtgacattgcctacctcgccaagcatccctgtcgggatcagtttgggcctgctcaaacgggagatggcccaggggctcctgcccgaggccaagaagcctcgcctgctacacggaaccctgatcatgaaagatagtaatttccgtcttgtgtcatccgagcaggcattaaaggagttgggtctggcagaacaccagctgagattcacttgtcgggtccatttgcacgataccagaaaggagcaggagacagcgcttagggtctatagccacctcaagtccgttctgaaggaccactgcgtgcaacatctgccagacggtagcgtaacagtggagagtgtgctgctgcaagctgcagcccccagcgaagatcccggtaccaaagtgctcttagtgtcttggacataccaagatgaagagcttggaagctttctgacttccctactgaagaaaggattgccccaagcaccttcctag

SEQ ID NO: 18005 - DNA, 2232 bp, synthetic construct
  source 1..2232: mol_type = other DNA; note = Synthetic coding sequence
atggaggccgccgctgtgactgtcacgaggagtgccactaggaggagaagacgccaactgcagggtctggccgctccagaagctggcactcaggaagaacaagaagaccaggaaccacgcccaaggcgcaggcgacctggacggagtatcaaagacgaggaggaggagacggtcttccgggaagtagtgtctttttctcccgatcctctgcccgtccgttattatgacaaggatacaaccaagcctatatccttttacctgtcgagtctggaagaattgctcgcctggaaaccccggctcgaagatggttttaatgtggccctagaacctctcgcatgcaggcagccccccctgagtagtcagcggccaagaacacttttatgccatgacatgatgggcggatacctggacgacagattcattcagggcagcgtcgttcagaccccttatgcgttctaccattggcagtgcattgatgtcttcgtttacttcagccatcacactgtgaccatccccccagtcggctggaccaataccgctcaccgtcacggggtttgtgtgttaggtacattcattacagagtggaacgaggggggaagattatgtgaggctttcctggctggtgatgaaagatcctaccaggcggtggctgacagattagtccagattacacagtttttccgttttgacgggtggctgatcaatatcgaaaattcactctctctggcagccgtaggaaacatgccacccttcctgaggtatctgacaacacagctacatcgccaggtgcctggtgggctcgtgttatggtacgactccgtggtccagtctgggcagcttaagtggcaggacgaattgaatcagcataatagggtcttctttgactcctgtgatggatttttcactaactacaattggcgggaagaacatttagaacggatgttaggccaggcaggtgagcggcgagctgacgtgtacgtgggtgtggacgtcttcgctagaggtaacgtcgttggcgggcgcttcgataccgataaaagcctcgaactgatccgaaaacacggattcagcgtagcactgtttgcacccgggtgggtctatgagtgcctggagaagaaagatttcttccagaatcaggacaagttctgggggaggctggaacgttacctgcctacccactccatctgcagtctgcccttcgtgacttcattctgtctgggcatgggcgcccggagggtctgctatggacaagaggaagccgtcggcccctggtatcatctatccgctcaggaaatacaaccgctattcggcgagcataggcttggcggggacgggagggggtgggttcgaactcattgctgtctggaagatgcgtggcatgggggttcttctcttctagtgcgcggtgtgataccacccgaggtgggcaatgtcgcagtgaggttgtttagcctgcaggcaccggtcccgcccaagatttacctgtccatggtatacaaattggagggtcctactgacgtcacggtggcactcgagcttaccacaggtgacgccgggtcatgccatatcggtgggatctcagttctgaacgcagagactagtagccgacactccctgagacctctccgcgtcccccctacaaaactggcccgctgggtggggcgctgcgggaggcagctctccggcgggtgggtacagcactgctacgaggtgagccttcggggctgcttgctattggatttgctggtctgcttctcccgtcccccgggaagcagagaagaggaatccttcacttgtaggctgggcgagatccaggttgtagacgccgcgtctctgctcgccccactgccacaggtccaagccgtgacaatcagccacatacgctggcagccctcagcatcagagagagagggaccaccagctctgctgcagttgtcctgcacattgcactggagctttctcttgtcccaggtgcgctgttttaggatccattgctggggcggtatgagtgacgacagccccgggcgcgagctgcctcgaccagagatgcctatgttccttggactcgccttcgcgacccagtaccgaatcgtcgatttgttggttgaagcagccggacccggtcaggatagacggatggagtttttagttgaaccagtgcccaaggaagggtttagagtgccacaggcggagtggggacgggccgtgctcttatattcagccccggcatag

SEQ ID NO: 18006 - DNA, 396 bp, synthetic construct
  source 1..396: mol_type = other DNA; note = Synthetic coding sequence
atggaactgcgggtccatatggtgagccacaccggggagatgccctacaaagtgaggctgggcctctcaccagggccaggactggggggcccgagaattctaccagctgaaccttttacatggggcgcggttcggcatctacctcactccagctgtcagggagcttgcctcccttgcttgccttgcttgagcagtgctcccttgtctaggcagggtctctccgccgcctctcccccccggagcttgttagggccttgctttttcccttggagaaccgggctggctagttccgggcagcttagcccagaggctctgctgtgcactatcctgcacacacgttccggagtgctccctgagagctcccacagaggtctgccactggtgccagccttgtag

SEQ ID NO: 18007 - DNA, 909 bp, synthetic construct
  source 1..909: mol_type = other DNA; note = Synthetic coding sequence
atggagcatggtattgtcaaagattggaatgatatggagaggatctggcaatacgtatactccaaagaccagttacagaccttctctgaggagcaccctgtgctcctcacagaagccccgttaaatccacgtaagaaccgcgagcgtgctgcagaggtgttcttcgagactttcaatgttccggcccttttcatatcaatgcaggcggttttgtccctctatgcgactgggcgcactactggcgtggtgcttgacagcggagatggagtgacccacgccgtgcccatttacgaaggcttcgcaatgccgcactctatcatgcggattgacatcgccggccgtgatgtttcaagatttttacgcctctacctcaggaaagagggctacgatttccacagctctagcgagtttgagatcgtgaaggcaatcaaagagcgggcttgttatctctccattaatccacagaaagacgagaccctggaaactgagaaagcgcagtattaccttcctgacgggagcacaatagagatagggcccagcagattcagagccccagagttgttgttccggcctgacttgatcggagaagaatccgagggaattcatgaggtcctggtgttcgcaatccaaaagagcgatatggatctgcgacggactcttttctccaacattgtgctctccggtgggtctaccctgttcaaggggttcggcgaccgcctgctgagcgaggtaaaaaagcttgcccccaaggacgtgaagatccgtatctcagctccccaggaaaggctctattccacatggattggcggatccatcctcgctagtctggataccttcaaaaaaatgtgggtgagtaagaaagagtatgaggaagacggagcacgaagcatccaccggaagactttttag

SEQ ID NO: 18008 - DNA, 780 bp, synthetic construct
  source 1..780: mol_type = other DNA; note = Synthetic coding sequence
atgcttcgatgcgggcagatgatgctggcacaggctctcatctgccggcatctgggacgggattggtcatgggaaaagcagaaagagcagcccaaggaataccagagaattctgcagtgtttcttggaccggaaagattgctgttattcgatccaccaaatggctcagatgggagtgggcgaaggaaagagcattggcgaatggttcgggcccaatacggtggcccaggtcctcaaaaagctggccctatttgacgagtggaactcactggcagtctacgtgtctatggataataccgtcgtcatcgaagacattaagaagatgtgccgtgtgctgccattgtcagccgacacagccggcgacagacctccagacagtcttacagcttctaaccagtccgacgaactgatctttctggacccacatactactcagacatttgtggacacggaggagaacggcaccgtgaatgaccaaacattccactgcctgcagtctccccagcgtatgaacattctaaacctggacccaagtgtagcattgggcttcttctgtaaagaagagaaagatttcgataattggtgcagtttggtacagaaagagattctcaaggagaacctacgcatgtttgaactggtgcaaaagcacccgagccattggcctcctttcgtgccccctgccaagcccgaagtgacaacaacgggagcagaatttatcgatagcacagagcaactagaggaatttgacctcgaagaggatttcgagattctatcagtgtag

SEQ ID NO: 18009 - DNA, 957 bp, synthetic construct
  source 1..957: mol_type = other DNA; note = Synthetic coding sequence
atgcgagcccagagcgatgagttggagaagatcgagaaacatggccgctcttccaaagataaagaaaacgcaaagagtctcgataagccggagcaattcttatatgagctttccctgattccgaacttttccgagagggttttctgcatcctcttccagagcacattctctgaaagcatatgttccattcgacggaagcttgagcttctgcaaaagctatgtgagacattgaaaaatgggcccggggtgatgcaggtgcttggcctggtgctagcttttgggaactacatgaacggaggtaacaagactcgggggcaggccgacgggtttggactggacatcctcccaaaactgaaggatgtgaagagcagtgacaactcccgcagtttgctgtcatacatcgtgagctactatctccgcaattttgatgaagacgcaggcaaggagcagtgcctgttccctttaccagagcctcaggacctgtttcaggctagtcagatgaaatttgaggactttcaaaaggatctgagaaagctcaaaaaagacctgaaggcctgcgaggtggaagctggtaaggtataccaggtgtcttccaaagaacacatgcagcctttcaaggaaaatatggaacagtttatcatccaggccaagatcgaccaggaagccgaggagaactcattgaccgagacccacaagtgtttcctcgagaccacagcctacttcttcatgaagcctaagttaggcgagaaagaggtcagcccaaacgcattcttcagcatctggcatgagttttcatccgacttcaaagacttctggaagaaagaaaataagcttctgctgcaggagagggtaaaagaggccgaagaagtgtgtaggcagaaaaagggaaaaagcttgtacaagatcaaacccagacacgattcaggcattaaagccaagatcagtatgaagacctag

SEQ ID NO: 18010 - DNA, 345 bp, synthetic construct
  source 1..345: mol_type = other DNA; note = Synthetic coding sequence
atgagttcctcaatgtggtatataatgcagtccattcagtccaagtactctttgtctgaacggcttatacgaactattgctgccattagatcatttcctcacgacaatgttgaggacctgatacgcggaggagcagacgttaattgtacccacggaactctgaagcccctgcattgcgcctgtatggtttcagatgctgattgtgtggaattgcttctggagaagggggccgaggtgaacgcactcgatggctataaccgcacagcccttcactacgcagccgagaaagacgaggcctgtgtggaagtactgctagagtatggcgccaatcccaatgccctctag

SEQ ID NO: 18011 - DNA, 1365 bp, synthetic construct
  source 1..1365: mol_type = other DNA; note = Synthetic coding sequence
atgtcaacattcaggcaggaggatgtggaggatcactatgaaatgggcgaggaactaggcagcggccagtttgccattgtcaggaagtgtcgtcagaaggggaccggcaaggagtacgcggcgaagttcatcaaaaagagaagattgtcgagtagccggaggggcgtgtctcgagaggaaatcgagcgcgaagtgaatatcctgcgagagatcaggcaccctaatatcatcaccctccacgatattttcgagaacaagacagatgtggtactgatcttagagctagtcagcggcggcgagctgttcgactttttggcagaaaaggaatcactcactgaagacgaagccacccagtttctcaaacagattctggacggtgtccactacctccactccaagcggatcgctcacttcgatctcaagcccgagaacattatgctcctggacaagaacgttccaaatccacgtattaagctcatcgattttgggatagctcacaagattgaggccggaaatgaattcaaaaacatctttgggaccccagagtttgtggcaccggaaatagtaaactatgaacccttgggcctggaggcagatatgtggagtatcggggttataacatatatattacttagcggtgctagcccattcctgggagaaacgaagcaggaaaccctaacaaacatcagcgcagtgaattatgacttcgacgaggagtatttttccaacacaagcgagctggcgaaggatttcataagaaggcttctcgtgaaggaccctaagaggagaatgacaatagcacaaagtctggaacatagctggatcaaagccatccgtcggagaaacgtaagaggtgaggacagcggtagaaagccagaacggagaaggctcaagacaactcgcttgaaggagtacaccatcaagtctcattccagcctgccaccaaataattcctatgccgacttcgagcgtttctccaaggtgctcgaagaagccgcagccgccgaagagggcctgagggagctgcaaaggagtaggcgcttatgtcatgaggatgtggaggctctggcagctatatatgaggaaaaagaagcttggtacagggaggaatccgactctctggggcaggatctgcgacgactccgccaggagctgctgaaaacggaggcccttaagagacaggcacaggaagaagccaagggggctcttcttgggaccagtgggttgaagaggcgtttctcccgactcgagaatcgatacgaggcactcgccaagcaagtggccagtgagatgcgattcgtgcaggatcttgtgcgcgcactggagcaagagaagttgcagggtgtcgagtgcgggctcagatag

SEQ ID NO: 18012 - DNA, 1047 bp, synthetic construct
  source 1..1047: mol_type = other DNA; note = Synthetic coding sequence
atgggcaaagattactacaagattctgggcatcccatcaggcgccaacgaagatgaaatcaaaaaagcttatcggaagatggccctaaagtaccatccagataaaaataaagagccaaacgccgaagagaaatttaaggaaatcgcggaagcctatgatgtcctgagtgatccaaaaaaacgtgggctgtatgaccagtacggcgaagagggtttgaagaccggggggggcacatcagggggttcttctggttcgttccactacacctttcacggggatccccacgcaacattcgcctcttttttcggcggctccaatcccttcgatatcttttttgcctcatcacgctccacgcgtcccttcagtgggtttgatcctgacgatatggacgtagatgaggacgaggatcctttcggagcattcggcagatttggttttaatggactgtcccgaggtccccgtcgtgccccggagcctttatacccgaggaggaaagtgcaggacccacctgtcgtccacgaactaagagtctccctcgaagagatctatcacgggagcacaaagcgcatgaagatcactcgcaggcggctgaaccctgacgggaggacggttcgaacggaagataaaattcttcacatcgtaattaagagaggatggaaagagggcacgaaaataacctttcccaaggagggcgatgcaactccagacaatatacctgctgacattgtcttcgtgctgaaggataaaccgcacgctcattttcggagagacggcaccaatgtcctatacagcgccctaatctctctgaaggaagctttatgtggctgtaccgtaaacatccctacaatagacggtagggtaatcccattaccgtgtaatgatgtcatcaaacccggtacagtgaagagattgaggggggaaggccttcctttccccaaagtccccacacaacgcggcgatctgatcgtggagttcaaggtgcggtttcctgaccgacttacgccccagacccggcagatcctcaaacaacatctgccatgctcctag

SEQ ID NO: 18013 - DNA, 2163 bp, synthetic construct
  source 1..2163: mol_type = other DNA; note = Synthetic coding sequence
atgtatggctcagcacggagtgttggtaaagtcgaacccagctcacagagccccggtcggtctccaaggctaccgaggagcccaagattggggcatagacggacgaatagcaccggcggttcaagtggcagctcagtgggaggcgggtctggcaagaccctgagtatggagaatatacagtctctgaatgccgcttacgcaacttcagggccaatgtacttgtctgatcacgaaaacgtcggctccgaaactcccaaatcaacgatgacgttgggcaggtccggcgggcgcctcccatacggcgtgcggatgacagctatgggctcctctcccaatatagcttcgtccggcgtcgcctcagatactattgccttcggcgaacatcacctgccgcctgtttcaatggcttcaacagtcccacatagcctcagacaggcacgcgataataccatcatggacctccaaacccagctaaaggaagtgctcagagaaaatgacctgctgcggaaagatgtggaagtcaaggagagcaagctaagctctagtatgaattctatcaagactttctggagccctgagcttaaaaaagaacgcgcactgaggaaggacgaggcttctaagattacgatttggaaagaacaataccgggtggtgcaggaagagaatcaggtcgacgcattgcggctccgcttggaagaaaaggagacgatgctcaacaagaagacaaagcagatacaggacatggccgaggaaaagggaacacaggccggagaaatccatgacctgaaagatatgcttgatgtgaaggagagaaaggtcaacgtgctgcagaagaaaattgaaaacctgcaagagcaactccgcgataaagaaaagcaaatgtctagcctcaaagagagggtaaaatctcttcaggcggataccaccaacactgataccgctctcactacgctggaggaagcactggctgaaaaagagaggacaattgagagacttaaggaacagagagaccgcgatgaacgcgaaaagcaggaagaaattgacaattataaaaaggacctgaaagacctaaaggaaaaggtgtccctgctgcagggagatctgagcgagaaggaggcctccctgttggacctgaaagagcacgcttcgtccttagcatcgtccgggttgaagaaagactctcgattgaagacactggaaattgctttggaacagaaaaaagaagagtgcttgaaaatggaatcccagttaaagaaagctcacgaggcagcactggaggctcgggcaagccctgagatgtcagaccggattcagcacctcgaacgtgaaatcacgcggtataaggacgagagcagtaaagcccaggcggaggtggatcggctgctggaaatcctgaaagaggtggaaaatgaaaagaatgacaaagataagaaaatcgctgaactcgagtccctcacgtcacggcaagtcaaggaccagaataagaaggttgccaaccttaagcacaaggagcaggttgagaaaaagaagtcagcccagatgctcgaagaggctagacgccgtgaggacaatctgaatgattctagccagcaactgcaggactcactgaggaagaaggatgatcgaatcgaggagttagaggaggccttgcgcgaatcagtgcagataacagcagagcgcgagatggtcctcgcccaggaagaatccgcccgtacaaacgccgagaaacaggtggaagagctgctgatggccatggagaaggtcaagcaagaactcgaatcaatgaaggcaaagctcagcagtacccaacaaagtctggccgaaaaagagacccatcttacaaatttacgagctgagcgccggaagcatcttgaggaggtcctagagatgaagcaagaagccctcctggcggcaatctcagagaaagacgccaacattgcacttttagaacttagcagtagtaaaaagaagacacaagaggaagttgctgcccttaagcgggagaaggaccggctcgttcagcaacttaagcagcagacgcagaacagaatgaaattgatggctgacaattacgaggacgatcattttaagagcagccactctaaccagactaatcacaagccaagcccagaccaagacgaagaggaaggcatctgggcctag

SEQ ID NO: 18014 - DNA, 768 bp, synthetic construct
  source 1..768: mol_type = other DNA; note = Synthetic coding sequence
atggcagcgagtactatgtctgtatgcagttccgcttgctcagacagctggcaggtcgatgcttgtcctgaatcctgctgcgagccacattgttgcgctctgagttgctgcgctcccgccccctgcctcactctagtctgcacaccagtttcacgagtctccagtccttgctgccaggccgcatgtgaaccgagtccatgtcagagcgggtgtactagctcttgcactccctcctgttgtcagcagagcagctgtcagcctgcatgctgtacttcgagtccatgccagcaggcctgttgcgtgcctgtctgctgtaagccggtatgttgtctgcccacatgtagtaaggattcatcgtcatgctgccaacagagcagctgtcaacctacttgttgcgctagctcgagtagtcaacagtcctgctgtgttcccgtgtgctgcaaacctgtttgttacgtgcctacctgcagcgaggactccagctcttgttgtcagcagtcctcctgccatcccgcctgttgcacatcatcaccatgtcaacaggcctgttgcgtgcctgttaggtgtaaacccgtgtgctgcaaacccatttgctgcgtgcccgtgtgctccggagcctccactagctgctgtcagcaatcatcttgtcagccagcctgttgtactactagttgctgtaggccctcttcatctgtctcactgctgtgtcgccctgtgtgtaggccggcatgttgtagtctgtgtagcggccaggaatcatcttgttag

SEQ ID NO: 18015 - DNA, 2562 bp, synthetic construct
  source 1..2562: mol_type = other DNA; note = Synthetic coding sequence
atgagcgaaaaggtggattggctacagtcacagaacggcgtatgtaaggtagatgtttacagtcctggggacaaccaagcgcaggattggaaaatggacacctctaccgaccccgtgcgagtgctgagctggttgaggcgagatctggaaaaatcgacagctgagttccaggacgttcgctttaaaccaggagagtccttcggaggcgagacctccaactcaggtgatccgcacaagggtttctccgtggattactacaatacaacaacaaagggaacacccgaaaggttacacttcgagatgactcacaaggagatcccctgtcaagggccgagggctcagctgggtaacggtagcagcgtcgatgaagttagcttctatgccaaccggctgacaaatctggtgatcgctatggcccgcaaagagattaacgagaaaatcgatggttcggaaaataaatgcgtctaccaaagcctatatatgggcaatgaaccaactccgacaaaaagcctgagcaaaattgctagtgagctggtgaatgagaccgtgtctgcctgttcaagaaatgctgcacctgacaaagctcctggtagcggggacagagtgagtgggtcctcccaaagccctcctaacctgaagtacaagtccaccctgaagattaaggagtccactaaggaaagacagggtccagacgacaagcccccttctaaaaaaagctttttttacaaagaggtctttgaaagtagaaacggtgactacgcgagggagggcggaaggttctttccgcgtgagagaaagagatttcgcggacaggagcggcctgatgacttcactgcttccgtgtccgaaggcattatgacgtatgctaattctgtggtgagtgatatgatggtatctatcatgaagactctgaaaatccaagtcaaagatactaccattgctaccatcctcctgaaaaaggtcctcttgaaacatgccaaagaagtggtaagcgatctcattgactcatttctacgaaaccttcacagcgtgacaggtaccctgatgacagacacccagttcgttagcgcggtcaagcgcacggtgttctcccatgggtcccagaaggcaaccgatatcatggacgctatgttaagaaaactctacaatgttatgttcgccaaaaaagtgccggagcatgtgcggaaagcccaggacaaagcggagagttacagcttgatatcaatgaagggtatgggggatccaaaaaaccgaaatgtgaactttgctatgaagtcagaaacaaagttaagagagaagatgtactctgagcctaagtctgaagaggagacgtgtgcaaagactctgggcgaacatattataaaagaggggctgactctctggcataaaacccagcagaaagagtgtaagagcctgggattccagcacgccgctttcgaagcacccaacacacaacggaagccggcatctgatataagttttgaataccctgaggacatcggcaatctgtctctacctccgtatcctccagaaaaaccagagaactttatgtatgattccgattcctgggccgaggacctcattgtgagcgccctgctgcttatccagtatcacctggcccagggggggaggcgtgatgctcgaagcttcgtagaggctgccggcaccacgaatttcccagctaatgagccccctgtggcccccgacgagtcttgccttaagagcgcgccaattgtgggtgaccaggaacaagccgagaagaaggacctgaggtctgtgtttttcaatttcattagaaacctactgtctgagaccatttttaagagagatcagagtcctgagccgaaagttcctgaacagccggtgaaagaggatagaaagctatgtgaaaggccactcgcttctagcccaccgcggctgtatgaggatgacgagactcccggagcattaagcgggttgactaagatggctgtgagccagatcgacggtcatatgtctggtcaaatggtcgagcacctgatgaattccgtaatgaaactgtgcgtaataatcgcaaaaagctgcgacgcctctctcgccgagttgggagacgacaagtcaggggatgccagccgcctcactagcgcctttccggattcgctgtatgagtgtctgcccgctaagggcacaggctctgcggaagcagtgctgcaaaatgcatatcaggccatccacaatgaaatgaggggcacctccggacagccacccgaaggttgcgcagctcctaccgtgatagtttcaaaccacaatctgaccgataccgtccagaacaaacagctccaggcggtgttacagtgggtggctgcgtccgaactgaacgtccctattctctattttgccggcgacgatgaaggaatccaggagaagcttctgcagctgagtgctgcggctgttgacaaaggttgttctgttggcgaagtcctccaatccgtcttgcggtatgaaaaggagcggcagctgaatgaggccgtcggtaacgtcaccccactacaattgctggactggttgatggtgaatctgtag

SEQ ID NO: 18016 - DNA, 1263 bp, synthetic construct
  source 1..1263: mol_type = other DNA; note = Synthetic coding sequence
atggtgcacgggcgcaaggctaacgctcaggtcatggaatcagaggagttcatgctcctgccagccaatcagctaattgacatcatcagtagcgatgagctgaacgtgcggtcagaagagcaagtgttcaatgccgtgatggcctgggttaagtacagcatacaggaaaggcgcccccagcttcctcaggtactgcaacacgtcagactgcccttgttgtctcctaaatttctggtaggtaccgtgggaagcgatccactgataaagagcgatgaggagtgtagagatctcgttgatgaagccaaaaactacttattgctgccccaggagcgacctctgatgcagggcccgcgtactcggccacgcaagccaattaggtgtggcgaagtgcttttcgcagtgggcggatggtgctcaggagatgccatctcttcggtggagcggtatgatcctcagaccaatgaatggcgcatggtggcttcaatgtctaaaaggaggtgcggcgtgggtgtctccgtcctggatgaccttttgtatgctgtgggagggcatgatgggagctcctatctgaactccgtggagagatacgatccaaaaacaaaccaatggtcttccgatgtcgctcctacctcaacttgccgaacttccgtgggtgttgccgtgctgggggggtttttgtacgccgtggggggacaggatggggtgtcctgcttgaacatcgtggagcggtatgatcctaaagagaataaatggacccgcgtagcctccatgtccacaagacggctgggagtagcggtggcggtgctgggcgggttcttatatgccgtcggggggtcagatggtactagtcctcttaacaccgtcgaaaggtacaatccacaagagaacaggtggcacacaatcgccccaatgggaacccggcgcaagcatctgggctgcgcggtgtaccaggatatgatatatgccgttggtggacgcgacgatactacagagctcagttcagcagaacgttataaccctcgaacaaaccagtggagccccgtggtagcgatgacctcacgcaggagtggagttggactggccgttgtcaacggccagcttatggcagtcggcgggtttgatggcacaacgtacctgaagaccattgaagtatttgacccagatgccaacacatggagactgtatggtggtatgaactatcgaagactgggtggcggagtaggcgtgattaagatgacccattgcgaatctcatatttggtag

SEQ ID NO: 18017 - DNA, 519 bp, synthetic construct
  source 1..519: mol_type = other DNA; note = Synthetic coding sequence
atgagctgtaccatcgagaaggctctggccgacgccaaagctcttgtggaacggttaagggaccatgatgacgcagcagaatctctgatcgaacagacaacggccctgaacaagagggtggaggcaatgaaacagtatcaagaggagatccaggaactaaatgaagtcgccagacaccgcccgcgatctactctggtgatgggaatccagcaggagaaccgtcagatacgcgagcttcagcaagagaacaaggagcttagaacatccctggaggagcatcagtccgccttagaacttatcatgagtaagtacagagagcagatgttccgcctgctcatggcatctaaaaaagacgaccctggaatcataatgaaactgaaagaacaacacagcaaaattgacatggtgcaccgtaacaaaagcgaaggattctttctggacgcatctaggcacatcctggaagcgccccagcacggactagaaaggagacacctagaagccaatcagaacgtgcactag

SEQ ID NO: 18018 - DNA, 813 bp, synthetic construct
  source 1..813: mol_type = other DNA; note = Synthetic coding sequence
atgctgtttatcttcccactgagcctgccttggaggccatcttgctggaaggaatcatgctcgacggggcaaagacaggctggtcgttcgagagaggactcggtgacccctccccctagcagtccttggcctaccccaccagccggcgccatgagtacaaagcaagaggcccgcagggacgagggtgaggcccggaccagggggcaagaggcgcagcttcgtgatcgcgcgcacttgtctctccacaaggactccgctgatctcttgccactggactccctcaaacgcctcggtaccagcaaggatctgcagcccaggtctgtgattcagagacgcttggtagagggaaatcctaactggctgcagggggagcctccacgcatgcaggacctgattcacggacaggaatcccggcgcaagaccagccgcactgaaattcccgcattgttagtcaactgtaagtgccaggaccaactgctgcgggtcgcggtggatactggcacgcagtataacaggatcagcgcggggtgtctctcaagactggggctggaaaaaagggtcctgaaagcgagcgccggagacctggcccccgggccacctactcaggttgaacaacttgagctccagctcgggcaagagacagtagtatgcagcgcccaggtggtggatgcagaatccccggagttttgcctcggcctgcaaactctgctgagcctcaaatgttgcatagaccttgaacatggggttctgaggctcaaggcccctttttctgaactaccttttctgcccctgtaccaggagccaggacaatag

SEQ ID NO: 18019 - DNA, 243 bp, synthetic construct
  source 1..243: mol_type = other DNA; note = Synthetic coding sequence
acaagttgctgtcgtccttcgagctctgtgtcacttctctgccacccggtttgtagctgtagccccgcctgccagccaacgtgctgtatccattctccatgccaggcctcgtgctatgtgcccgtcagctgccagccgattatttacgtgacgccgagttgtcagtccagcggctgttgccaacccccttgtacgaccgctctgtgtcggcctatcagttgctctacgccaagctgctgctag

SEQ ID NO: 18020 - DNA, 2013 bp, synthetic construct
  source 1..2013: mol_type = other DNA; note = Synthetic coding sequence
atggcgctcggcgaagagaaggccgaggccgaggcatccgaggatacaaaagcgcagagttatgggcgggggtcttgtcgtgaacgcgaactcgacatcccaggacctatgagcggtgaacaaccaccaagattagaggctgaaggagggctgatcagcccagtttggggcgctgaggggatacctgccccaacatgctggatcggaaccgatccaggaggaccttcccgggcacatcagccccaagcaagcgacgcgaaccgtgagcctgtagctgaacgctccgagcccgctttaagtggactcccaccggctactatgggaagcggcgacctgttactaagcggtgagagccaggtggaaaagaccaagcttagctcttcggaagagttcccgcagactttatctctgcctcgtacgacaacaatctgtagtggtcacgacgccgacaccgaggatgacccgtccctcgccgacctcccgcaagccttggacctgagccagcagccccactcaagtggacttagctgcctgtcccaatggaaaagcgtactgtctcccggctctgctgcccaaccaagttcatgctctattagcgcgagtagtaccggctcctctcttcaggggcaccaggagcgagccgagcccagggggggaagcctggccaaggtcagctcctctttagaaccagttgttccgcaggagccgtcctcagtagtgggcttgggtcccagaccccaatggtcaccgcaacccgtatttagcgggggcgacgcctctggccttgggaggcggcggcttagctttcaggctgagtattgggcctgcgtgctgcccgatagcctgccaccaagcccagatcgccacagcccactttggaatcccaataaggaatatgaggatctactcgattatacttatcctctcaggcctgggccacagttgccaaaacatctggacagtagggtgccagcagatcccgtgctgcaagattcgggggtggacctagatagtttttcagtctctcctgcgagcactcttaaatcgcctaccaacgtgtcgccaaactgccccccagccgaggctacagccctccccttctccgggcctagagaacccagccttaagcagtggccctctagggtgcctcaaaagcagggtggcatgggactggcttcatggagtcagctcgcttctacacctagagcaccgggaagccgcgacgccagatgggaaagacgcgaaccggccttgcgaggcgccaaggaccgcctgactattggcaagcatctggatatggggagcccccagctgagaacacgcgatcgtgggtggccctcccccagaccggaacgtgagaagaggacttcccagagtgcccgaaggcctacgtgcaccgaaagtagatggaaatcggaagaagaagtggaaagcgatgacgagtacctggctctgcccgcaaggctaactcaggtgagtagcctggtcagctacctcggcagcatctctaccctggtgacattgcccacaggggacatcaagggccagagtccactggaggtgagcgattcggacggaccagccagtttccccagttcatcaagtcagtcacagctgccgccaggagcagcacttcaggggtctggcgacccagaaggtcaaaacccctgttttttacgctcattcgtccgggcccacgattccgcaggagagggctcgctcggctcttcccaagccctgggggtttctagtggcttgttaaaaacccgcccttctctcccagctcggctggacaggtggcctttcagtgatccagacgttgaaggtcagttgccaaggaaaggtggagaacagggtaaggagtccctcgtacagtgcgtcaaaaccttttgttgtcagctggaggagcttatctgctggctttacaacgttgccgacgtgaccgaccacgggaccgcagcacggtcgaatcttactagcctcaaatcttcgctccaactttacaggttctag

SEQ ID NO: 18021 - DNA, 702 bp, synthetic construct
  source 1..702: mol_type = other DNA; note = Synthetic coding sequence
atgaaacaactgatcgaagatacggaaaagaacaaggtttacgtagctatggttactgattacggagccttcatcaaaattccagggtgtagaaagcagggactggtgcaccgaacacatatgagttcttgccgcgtggacaagccaagcgaaatcgtcgatgtgggggacaaggtatgggtgaaacttattggcagggagatgaaaaatgaccgcataaaagtcagcttaagcatgaaggtggtcaaccaagggacaggaaaagatctggacccaaataacgtgattattgaacaggaagaacggcgacggcggtccttccaagactatacagggcaaaaaattaccctggaagcagtcctgaatacaacatgtaagaaatgcggctgtaaaggccattttgctaaggattgcttcatgcaaccaggcggtacgaaatactcactgattccagacgaagaggaggagaaagaagaggctaaaagtgcggagtttgagaagcctgacccaaccagaaatccgtctaggaagagaaaaaaggagaaaaagaagaaaaagcatagagataggaagtcatcagactccgacagctccgactcagaaagcgatactgggaaaagagcccgccacacgtctaaggactctaaggctgcgaagaagaaaaaaaagaagaagaagcacaagaagaagcacaaggaatag

SEQ ID NO: 18022 - DNA, 492 bp, synthetic construct
  source 1..492: mol_type = other DNA; note = Synthetic coding sequence
atgggttggcgcctccttacgcaagacgaggggccagcattggtgccaggtggtcgcctgggcgacctgtgggactaccaccagcaccggtacctgcagggggtgcctgagggcgtcagggatctgcctccaggtgttgctttgcctcttgaaagcaatctggcgttcatgaacggagtttcctttaccaagggatgttacatcggtcaggaacttacggctaggacacaccatatgggagttatccggaagcggttgtttcccgtgcggttcttagaccctctgccaacatccggcatcacccccggcgccaccgtgctgacagcctctggccagacagtgggcaagttccgagccggccaaggtaatgtaggactggcgctgctctggagtgagaaaatcaagggaccgctgcacattcgggcttctgagggagcacaggtggcgctggccgcctccgtaccagactggtggccaaccgttagcaagtag

SEQ ID NO: 18023 - DNA, 804 bp, synthetic construct
  source 1..804: mol_type = other DNA; note = Synthetic coding sequence
atggctatggaaatgcgcctgcctgttgcaagaaaacccttatctgagagattaggcagggacaccaaaaagcacctcgtggtgcccggcgatactatcacaaccgataccggttttatgagaggtcatggcacttacatgggggaagagaagctcatcgcaagcgtcgccggatctgtggaacgcgtaaacaaacttatctgtgtaaaagctttaaaaacccggtatattggtgaggtcggtgatatcgtggtcggtcggattaccgaagtgcagcaaaagagatggaaagtcgaaactaactcccgcctcgactctgtgctactgttaagttccatgaatcttcccggtggcgaactgagaagaaggtccgctgaggacgaactggccatgagggggtttctccaagagggcgatctgatctcaggcgtgttagtgcaggtctctccaagcttggtcaaaagacagaagactcattttcacgatctgccatgtggggcgtccgtgatactcgggaataatggttttatctggatttacccaactcctgagcacaaggaggaagaggcgggaggtttcatagctaatcttgaaccagtgtcactggctgaccgggaggtgatatccaggctgcggaactgcatcatctcgctcgtgactcagaggatgatgctgtatgacacctcgatcctgtactgctatgaggcgtctttaccccatcagatcaaggacattctcaaaccagagatcatggaagaaatcgttatggagactcgacagagactcttggagcaggaaggatag

SEQ ID NO: 18024 - DNA, 3111 bp, synthetic construct
  source 1..3111: mol_type = other DNA; note = Synthetic coding sequence
atgccagtcttcaaggaagtgaaggtgcatctattagaggatgctggcatcgagaaagacgccgtgacccaggagacaagaatatccccttcggggatagactcggccactacggtggctgctgccactgcagcggccatagcgacagcagcacccctcatcaaagtgcaatcagatctggaagccaaagtcaactccgtgaccgagctcctgtccaagctgcaggaaacggacaagcatctacagagggtaaccgagcagcaaacaagcatccagaggaaacaggagaaactgcactgccacgatcacgaaaaacagatgaacgtctttatggaacagcacattagacatctggagaagctccagcagcagcagatcgacattcagacacacttcatctctgccgcactaaaaaccagttcattccagcctgtgtctatgccatcttctcgcgcggttgagaaatattccgttaaaccggaacacccaaacctggggtcttgtaatccctcgctctacaatacttttgcatctaagcaggcccccctgaaagaggtagaggatacttctttcgataaacagaagtctcccctagaaacacccgctccaaggagatttgcccctgttccagtgtctcgggacgacgagctgtccaagagagaaaatctgctggaggaaaaagagaatatggaggtgagctgccatagaggcaatgttaggctcctggagcagatcctgaataacaatgacagcctaacccggaagtcagaatcctcaaatactacctccctgactcgctctaagattgggtggactcccgaaaaaactaaccgatttccctcttgtgaagaacttgagactaccaaggtcaccatgcagaaatctgacgacgttttgcacgacttgggccagaaggaaaaagaaaccaacagcatggtccaaccaaaagagtctctgtccatgcttaagttacccgatctgccccagaatagcgtgaagctccaaactaccaacactactagatcagttctgaaggatgcggagaaaatccttcgcggggtacagaataacaagaaggttttagaggagaatctcgaggccattatccgggcaaaggacggcgctgccatgtactctttaatcaatgcactcagcacgaacagggaaatgagtgagaaaatccgcatccggaagaccgtagacgaatggattaagactatctccgctgagatccaggacgaactatcacgcaccgattacgagcagaaaaggttcgatcagaaaaaccagaggacgaagaaaggacagaatatgaccaaggatattagaactaacacccaggacaaaaccgtgaataaatcagtcatccctcgtaaacatagtcaaaagcagatcgaggagcacttcaggaacctgcccatgaggggcatgccagcttccagtctgcagaaagagcgaaaggagggactcctcaaagcaaccacagtgatccaggacgaggactacatgctgcaagtctacgggaagccggtgtaccaggggcatcgatccactttgaagaaaggaccgtatctccgattcaattcacccagtcccaagtcccggcctcagaggccgaaggtgatcgaacgggtcaagggaacaaaagtgaagagcatccgcacacagaccgacttctacgccacaaaacccaaaaaaatggactccaagatgaagcactccgtgcctgtactgcctcacggcgatcagcaatatctgttctctccttcccgggagatgcctactttttcgggcactctagaagggcatttgatccccatggccattctgctaggacagacacagtcgaattctgatacgatgccacctgccggggtgattgtctccaaacctcacccagtcaccgtaactacatctatccctccatccagtagaaaagttgaaaccggggtgaagaaacccaatattgcaatcgtcgagatgaaatctgagaaaaaagatccccctcaactgaccgtgcaggttttgccctccgtggacatcgatagcatcagcaacagcagtgccgacgtcctgtcgccactgtcctcacctaaggaggctagcttgcccccggtgcagacttggatcaaaaccccagagatcatgaaggtagacgaggaggaagtcaagtttcctggcaccaactttgacgaaattattgacgtcatccaggaagaggagaagtgtgacgagatcccagacagcgaaccaattctggagtttaacagatctgtaaaggcagattctaccaagtacaatggcccaccattccccccagtcgcctccaccttccaacctacggcagacatcctggataaagtcatagaaagaaaagagacacttgaaaatagtctgattcagtgggtggaacaggaaatcatgtcgaggattattagcggtctcttcccggtgcaacagcagatcgccccgagtatcagtgtctcagtgagcgagacgtcagagcctctgacatctgacatcgtggaaggtacaagctctggagccctgcagttgtttgtggacgctggcgtgcccgtcaattcgaatgtgatcaagcacttcgtcaacgaggccctggcagaaaccatcgccgttatgctaggcgatagagaagccaaaaaacagggtcccgtggccacaggggtgtctggagatgccagcacgaatgagacatacttacctgcccgcgtgtgcacgccattacccactccccagcccacaccaccttgctcgccaagctcacctgctaaagaatgcgtcttagtgaaaaccccggattcatcaccatgcgacagtgatcacgacatggccttccccgttaaggaaatctgcgccgaaaagggggacgatatgcccgctatcatgctggtcaacactccgactgttactcccacgaccacaccgccaccagccgctgctgtgtttacacccacactgtccgacatatcgatagacaaactgaaagtctctagcccagagcttcccaagccgtggggcgatggtgacttgccactagaagaagagaatccaaatagcccacaggaagagcttcaccctcgagccatgtag

SEQ ID NO: 18025 - DNA, 3351 bp, synthetic construct
  source 1..3351: mol_type = other DNA; note = Synthetic coding sequence
atgtatggcagtgccagaagtgtgggcaaagtagaaccctcttcacagtcccctggtcggtcgcccaggctgccacgctcaccacgccttggtcatcgtaggaccaacagcaccggtggatcaagtggaagcagcgtgggaggggggtcgggcaagaccctttctatggaaaacatacagtcacttaatgccgcctacgcgacgtcaggtcccatgtatctatccgatcatgagaacgtgggcagtgagactcccaagtctacaatgacattggggcggagcggcggccgcctgccatacggcgtaaggatgactgctatgggatcatctccgaacattgcctcaagcggcgttgcaagcgacacaattgcctttggcgagcaccatttgccccctgtaagcatggcatcaacagttccccacagtctaaggcaggccagggacaatactattatggacctgcagacacagttgaaggaggtcctccgcgaaaacgatcttttgagaaaggacgtggaggttaaagaaagtaagttgtccagttcaatgaattctataaaaactttttggtcccctgaactcaaaaaggagcgagctctgcgcaaggatgaagcttcaaagatcaccatttggaaggaacaataccgcgtcgtccaggaggaaaaccaacatatgcagatgactatccaagcgttgcaagacgaactgaggatccagcgggacctgaaccagctctttcagcaggatagctcgtctcgtacaggcgaaccctgtgtggctgaactcaccgaagagaattttcagcggcttcacgcagagcacgaaagacaggcaaaggagctgttccttctgcggaaaactcttgaagagatggagctgcgaattgaaacccagaagcagactttgaacgcccgcgacgagtcaattaaaaagcttctggaaatgctgcagtcgaaaggactgtctgccaaggcaactgaggaagatcatgagaggaccagacggctggccgaggcggagatgcatgtgcaccatttagagagcctgctggaacagaaggaaaaagagaacagtatgctccgcgaggagatgcacagacgcttcgaaaacgctccggattcagcaaaaacaaaggctcttcagaccgtcatcgaaatgaaggatagcaagatctcatccatggagcgcgggctgagggaccttgaggaagaaattcaaatgttgaaatcaaatggcgccctaagcactgaggaaagagaagaggagatgaaacaaatggaggtgtaccggtctcactctaaatttatgaaaaacaaggtagaacagcttaaggaggagctctcctcaaaggaggctcagtgggaggaacttaaaaaaaaagctgcaggcctgcaggccgaaataggccaggtcaagcaggagttaagccgcaaagataccgagttgctggccttgcagaccaagctggagacactgacaaatcagttcagcgactccaaacaacatatcgaagtcctaaaggaatctctcacggccaaggagcagcgtgctgctatactgcagacagaggtcgatgccctgaggctccggctggaagaaaaggagaccatgctgaataagaagacaaagcagattcaggacatggcggaagagaagggaacccaggcgggggaaatccacgacttgaaggatatgctagacgtgaaggaacgaaaagtcaatgtgttgcaaaaaaaaatcgagaatcttcaagaacaactccgggataaggaaaagcagatgtccagtctgaaagaacgagtgaaatctttacaggctgatacgaccaatacagacactgctctcacaaccctggaggaggccctggccgagaaagagagaaccattgaaagacttaaagaacagcgcgatagggacgaacgcgagaaacaagaggagatcgacaactataagaaggatctgaaggacctgaaggagaaggttagccttctgcagggggatctttccgagaaggaagcgtccctcctcgatctgaaagagcacgccagctccctggcgtcttcaggcctcaagaaggattctagattaaaaaccctagagattgcactagagcaaaagaaagaagagtgtctcaagatggagtcccagcttaaaaaggcccacgaagctgcattagaagcccgggcctcacccgagatgtccgaccggatccaacatctggagcgggaaatcacaaggtataaggatgagtcttcaaaggcgcaggcggaagtcgatagactgctggaaatcctaaaggaggtggagaacgagaagaacgataaagacaaaaagatcgcggaattagagagacaggtcaaggaccagaataaaaaggtggctaatcttaaacacaaggaacaggtagaaaagaagaagtctgctcagatgttggaggaagccagaagacgggaagacaatctcaatgactcctctcagcagctgcaggactcactgaggaagaaggatgacagaatcgaggagcttgaggaggccctcagggaatctgtgcagatcacagctgaacgggagatggtgctcgctcaggaagaatccgcaaggacaaacgctgagaaacaggtggaggaacttctgatggctatggagaaggtcaagcaagaattagagtccatgaaggcaaaattatctagtacgcagcagtcccttgcagaaaaagagacacacctaaccaatttgcgtgcggaaagacgaaagcatctggaagaggttctggaaatgaagcaggaggctctgctcgccgccattagcgagaaggacgcaaacatcgctctcctggagctttcatccagcaaaaagaagacgcaggaggaggtagcggccttgaagagagagaaagaccgcctcgtccagcagctcaagcagcagactcagaaccgcatgaaactcatggctgacaattatgaagacgatcactttaagagctcgcacagcaatcagacaaatcataagccctctcccgatcagatcattcaacctctgctggagctggatcagaacaggagcaaactgaagctgtatattggtcatctcaccacactctgccacgatagggatcctctaatcttgcgtggcctcactccacctgccagttacaatcttgatgacgaccaggcagcctgggagaacgaactgcagaagatgacccgcggtcagcttcaggatgagctggagaaaggcgagagggacaacgccgaattgcaggagttcgcgaatgccatcctccaacagatcgccgaccattgtcctgatattctggagcaggtggtaaatgcattggaagaaagtagctag

SEQ ID NO: 18026 - DNA, 816 bp, synthetic construct
  source 1..816: mol_type = other DNA; note = Synthetic coding sequence
atgcgccagctccacccagaagccatcgcggctatacagtctaaggctctattttccaaagccgaggagcagttgctcagcaaggttggatcaacttcacagccaaccctggaaacttttcaggatcttctgcatcgtcaccccgacgccttttatctggcgcgaactgctaaggctcttcaggcccattggcagttgatgaagcagtactatctgcttgaggatcagactgtacagccattgccgaagggtgatcaggttttgaatttttctgatgcagaggacctcatcgacgattcaaagctgaaggacatgagagatgaagtacttgagcacgaattgatggtagccgacagaagacagaagcgcgagattcgacagttggagcaggagctgcataaatggcaggtcctggtggattccatcactgggatgagtagtcctgactttgacaaccagaccctcgccgtcctcagagggcggatggtccgttatttaatgcgatcgagagagattactctgggccgcgccactaaagacaaccagattgatgtagatctgtcactcgagggccctgcatggaagatttcacggaagcagggagtcatcaagctcaagaacaacggtgacttttttatcgctaacgagggacgccgacctatttatattgacggcaggcctgtgctctgtggctccaagtggcggttgagtaataattccgtggttgagattgccagtttaaggttcgtgtttctgatcaatcaggacctgatcgccctcatccgcgcggaagctgctaaaattacaccccagtag

SEQ ID NO: 18027 - DNA, 2751 bp, synthetic construct
  source 1..2751: mol_type = other DNA; note = Synthetic coding sequence
atggaaatgccactgcctcccgatgaccaggagctgcgcaacgttatcgacaagcttgcccagttcgtggcccgtaacgggcccgagttcgaaaaaatgacaatggagaagcagaaagacaatccaaagttctccttcctgtttggcggagagttctattcgtattacaaatgtaaactcgctctggaacagcagcaactgatttgtaagcagcaaactccagagctggaacctgctgcaacaatgccacccttgcctcagcccccactggcacctgccgctccgatccctcccgcccagggggcgcctagtatggatgaactcatccagcagtctcagtggaatctccagcagcaagaacaacacctccttgcactccgccaggagcaagtgaccgcagcggtggcccacgccgtcgagcagcagatgcagaagctgctcgaggagacccagctggacatgaacgagttcgataaccttctccaaccaattattgacacatgtactaaagacgcaatcagcgccggcaagaactggatgttcagtaacgcaaagtcccccccccattgcgaattgatggccggccacctccggaatagaattactgccgacggtgctcacttcgagctccgtttgcaccttatatatctaatcaatgacgtcttgcatcactgccagcggaagcaggcccgggaactgctggccgcactccagaaggttgttgtgcctatatattgcacttcattcctcgcggtggaggaggacaagcagcagaagatagcccggctgctgcagttgtgggagaaaaacggatacttcgatgatagcatcatccaacagttacagtcccctgctctggggctgggacagtatcaggccactctgattaacgagtattcctctgtcgtgcaacctgtgcagctcgccttccagcagcagattcagaccctgaaaacccagcacgaggagttcgtgacatcgcttgcccaacagcaacagcagcagcagcagcagcaacagcaacttcagatgcctcagatggaagcagaggtaaaggccacaccacccccaccagcaccaccccctgcccccgccccagctccagccatccccccaacaactcaacccgatgactcaaagcccccgatacagatgcctgggtcctcagagtatgaggccccaggcggcgtgcaggaccctgctgctgctggcccccgtggccccggtccacacgatcagatcccacctaataaacccccctggttcgatcagccccatcccgtggcaccctggggtcagcaacagccccctgagcaacccccttatccccatcaccaaggaggtcctccccactgccccccatggaacaatagtcatgagggcatgtggggtgagcaaaggggcgatccaggctggaatggtcaacgggatgccccttggaataaccaacccgatgctgcatggaactcacagttcgagggaccgtggaattcccagcatgagcagcccccctggggagggggtcagcgtgaaccaccatttcggatgcaacgaccacctcactttcgtggcccttttcccccccaccaacagcatccacaattcaatcagcccccccatccgcacaattttaatcggtttcctccaaggttcatgcaagatgattttccaccccgccacccgtttgagagacctccttatcctcatcgctttgactatcctcagggcgacttcccagcagagatgggcccgccacatcatcacccgggccacagaatgccccatccagggattaacgaacaccctccttgggctgggccccagcacccagactttgggcctccgccacacggcttcaatggacagcctcctcacatgagacggcaggggcctccccatataaatcatgacgacccatctttggtgccgaacgtcccatattttgaccttcctgccggcctcatggcaccacttgttaaactcgaggatcatgagtacaagccgctggacccgaaagacattcgcctgccgccaccaatgcctccctcggaacggctcctggcagctgtggaggcattctattcgccaccaagtcatgatcggccccgaaattctgagggctgggaacagaacggcctctacgagtttttccgagccaagatgagggctaggagaagaaaggggcaggaaaagagaaacagcggcccctcgcggtccagatctcgctcgaaatcccgcggtcggtctagctcgcgttccaacagtcgcagcagtaaatctagcggaagttattctcgatccagatcaagaagctgcagtcggagttattcccgcagccgttctcgaagccgaagcaggtctcggtcatcacggagccggagccggtcacagagcaggagcagatcaaagagctactcgccaggaaggagacggcgctctaggagccgcagccccactccccctagctctgctgggctcgggtccaatagtgcccctccaattcccgactcacgtttaggagaagagaacaagggacaccagatgctggtgaaaatggggtggtctgggagcggcggcctcggtgccaaagagcagggtatccaagacccaataaagggcggggatgtccgggacaaatgggatcaatacaagggcgtaggagtggccctcgacgacccctacgagaactatcgccgaaataagtcatactcattcatcgccaggatgaaagcacgcgatgagtgtaagtag

SEQ ID NO: 18028 - DNA, 963 bp, synthetic construct
  source 1..963: mol_type = other DNA; note = Synthetic coding sequence
atgtctaagtcggagtccccaaaagagcccgaacagttaaggaagctgttcatcggaggcctgagtttcgaaaccacagatgaatccttaaggtctcacttcgagcaatggggcacccttacggattgcgtggtaatgagagaccccaacactaaacgtagccggggctttggcttcgtgacttacgctactgtagaagaggtggatgctgcgatgaatgcacgccctcacaaggtggacggacgggtggtcgagcctaagcgggcagtgagccgcgaggacagccagaggccgggtgcacacttgactgtgaagaagattttcgttggaggcatcaaggaagataccgaggagcaccatcttagagactacttcgaacagtatggtaagattgaggtgatcgagatcatgactgatagggggtcaggaaaaaaacggggatttgcctttgtgacgtttgatgaccatgatagcgtcgataagatcgtaattcagaagtatcacaccgtaaatggacacaattgcgaggtgcgtaaggctctcagcaaacaggagatggcctctgcgtcctccagccagcgcggtaggtctggtagcggcaacttcgggggcggcagaggtggaggttttgggggaaacgacaacttcggaagaggtggaaattttagtgggcggggagggttcggtggatcccggggaggcggtggatatgggggatctggggacggatataatggcttcgggaacgacggtagcaattttggaggaggaggcagttacaatgattttggcaattacaataatcagagctcaaactttggccctatgaagggagggaacttcggagggagatcaagcggaccatacggcgggggtggacagtactttgccaagcctaggaatcagggtgggtacggaggcagctcctcgagctcatcctatggttcaggacgtagattctag

SEQ ID NO: 18029 - DNA, 735 bp, synthetic construct
  source 1..735: mol_type = other DNA; note = Synthetic coding sequence
atggaactgaccatcttcatactcaggctcgctatatatatactgactttcccgctatacctgctaaacttcctgggactctggtcatggatttgtaagaagtggttcccctacttcctcgttcggttcacggtcatttataatgagcagatggcctcaaagaaacgagaactgttttcgaacctgcaagagtttgccggtccatccgggaagctgagtctacttgaagttggttgcggaaccggagcaaactttaaattttatccaccgggttgccgagttacttgtattgacccaaacccaaattttgaaaagttcctgattaaatctattgctgaaaaccggcacttgcagtttgagcggttcgtcgttgccgctggggagaatatgcaccaggtcgccgacggaagcgtggatgtggtggtttgcacacttgtcctgtgctctgtgaagaatcaggagcgaatccttcgggaggtctgtagggtgctcaggcctggcggcgcgttttactttatggagcatgttgcggccgagtgcagcacatggaactacttttggcaacaggtgttagaccctgcctggcatcttttgtttgatgggtgcaacctaaccagggaaagttggaaagccctagagcgggctagcttttcaaagcttaaactgcagcatattcaggcgcctcttagctgggaactggtgcgcccacatatttacgggtatgctgtcaagtag

SEQ ID NO: 18030 - DNA, 4125 bp, synthetic construct
  source 1..4125: mol_type = other DNA; note = Synthetic coding sequence
atgacgtctgccgcagagatcaagaagcctccagtagcccccaagcccaaattcgtcgtcgccaataataaacccgctcctccacctatcgctccaaagcctgacatagtgatctcatccgtaccacaatccactaaaaaaatgaagcccgctatagcacccaaacccaaggtgttgaagaccagccctgtccgggagatcggacagagcccctctaggaaaattatgttaaatttagagggccataaacaggagctggccgagagcaccgataacttcaactgcaaatatgaaggtaatcagagtaatgattacattagccctatgtgcagctgctcatcagaatgtattcataaactggggcatagagaaaacttgtgcgtgaaacagctcgtactcgaaccgctggagatgaacgaaaacttggagaattctaagattgatgagacactcaccatcaaaacgcgatcgaagtgcgacttatacggcgaaaaagccaagaaccagggaggcgtcgtcctcaaagcaagcgtattagaggaggaattaaaagacgcgttaatccatcagatgccccccttcatcagtgcacaaaaacacaggcctaccgacagccccgagatgaatggtggttgtaattccaatggccagtttcggattgagtttgcggaccttagcccttctccgagtagctttgagaaggtgcctgaccaccattcttgccacctacaactgccctcagatgagtgcgaacattttgaaacatgtcaagatgacagcgaaaagagcaacaactgtttccagtcatcagagctggaagcacttgagaatggcaagagatctaccctaatttcaagcgatggtgtgtcgaagaagagcgaagtgaaagacctggggccgctcgaaatacatctggtgccctatacccctaaatttccaacacctaagccgaggaagacacgaactgcccggctcctgcgacagaagtgtgtggataccccctctgagagcactgaagagccaggcaatagcgacagcagcagtagttgtctgacagaaaactccttgaagatcaataagatcagcgtactgcatcaaaacgtcctttgtaagcaggagcaggtggacaaaatgaaattaggcaacaaaagtgagctcaatatggagtctaactcagacgctcaggacctggtgaactctcagaaggctatgtgcaacgagactacgagttttgaaaagatggcgccaagcttcgacaaggactcaaacttatccagcgattccaccactgtagatggaagctccatgagtctggccgtggatgaggggacgggttttattagatgtaccgtgtccatgtcgttacccaagcaactgaaactcacctgtaacgaacaccttcaaagtgggcgtaacctcggagtttctgcccctcaaatgcaaaaggaaagcgttattaaagaggaaaattcactaaggattgtacctaaaaaaccgcagaggcattcccttcccgccacaggcgttcttaagaaggcagcctctgaggagctgcttgaaaagagcagctatccttcctccgaagagaagtcttccgagaagtccttagaacggaaccacctgcagcatctgtgcgcccagaatcgcggagtgtcctccagcttcgatatgccgaagcgcgcctccgagaagccggtgtggaagctccctcatcccattctccctttctcggggaatccggagtttctgaaatctgttaccgtgtccagcaatagcgagccctctaccgcactgactaagcccagggcaaagagcctctctgctatggatgtggaaaagtgtaccaagccatgcaaggattccacaaaaaagaatagctttaaaaagctactttccatgaagctttccatctgttttatgaaatcggactttcagaagttctggagtaagtcctcccaattgggagataccaccacagggcacctgagctcaggagagcagaaagggatcgaaagtgactggcagggacttctcgttggggaggagaagcgcagcaaacccatcaaggcatactccactgagaattatagtcttgagtcccagaaaaagcgcaaaaagagccgggggcagacgagtgctgccaacggactgcgcgctgaatctctggacgaccagatgctgtcccgagaaagctccagtcaggctccctataagtctgtgacatctttgtgtgcgcctgagtacgagaacattaggcattacgaagagatacctgagtacgagaacctgcccttcatcatggctattcgtaaaactcaagagttagaatggcagaactccagtagtatggaagacgctgacgccaacgtttacgaggtggaagagccttacgaggccccggatgggcaactgcaactggggccgagacaccagcattcctcatctggagcaagtcaagaggagcagaatgacttgggtctgggagatctccccagcgatgaagaggagattatcaattcatcagatgaagacgacgtgtcatctgagtcatctaagggagaacctgaccccctcgaggataaacaggatgaggataacggtatgaaaagcaaggtgcatcacattgccaaggagataatgtccagcgagaaggttttcgtggacgtgctcaagttgttacatatcgactttagagacgctgtggcccacgcctcccgtcagttaggtaagccagttattgaagaccggatcctaaatcagattctgtattatcttccccaactgtatgagttgaaccgtgatcttttgaaggaactggaagaaaggatgctgcactggacagaacagcaacgcatcgcagacattttcgtgaaaaagggtccttatctgaagatgtatagcacctatatcaaggagtttgacaaaaatattgccctgctcgatgaacagtgcaaaaagaacccaggatttgcggctgtggtgcgggaatttgagatgagtccaagatgtgccaacctcgctctaaaacactatcttttgaagccggtacagaggattccccagtataggctcctcctgactgactatctcaaaaacctcattgaagacgctggtgactatagggacactcaagacgctctggcagttgtgatcgaggtggctaatcacgccaatgataccatgaaacaaggagacaatttccaaaaattgatgcaaatacagtatagtttgaatggtcaccatgaaatcgtccagcccggcagagtgttcctcaaggagggtattcttatgaagttgtctaggaaagtcatgcagccccgcatgttctttctgttcaacgatgctctcctgtacaccacgccagtccagagcggcatgtataagctcaataacatgctgtctttagccgggatgaaggtgcgcaagccaactcaggaggcttatcaaaatgaactgaaaatagagagcgtggagcgcagcttcatcctctcagcttcaagcgcaaccgagagggatgaatggctcgaggctatcagcagagccatcgaggagtatgctaagaagagaattacattctgtccttccagaagcttggatgaggccgactctgaaaacaaagaagaggtgagcccactgggctctaaggctcccatttggattccggatacccgggctaccatgtgtatgatttgtacgagcgaattcaccctcacctggcgacgccaccactgcagagcctgtggtaagatcgtgtgccaggcctgcagttcaaacaaatatggtctggactaccttaagaaccagcccgccagggtgtgcgaacattgctttcaggaactgcagaaactggatcaccagcactctccaaggatcggatcccccgggaatcataagagtccaagttcagcgctgagctcagtgttacattctatcccttcagggcgcaagcagaagaaaatccccgccgcgttgaaagaggtcagtgcgaacactgaagattccagtatgtctggttacctgtatcggtccaaggggaataaaaagccctggaagcacttctggttcgtcattaagaataaggtcttgtatacgtatgccgcatcagaggtcagatccgagatctag

SEQ ID NO: 18031 - DNA, 1446 bp, synthetic construct
  source 1..1446: mol_type = other DNA; note = Synthetic coding sequence
atggcttcggctgccagcgtcaccagcctagccgatgaagttaattgcccgatatgtcagggtacgctgagagagccagtgacaatagactgtggacataatttttgcagagcctgtttgaccaggtactgcgaaattcctgggcccgacctcgaagaaagcccaacttgccccctgtgcaaagagccctttaggcctggctcctttcgtcccaactggcagcttgctaatgttgtggagaacatcgagcgtctgcagctagtgagcacactggggctcggcgaggaggatgtctgtcaagaacacggcgagaaaatatacttcttttgtgaagacgacgagatgcaattatgcgtagtatgccgtgaggctggcgaacatgccacccacactatgagattcctggaggatgccgcagctccctaccgagagcagattcacaaatgtctgaagtgtttaagaaaggagcgcgaagagatccaagagattcagtcaagggagaacaaacgcatgcaggtccttcttacacaggtgagcaccaagcgacaacaggtcatcagcgagttcgcccacctccgaaaattcctggaagaacagcagtctattcttctggctcagcttgaaagtcaagacggggacatcctcaggcaaagggatgaattcgatcttctcgtggcaggcgagatatgcaggtttagcgcactaatcgaagagcttgaggagaaaaatgagcgccccgcaagagaactgttgactgatatccgatccaccctaatccgctgcgagaccagaaagtgcaggaaacctgtcgccgtttctcccgaacttggtcagcgcattcgcgacttcccccagcaggcgctgcctctccagcgagaaatgaagatgtttctggaaaaccttcccaatcatctagtcattcctaccgcccacatctccctggacccccagaccagtcaccctaaactgttgttgtcagaggaccaccagcgggcgcagttctcttacaaatggcaaaattcccccgacaatccccagagattcgacagggccacctgtgtccttgcgcacactgggattacaggtggccgacatacctgggtagtctccatcgacttggcccacgggggttcttgtaccgtgggggtcgtgtccgaggatgtccaacggaagggagagctcagactgcgaccagaggagggcgtatgggctgttcgcctagcttggggctttgtatccgctctgggatcgtttcccacccgtctgactcttaaggagcagccccgccaggtgcgggtgtcattggattacgaggtcgggtgggtgaccttcacaaacgcggtaaccagggagcctatttatacgttcaccgcaagtttcacgcgcaaggtgatcccattctttggactgtggggcagaggctcgtccttcagtttaagctcctag

SEQ ID NO: 18032 - DNA, 468 bp, synthetic construct
  source 1..468: mol_type = other DNA; note = Synthetic coding sequence
atggacacaatgatgctaaatgtccggaacctcttcgagcaactagtaagaagagtagagatactcagcgaaggcaacgaggtacagttcattcagctagccaaagactttgaggactttaggaagaagtggcagcggacagaccacgagctgggcaaatacaaggacctgctgatgaaggccgaaaccgagcggagtgcactagatgtcaaactgaagcacgcacggaatcaagtggatgttgaaatcaaacgtaggcagagagcagaagctgattgcgagaagctggagcggcagatccaactgattagggaaatgttaatgtgtgatacttccggatccatacagctctccgaagagcagaaaagcgcactggcgttcctcaatcggggccagcctagtagctccaatgccggcaataaaagactgtctaccattgatgagtccgggagcatcctctccgactag

SEQ ID NO: 18033 - DNA, 420 bp, synthetic construct
  source 1..420: mol_type = other DNA; note = Synthetic coding sequence
atggacaccatgatgctcaatgtgaggaacttgtttgaacagctggtgaggcgagtggaaattttgagtgagggaaatgaggtgcagttcatccagcttgctaaggatttcgaggattttcgcaagaaatggcagagaactgaccatgagctggggaagtataaggatctccttatgaaagcggagactgaaaggtctgcacttgacgtgaagctgaaacatgctaggaatcaggtcgatgtggaaataaaacgtcggcaacgtgccgaagctgactgcgagaagctcgaaagacagattcagctgattcgagagatgctgatgtgcgatacaagtggctcaatacagttatccgaggagcaaaagagcgcccttgccttcctaaaccggggccaaccctctagctccaatgccggatag

SEQ ID NO: 18034 - DNA, 3282 bp, synthetic construct
  source 1..3282: mol_type = other DNA; note = Synthetic coding sequence
atgggcggcaaggcctggcccagacgcgctgtggggaccgccggtggtccctgtgccgaacagatcagtgcgccattccagactctgttaatgccacatctgcctttggcatcctttcgtcccccgttttggggcctcaggcattctagaggcctgcctcgattccacagcgtctccacccagtctgaaccacatggatcaccaatctcccgccggaatcgggaggctaaacagaagagactgcgagagaagcaggccacactggaggctgagattgccggcgaatctaaatctccagcagagtccatcaaggcctggcgtcctaaagagctagtgctttatgagattcccaccaaacctggagaaaagaaagacgtgtccgggcctctgccaccagcctacagtcctcgctacgtggaggctgcctggtacccatggtgggtgagagagggctttttcaagccagagtatcaggctcgccttccgcaggcaacaggggagaccttcagtatgtgtattccacctccaaacgttactggctcattgcacataggccacgctctcacagtggccatccaagatgcactggtccgttggcaccgcatgaggggagaccaggtcctgtgggtaccgggctctgaccacgccggtattgcaactcaggccgtggtcgagaagcaattgtggaaggagagaggggtccgccggcacgagcttagccgcgaggcgttcttgcgcgaggtatggcagtggaaggaagccaaaggaggcgaaatatgcgaacagctcagagccctaggcgcttcgttggattgggaccgggagtgcttcaccatggatgttggtagtagtgttgcagtgaccgaggcttttgtgcgcttgtataaggccggattactgtataggaaccaccaattggtgaattggtcctgtgccttgagaagcgctatttcagacatcgaagtcgagaacagaccactgccaggccatacccagttaaggctccctggatgccccacaccagtcagtttcggcctgctattcagcgtggcttttcctgtagacggggagccagacgccgaggtggtggtgggcaccacacgaccggaaactctcccaggcgatgtcgccgtggcagtgcatccagatgactcaaggtatacacacctacatggaagacaactgcgccatccccttatgggccaacccctgcctctgatcacggattatgccgtacagccgcacgtcggtacaggagcagtgaaggtgacacccgctcactcccccgctgatgctgagatgggcgcaaggcacggacttagccccctcaatgttatagctgaagatggcaccatgactagcctatgtggagattggctccagggcctgcaccgatttgtagcacgtgagaaaatcatgtctgtgctctctgagtggggactttttagaggcctgcaaaaccaccccatggtgctgcctatttgcagtagaagtggtgatgtgattgaatatctgcttaagaatcagtggttcgtcaggtgccaggagatgggcgccagggccgctaaggccgttgaatccggtgctctggaactttcaccatcatttcatcagaaaaattggcagcactggttcagtcatattggagattggtgcgtctcccgccagttgtggtggggccaccagatccccgcatatctagtcgtggaagaccatgcccaaggtgaagaagactgttgggtggttgggcgttctgaggccgaagctagggaagttgcagcggagcttaccggcaggccaggagccgagctgacactagagcgcgatccggacgtgctggacacatggtttagcagcgctctgtttcctttttctgccctcggttggccccaagagacaccagatctggcccgattttatccactgtcgcttctggaaaccgggtctgacctactgctgttctgggtagggcggatggtaatgctgggtacccagttaacgggacaactaccatttagtaaagtgctccttcacccaatggttagagatcgacagggcaggaagatgtctaagtctctcggcaacgtactggatcccagggacatcataagtggtgttgaaatgcaagtattgcaggagaaattaagaagtggcaacctcgaccccgccgagttagcaattgtggccgctgcccagaaaaaagatttcccccacggaatccccgaatgcggaacagacgccctgcgcttcacgttatgcagccacggggtgcaggctggcgatctccatctttcagtgagcgaagttcagagctgccgccacttttgcaataagatctggaatgcacttcgctttattcttaatgccttgggcgagaagtttgtgccccagcctgcagaggaactgagcccttcttctcctatggatgcgtggatactctcacggctagcattggccgctcaggagtgtgagcgaggcttcctaacaagagaactgagcctagtgacacatgcactgcatcatttttggcttcataacttgtgtgacgtctacctggaagccgtgaagccagttttgtggcacagcccgcgtccattgggtcccccacaggttctcttcagttgcgcagatctcggactgcgcctcctggcaccactgatgccgtttctggccgaggagctgtggcagcggttgccacccaggccaggctgcccaccagccccaagcatctctgtggcaccatacccatccgcctgttccctggagcattggaggcagccggaactggaaaggaggttcagccgtgtccaggaggtcgtacaggtgttgcgggccctgcgagccacttatcagctgactaaagcacgccccagggtcctgctgcagagcagcgagcctggagatcagggacttttcgaagcctttttggaacctctgggaacacttggttattgcggggctgtgggcctcctgcctccaggggcagcagctccatcagggtgggcccaagcacccctgagcgatacagctcaggtgtatatggaattgcagggtctcgtagacccccagatccagttaccacttctcgcggcgcggcgttataaattgcagaaacaacttgattccctgacagccaggactccatcagagggcgaggctggaactcagaggcaacagaaactttcaagcctgcagcttgagctctctaagttggacaaagcagccagccatttaagacaactcatggatgagccccctgcccccgggagccctgaactctag

SEQ ID NO: 18035 - DNA, 231 bp, synthetic construct
  source 1..231: mol_type = other DNA; note = Synthetic coding sequence
atgaatagtgtcggcgaagcatgcaccgatatgaaaagagagtatgaccagtgtttcaatcgatggtttgctgaaaagtttctgaaaggcgatagtagtggagatccctgtaccgacctatttaaacgctaccaacaatgcgtgcagaaagctattaaggagaaagaaatcccaatcgagggcctggagtttatggggcatggcaaggaaaaacctgagaactcctcatag

SEQ ID NO: 18036 - DNA, 735 bp, synthetic construct
  source 1..735: mol_type = other DNA; note = Synthetic coding sequence
atggaactcaccatctttatcctgaggttggccatctacatcctcaccttcccactgtatctcctaaactttctcgggttgtggtcttggatctgcaagaagtggttcccatatttccttgtacgctttaccgtcatctataacgaacagatggcctctaaaaaaagggagctcttttctaatctgcaagagttcgctggaccatctggcaaactgtcgcttctcgaagtgggatgcggtaccggcgccaacttcaagttttaccctccaggttgtagggtgacatgtattgacccgaaccctaactttgagaagtttctgatcaaaagcattgcagaaaataggcacctccagttcgaacggtttgtggtcgcggctggggagaatatgcaccaggtggcggacggatcagtcgacgttgtggtctgcaccctggtgttatgttccgtgaagaaccaggagaggattctgagggaggtgtgccgtgtgttgcgtcctggcggagcgttctatttcatggaacacgttgccgcagaatgtagtacttggaactatttctggcagcaggtgctggatcctgcttggcacctcctttttgacggctgtaacttgacgcgggagagctggaaggccctggagagggcatcattctccaaattgaagttgcaacatatacaggctcctctgtcctgggaacttgtacgcccccatatttacggttatgcagtcaagtag

SEQ ID NO: 18037 - DNA, 774 bp, synthetic construct
  source 1..774: mol_type = other DNA; note = Synthetic coding sequence
atgccccaccttcctctggcaagctttaggccgccgttttggggcttaaggcattcaaggggattaccacggtttcactccgtgtccacgcaatctgagccccacggatcccctatttctcgtcgcaaccgtgaggccaagcaaaaacggctaagggagaagcaggccacattagaagccgagatagcaggggagagcaaatccccagctgaatccattaaggcctggcgtcctaaggaacttgtgctttacgaaataccaacaaagcctggtgaaaagaaggacgtgtctggcccgctgcctccggcatattctcctcgatacgtcgaggcagcatggtacccttggtgggttcgcgaggggttttttaagccggaataccaggccaggctgccacaggctaccggtgagacattctctatgtgtatacctccccccaacgtcacaggatcactgcacatcggccatgccctcaccgtggctattcaggatgctctcgtaaggtggcataggatgagaggcgatcaagtgctatgggtgcccgggagcgaccacgccggaattgcgacacaagctgtcgttgaaaagcagctgtggaaagagcggggcgtgcggaggcacgaactgagtcgggaagcttttctccgggaggtgtggcagtggaaggaagctaaggggggcgagatttgtgagcaattacgagccctcggcgcatctctggactgggaccgggtcttttaccacggctgttggctgctatctggatgcgattag

SEQ ID NO: 18038 - DNA, 804 bp, synthetic construct
  source 1..804: mol_type = other DNA; note = Synthetic coding sequence
atgagtaaatccgaaagcccaaaggagcccgagcagctaaggaaactgttcattggcggattgtcttttgaaaccactgatgagtcactcagatctcacttcgagcagtggggcacgttgacggactgcgtggtgatgcgcgatcccaacaccaagagatcaagaggtttcggattcgtgacatacgccactgtcgaggaagttgatgcagccatgaatgctcgtccgcacaaggtcgatgggcgcgtggtggagccaaagcgcgccgtctcccgtgaggatagccagagacctggggcccatctgactgtgaagaagatctttgttgggggaatcaaggaggacaccgaggagcaccacctgcgtgactattttgagcagtatgggaagatcgaggtaattgagataatgacggatcgtggatctggcaagaagcggggctttgcgttcgttaccttcgatgaccacgacagcgtggacaagatagtcattcagaagtaccacaccgtcaatgggcataattgtgaggtgcggaaagccctgagcaaacaagagatggcgtctgcatcatcatctcaaagaggccgatccggctccggcaattttggagggggcagctataacgattttggtaattataataatcagagctctaatttcggcccgatgaaaggtggcaacttcggcggcaggtcgagcggaccatatggtggcgggggtcagtacttcgccaaaccaaggaatcagggaggctatggaggctcctcttcttcttcctcttatggcagcgggaggcgattctag

SEQ ID NO: 18039 - DNA, 531 bp, synthetic construct
  source 1..531: mol_type = other DNA; note = Synthetic coding sequence
atgaatgaatccaaacctggcgatagtcagaacctggcttgcgtgttctgccggaagcacgacgactgcccaaataagtatggggaaaaaaaaactaaagaaaaatggaacctgacggtgcactactactgtctgctcatgtctagcggaatctggcagagggggaaagaagaagagggagtctacggctttctgatcgaagacattcggaaagaggtcaaccgcgcctccaaactgaagtgttgcgtttgtaagaagaacggtgcgagtataggatgtgtcgctcccagatgtaaacggtcataccatttcccatgcggactacaacgtgagtgcatttttcaatttactggtaactttgccagtttctgctgggatcatagacctgtgcagattatcacctccaataattaccgagagagtttgccatgtacaatctgcctggagtttatagagcccataccatcttataacatcctcaggtccccatgctgtaaaaacgcttggtttcaccgggactgcctacagtag

SEQ ID NO: 18040 - DNA, 3171 bp, synthetic construct
  source 1..3171: mol_type = other DNA; note = Synthetic coding sequence
atgctcagtgttgtggagaacggccttgacccccaagccgctatacctgtcattaagaaaaagttggtcggctcagtaaaagccctgcagaagcaatacgtctcacttgacaccgtagtaacttctgaggatggcgacgcaaacactatgtgttcagcacttgaggctgtctttattcacgggctgcatgccaagcacattcgcgctgaggcgggaggcaagcgaaaaaaatcagcacatcagaagcccttaccacagcccgttttctggcccctgctcaaggcagtcactcacaagcacattatctccgagttagagcatttaacctttgttaacaccgacgttggaaggtgcagggcttggcttcggcttgcgcttaacgatgggctgatggagtgctaccttaaactccttcttcaagaacaggccagattgcatgagtattatcagcctacagcattgttacgggacgctgaagagggagaatttctgctcagttttctgcagggccttacatcactctcctttgagctttcatataagtctgcgattctaaacgaatggactctgacacccttggcactaagcggtctatgtcccctgagtgagctggacccactctcaacctcaggtgccgagctccagcgcaaggagtccctcgatagtatctcccactcttctggctctgaagatatcgaggtacaccattccggacacaaaattaggcgcaatcaaaaactgaccgcttcctctcttagtcttgacaccgccagttcttcacagctgtcttgctccttgaacagtgactcgtgccttcttcaagaaaacgggtccaaaagtcctgaccactgcgaagaacctatgtcctgtgactctgaccttggaactgctaacgctgaggattccgatcggtctctgcaggaagtgctgttagaatttagcaaagcgcaggtgaactccgtcccgaccaatggcttatctcaagaaaccgagattccaacgcctcaagcgagtctgagcctgcatggtctgaacacaagtacctatctgcattgtgaagcccccgcagagccacttcccgcccaagccgcttcaggaacccaggacggcgtccacgtccaggagccaaggccacaggctccgtcccccctggacctccagcagcctgtggaaagcacctctggacagcagccttcatctaccgtgagcgagacagcacgggaggtggggcagggcaatggtcttcagaaagcacaggctcacgacggcgcagggcttaagttggtggtgtcgtctcctacctcgccgaagaacaagtcctggatttccgaggacgatttctatcgccccagtagagagcagccacttgaatctgcatccgaccatccgatagccagctacaggggtacacctggtagccgcccaggcctgcatcgccacttcagccaggagcccaggaaaaattgttcacttggtgccctggatcaggcatgcgtgcctagccccgggcggcgtcaggcccaggcggctccgagtcagggccacaagagtttccgggtggtgcaccgccgacagatggggctgtccaaccccttcagaggacttatgaagttgggtaccgtggagagacgcggcgccatgggcatctggaaggagctgttctgtgaactctcccccctggagtttcggttgtatctgagtaacgaggagcacacctgcgtcgagaactgcagcctgctgcgttgcgagtctgtaggccctgcccattccgacgggagattcgaactggtgttcagtggaaagaagttagcacttcgcgccagttcccaggatgaggcagaagattggctagatagggtcagagaagcgctgcagaaggttcgacctcagcaagaagatgaatgggtgaatgtgcaataccccgatcaaccagaggagccaccagaggctccgcaagggtgcctgtcaccctctgacctgctctcggaaccagctgcgctccaaggaacacagtttgactggtccagtgctcaggtaccagagcccgatgcaatcaaggagagtctcctttacctgtacatggaccgaacatggatgccttatatcttcagcctcagtcttgaggctttgaaatgttttcgtatccgcaacaatgaaaagatgctgagtgattcacacggtgtggaaaccatacgagacatcctccctgatacatccctgggaggcccttctttcttcaaaatcatcaccgccaaagccgtgctgaaactgcaggccgggaatgccgaagaggcagctttgtggagagatcttgtgcggaaagtcctggcttcctacttggagaccgcagaggaggccgtaacactcggtgggagtctggacgagaattgtcaagaggtactgaaattcgcaacaagagagaacggtttcttgcttcagtatctggtcgcaatccctatggaaaagggattggattcacagggttgtttctgtgctggctgcagcaggcagattggcttctctttcgtgagacccaaactttgtgccttttccggactatactattgcgatatttgccaccaggatgacgcttctgtaatccctgctcgaataatacataactgggatctgacaaaacggccaatttgccgacaggcactaaaatttctgacccagatccgggcccagcccctgatcaaccttcagatggtgaacgcctccttatacgagcatgtagagcgtatgcatctgatcggccgccggcgggaacagctcaaactactgggggactatctgggactgtgcaggtccggcgctttgaaggagttaagcaagcgcctcaaccaccggaattatctcctcgagtccccccacagattttctgtggcggacctacagcagattgctgatggtgtgtatgagggctttctgaaagccttgatagagttcgccagccagcacgtgtaccactgcgatttgtgcactcaacgtgggttcatttgccagatatgccagcaccacgatatcatctttcctttcgagttcgacactacagtgcgatgcgctgaatgcaaaacagtattccatcaaagctgtcaggccgttgtcaagaaggggtgtcccagatgcgctcgccgacggaagtatcaagaacaaaatattttcgcctag

SEQ ID NO: 18041 - DNA, 390 bp, synthetic construct
  source 1..390: mol_type = other DNA; note = Synthetic coding sequence
atggcagagctgattcagaaaaaattgcagggtgaggtggaaaaatatcaacagcttcaaaaagatttgagcaagtcaatgagtggacggcaaaagctggaagcccagctcacagaaaataatatcgtgaaggaggagttagccctactagatggcagcaacgttgtcttcaaactccttggtccagtgctggtgaaacaagagttgggggaggcccgtgcaactgttggcaaacgtctcgactacataaccgctgagataaagagatatgagagccagctccgagatctggaacgtcagtcagaacagcagagggagacgctggcccagctacaacaagaatttcagagggctcaggccgccaaagcaggggctccgggcaaagcgtag

SEQ ID NO: 18042 - DNA, 348 bp, synthetic construct
  source 1..348: mol_type = other DNA; note = Synthetic coding sequence
atgacaaaaaagagacgcaataatggtcgcgccaagaagggacgaggccacgttcagcccattagatgtaccaattgtgcaaggtgcgtgccgaaggacaaagcgatcaagaaattcgtcatccggaacatcgtcgaagccgcagccgtacgcgacattagcgaggtgagtgtcttcgatgcctacgttctgcccaaactctacgtcaaactgcattactgtgtgtcttgtgcgatccactccaaggttgttcgtaatcgcagccgcgaggcacggaaggatcgcacacctccccccagattccggcccgctggcgccgccccagggcctccacctaagcccatgtag

SEQ ID NO: 18043 - DNA, 1899 bp, synthetic construct
  source 1..1899: mol_type = other DNA; note = Synthetic coding sequence
atggacactatgatgctgaacgtccgcaatctgttcgaacagctagtgagaagggttgagatcctctccgaaggcaatgaagtgcagtttattcagctggccaaggactttgaagattttaggaaaaagtggcagcggaccgatcatgaactgggaaagtataaagatcttcttatgaaagctgagacggagagatccgcactggatgtgaagttgaagcatgccaggaaccaggtggacgtcgagattaaacgacggcagagggctgaggctgactgcgaaaagctcgagcgacagatccaattgataagagaaatgttgatgtgcgacacttccggaagcattcagctttcagaggagcagaagtcagctttggccttcctcaacagaggacagcccagttcaagcaatgccggtaacaaaaggctgagcacgattgacgagtctggcagcattttgagtgatatctccttcgacaagacagacgagtctctggactgggatagtagtctggtgaagacctttaagcttaagaagcgtgaaaaaaggcgctctacctccagacagtttgtagacggacctccaggccctgtgaagaagacacgctcgattgggtccgccgtcgaccaaggtaatgaatccattgtagcaaaaaccaccgttaccgttcccaatgatggggggccaatcgaagccgtgtctaccattgaaaccgtgccttattggacacgcagccgacggaagactggtactttgcaaccatggaactccgacagtaccctgaacagccggcagttggagccacgcacagagacagactccgtaggaactccccagtccaacggaggcatgcggctgcacgacttcgtcagtaagaccgtcatcaagcccgagtcctgcgtgccatgcggtaagcgcattaagtttgggaaactgtctctgaaatgccgagattgcagggtcgtgtcgcaccccgaatgtagagataggtgtccactgccttgcattccaactctgatcgggacacctgtgaagataggagaaggaatgctcgctgattttgtgagccagaccagcccaatgataccttcaattgtagtgcattgtgtcaatgaaattgaacagcgggggctgacagaaacgggcctctacaggatctcaggatgcgaccggaccgtcaaggaacttaaggaaaagttcctgagagtgaagactgtccccctcctgagcaaggtcgatgacatacatgcgatatgtagcctgttgaaagacttcttgaggaacctaaaagagccactcctgacctttcgcctgaatagagcttttatggaggcagccgaaattaccgacgaggacaactccatcgccgctatgtatcaagctgtgggggagctgccgcaggctaatcgagatacattggcctttcttatgatccacctccaacgagtggcacagtcaccccacacaaaaatggatgttgccaacctcgcaaaggtgtttggccctactattgtcgctcacgcggttccgaacccggaccctgtcactatgctgcaggatataaaaagacagcctaaagtcgtagagagactcctctcactgccactggaatactggagccagtttatgatggttgagcaagaaaacattgaccctttgcacgtgatagagaactccaacgcgttctccaccccccagacacccgatattaaggttagcttattaggacccgtcactacgccggagcatcaactgttaaagacgccctcaagctcaagcctgtcacagcgtgttcgttctactttaacaaagaacaccccgcggtttggctctaaaagcaagtccgccacgaacttaggtagacaggggaactttttcgcatcccctatgctgaagtag

SEQ ID NO: 18044 - DNA, 390 bp, synthetic construct
  source 1..390: mol_type = other DNA; note = Synthetic coding sequence
atggccgagttaattcagaagaagctccagggagaggttgagaagtaccaacaactgcaaaaggaccttagcaaaagcatgtccggtagacaaaaattagaagcccaattaaccgagaacaatattgtaaaggaggaacttgccctcctcgatggtagtaatgtggtttttaagctcctggggcccgtgctcgttaaacaggaactgggggaagccagagccacagtaggtaaacgcctcgactacattaccgctgagatcaagaggtatgaaagtcaactgagggacttagagcgtcagtcagagcaacagagggaaaccctggcccagctgcagcaggagttccaaagggcgcaggctgcaaaggctggggcacctggaaaagcctag

SEQ ID NO: 18045 - DNA, 5220 bp, synthetic construct
  source 1..5220: mol_type = other DNA; note = Synthetic coding sequence
atgatggaggggaacgggacagagaattcatgctcccggaccagggggtggctgcagcaggacaatgatgctaaaccctggctttggaagttctcgaactgtttctcccgcccagagcagacattgccccattcaccccagactaaggagtacatggagaacaagaaggtcgctgtcgagctgaaggatgtgccttcaccgctccacgctgggtccaagctgtttcctgcagtccctctacctgacatccgttcactacagcagcctaagattcagctctcgtcagtgcccaaggtcagttgctgcgcccactgtccaaatgaacctagcaccagtccaatgcgttttggcggaggtggaggcggcagcgggggcacttcgagcctgatccatccaggagcattgttggactcacagagcacgcgcacaatcacttgccaagtcggaagcggatttgcatttcagtcagcctcaagccttcagaatgcatccgctcgaaacaacctggcagggatcgcctctgatttcccctccatgtgtctggaaagcaatctttcctcctgcaagcatttaccgtgctgtggaaagctgcattttcagagctgtcacgggaacgtccataagctgcaccagttcccttccttacagggatgcacgagcgctgggtattttccttgctcagattttacctccggagccccgggacacctggaagagcatatctctcagtccgagctgacaccacacctctgcaccaattcgctgcatctgaacgtggttccccctgtctgtctgaagggcagcctctactgcgaagactgcctgaataaacctgccagaaacagtatcatagacgctgccaaggtctggcccaatattcccccacccaacacacaacccgcaccccttgccgtgccactgtgcaacggttgtgggaccaaaggaactggaaaagaaaccacactgctactagccacaagcctgggaaaagccgcttccaaattcgaggtggctgtggctggccaggtgttggagaatctgccccctatcggagtattttgggacatcgagaactgctcagttccttccggccggagtgcgaccgccgttgtgcagcgcatccgcgaaaagttttttaagggccaccgggaagctgaatttatatgcgtctgcgatatttcaaaggaaaataaagaggttatacaggaactcaataactgccaggttacagtggcccacatcaacgctactgcaaagaatgccgccgacgacaaattgcgtcaatcacttcggcgcttcgctaatacacacactgctcccgccaccgtagtgctggtcagcactgatgtaaacttcgccctggagctatccgatctgcgacatagacatggttttcacataatcctcgtgcataaaaaccaggccagcgaagcgctgctgcatcatgctaatgagctcatcagatttgaagagtttatctccgatttgcctccaagactgccacttaaaatgccacaatgtcatacattgctgtacgtgtataacctccctgcaaacaaagatggaaaatccgtgtctaaccggctgcgccggctaagcgacaactgcggcgggaaagtgttaagcattacagggtgcagcgccatcctcagattcattaatcaggactctgccgaaagggctcaaaagcggatggaaaatgaggacgtgtttggcaaccggattatcgtctccttcactcccaagaatagagagctgtgcgaaactaaaagcagcaatgctatcgccgacaaagtcaagtcgcctaaaaaattaaagaaccccaaactttgcctcatcaaagatgctagcgagcagtcctccagcgccaaagcaactccaggtaagggcagtcaggctaatagcggctcagccacgaaaaataccaacgtaaagtctttgcaggaactctgcagaatggagtcaaaaacaggccaccggaactccgaacaccagcagggacatctccgtctggtagtccccacccatggaaattccagcgctgctgtgagtacacccaaaaattccggtgttgccgagcccgtctataagacttcccagaaaaaagaaaatctctccgcccgatccgtgacctcctctcccgttgaaaagaaagataaggaagagaccgtgtttcaagtttcatatccctctgctttctcaaaactggtggcttcacgccaggtcagcccattgctggcttcacagtcatggtcatctcggtccatgtctcccaatctgctcaatagggcctccccacttgcttttaatatcgcaaacagttctagcgaggcggattgtcccgacccattcgctaacggcgctgacgtgcaggtctccaatatcgattacagattgtcgcgaaaagagctccagcagttgttgcaggaggcctttgctcgtcacggaaaggtcaaatccgtagaactctctccacatactgattaccagcttaaagcagtggtacagatggagaatctgcaggatgctattggtgcagttaatagtctacataggtacaagataggttctaagaagattttggtgtctctggcaaccggtgccgcctcaaagagcttgtctctcttatccgccgagacaatgagtgtgcttcaggacgcacctgcttgttgcctcccactgtttaaatttaccgatatttatgagaaaaaatttggacataagctgaacgtatccgatctctacaaactcaccgatacagtcgcgatacgcgagcagggtaatggcagactggtgtgcctgctgccctcttcccaggcaaggcagagccccttaggatccagccaatcccacgacggctctagcactaattgctcaccaatcatcttcgaagagctggagtaccacgagcctgtgtgcagacagcactgctccaataaagatttttccgagcacgagtttgatccagattcttataaaatcccattcgtaatcttgagtttaaaaacatttgcaccccaggtgcactcgttattgcagacccatgagggaaccgttcccctactgtcattccctgactgctacatcgccgagttcggagacctggaagtggtgcaagagaatcagggaggggtgccactggaacatttcattacatgcgtcccaggtgtgaacatcgccacggcccagaacggcataaaggtggtgaagtggatccacaacaagccccctcctcccaataccgatccatggctgctgcgatctaagagccccgtggggaatccacaactgatccagttctctcgggaggtgatcgatctgctgaagtcgcagccatcttgtgtcattcccatcagtcacttcatcccctcttatcaccaccacttcgccaagcagtgccgcgtgtctgactacggatacagcaagctgattgagcttttggaggccgttccacacgttcttcagattctggggatgggtagcaaacggctcctgacactaacacacagagcccaggtgaaaagatttacccaggatcttctcaagctcctgaaaagccaggcttccaagcaggtgattgtgcgagaattcagccaagcatatcactggtgtttttccaaagattgggacgttactgagtatggcgtctgcgaacttatcgatatcgtatcggagatccccgataccacaatttgcttgtcccagcaagataacgaaatggtgatatgtatcccgaaacgcgagcgcactcaagatgaaattgagcgcactaagcagttttcaaaagatgttgtggatctgctgcggcatcaaccgcactttagaatgccttttaacaaattcatcccatcgtatcatcatcatttcggccgacagtgcaaacttgcatactacggctttaccaagctactcgaactgtttgaggcgattccagatactctgcaggttctagagtgcggagaagaaaaaatcctgacattaacggaagttgaacggtttaaggccctggccgcccagttcgtaaagctactgagaagccagaaggataattgtctgatgatgacagacctcttaaccgaatacgccaagacatttggctacactttcaggttacaggattatgacgtaagctccatcagcgctctgacgcagaagttatgccacgttgtgaaagtggccgacatagagagcggccggcagatccagctgatcaaccgaaagtccctgcgaagtttgacagcacagttgcttgtcctgcttatgtcttgggagggcaccactcacctgagtgtggaggaactcaagcgacactacgaatctacccataacacacccctgaatccctgtgaatatggattcatgactctgaccgagttgctcaaatcgctcccatacctggtcgaggtgttcactaatgataaaatggaagagtgcgtcaagctaacgtcactgtacctgtttgcaaagaacgttcggagcctgctccatacttaccactaccaacaaatattcctccatgagttttctatggcttatacaaaatatgtgggcgaaactctacagcctaagacctacggacatagcagcgtcgaggagttgctgggtgctatccctcaggttgtgtggatcaaaggccacggccacaagcgcatagtggtattaaaaaatgatatgaagagccgactaagttccctgagtctgtcccctgccaaccatgagaatcaaccatcagaaggagagcgcatactggaggtaccagagtctcacacagcaagcgagcttaagctaggggcagatggctctggtcccagccataccgaacaggagttgctaagactgactgatgactcacctgtcgacctgctttgcgcccccgtgccttcctgcctcccatctcctcagctgcggcctgaccccgtgatcctacaaagcgccgacttgatccagttcgaggagaggccacaggagccttcagagatcatgatactaaatcaggaagaaaaaatggagatccccatccctgggaagtccaagaccctaactagcgactcttctagctcatgtatcagtgctgccgtcccagttcccccatgtccatcctccgagacaagtgagtccctgttaagcaaagatccagtcgaatcccccgcaaagaagcagccaaagaatcgcgtgaagctagcagccaatttctccctggcacctatcactaaactgtag

SEQ ID NO: 18046 - DNA, 390 bp, synthetic construct
  source 1..390: mol_type = other DNA; note = Synthetic coding sequence
atggctgaactcattcagaagaagctccagggggaggtcgaaaagtatcagcaactccagaaggacctctctaaatctatgagtgggagacagaagctagaagcccagctcaccgagaacaacattgtgaaagaagagcttgccctgctggacggatctaatgtcgtctttaagctgttaggtccagttttagtgaaacaggagcttggcgaggccagggccacagtggggaagcggctggactacattacagccgaaatcaaaagatatgaatcccagctccgagacctggagagacagtctgagcagcagcgcgaaacactggcccagttgcagcaggaattccaacgtgcccaagccgctaaggcaggcgcccctggaaaagcctag

SEQ ID NO: 18047 - DNA, 432 bp, synthetic construct
  source 1..432: mol_type = other DNA; note = Synthetic coding sequence
atgacgctgcgttgtctggagccgtctggaaacggcggcgagggcacacgctcccaatggggcactgccgggagcgccgaagaaccttccccccaggcagctcgcttagctaaagcactgagggagctgggccaaaccggctggtattggggctcgatgaccgtaaatgaggcaaaggagaagcttaaggaagccccggagggaacgtttctgatccgggactcgtcccacagcgactatctgttaacaatttccgtcaagacatccgcaggaccaactaatctccgtattgagtaccaggacgggaaattccgactggacagcattatctgtgtcaagagtaaacttaagcagtttgactctgtggtccacctcattgactactacgttcaaatgtgcaaagataaaaggacggggcccgaggccccgtag

SEQ ID NO: 18048 - DNA, 156 bp, synthetic construct
  source 1..156: mol_type = other DNA; note = Synthetic coding sequence
atgtcctcgagcatgtggtatattatgcagagcatccagtcaaaatattcactgtctgaacgcctgattaggacgatagccgcaattcgaagcttccctcatgataacgtggaagacttgatccgaggtggggctgacgtcaactgtactcattag

SEQ ID NO: 18049 - DNA, 1902 bp, synthetic construct
  source 1..1902: mol_type = other DNA; note = Synthetic coding sequence
atggaggaaagccctctgtcacgcgccccaagccgggggggagtaaattttctgaacgtggcacggacttacataccgaatacaaaggtggagtgccattacaccctccccccaggaactatgccatccgcaagcgactggatcgggatcttcaaggtcgaggccgcgtgcgtccgcgactaccatacatttgtatggtcctccgtgccagagagcacaacggacggtagccccatccacacttcggtgcagtttcaggcatcctacctgccaaaacccggagcccaactgtaccaatttaggtatgtgaatcggcaggggcaggtctgcggacagtccccaccctttcagttccgggaaccacgaccaatggatgaattggtcactttagaagaggccgacggaggttccgatatcctcctagtcgtcccaaaggcaaccgtgcttcagaatcaactggacgagtcacagcaggagaggaacgacctcatgcagcttaagttgcagctcgaggggcaagttactgaactacgctcgcgggttcaagaacttgagcgagctctggcaacagcacgccaggaacacaccgagctcatggagcaatacaaaggaatttcacggagccatggcgagatcaccgaagagcgggacattctgtcgagacagcagggtgaccatgttgcccgcatccttgagctcgaggacgatattcagaccatcagtgaaaaggttctgaccaaagaagtggagctggatcgtcttagggacacggtcaaagcgctgacacgcgagcaagagaagctgctgggacaactgaaagaggtccaggccgataaagagcaaagcgaagctgagctgcaagtcgcccagcaggaaaaccatcacctcaatctggatctcaaggaagcgaagagctggcaggaagagcagtccgcccaggcccagcggcttaaggacaaagttgcgcagatgaaggacacgttgggccaagcccaacagagagtggccgaactagagcccctgaaggagcagctgagaggcgctcaagaattggccgccagcagtcaacagaaggccacacttcttggcgaggagctggcttctgccgccgcagcacgcgaccgcacgattgcggagcttcatcgatcacgcctggaagtcgctgaggtaaatggtaggctcgctgaactgggcctgcatttgaaggaagaaaagtgtcagtggagtaaggagcgagccgggctactgcagagcgtagaggccgagaaagacaagatcctgaaactgagcgcagaaattctgagactggagaaagcagtgcaggaggaaaggacccagaatcaggtatttaagaccgagctggccagagaaaaagactcttccttagtgcagctttccgagagcaaacgtgagctgaccgagctccgctccgcgttgagagtcctgcagaaggaaaaggaacagctgcaggaggaaaagcaagagctccttgaatatatgaggaaactagaggccagactggagaaagtcgcagacgagaagtggaatgaggacgccaccaccgaggatgaggaagccgccgtggggctcagttgtcccgcagccttgaccgatagcgaagatgagagtcctgaggacatgaggctacccccttatggattatgcgaacgcggcgacccaggaagctctcctgctggacctagagaagcctcccccttagtagtgattagccagcctgcccccataagcccacacctttctgggcccgcagaggacagtagcagtgatagtgaagctgaagacgaaaagagtgtcctgatggccgccgtgcaatccggcggagaggaggccaatctgttgcttcctgagctgggatccgcgttttacgacatggctaggtag

SEQ ID NO: 18050 - DNA, 810 bp, synthetic construct
  source 1..810: mol_type = other DNA; note = Synthetic coding sequence
atgaaaactcctgttgagctggccgtttctggtatgcaaacactgggacttcaacataggtgtcgcggaggttatagggttaaagctcgcacttcgtacgtggatgaaacattgttcgggtcacccgcgggcaccagacccacccctcccgactttgatcctccatgggttgagaaggcaaatcggactagaggagttggcaaggaagctagcaaagccctgggcgccaagggatcatgcgaaacaacgccttccagagggtctacacccacattaaccccgaggaagaagaacaagtacagacctatctcccacacaccatcttattgcgatgagtctctatttggtagtcgctccgaaggcgcctcattcggcgctcccagaatggcaaagggggatgcagcaaagctgcgcgccctgttgtggacacccccccctaccccccgtggaagccacagccccagacctcgtgaggcccccctcagagctattcaccccgctggaccctcaaaaacagaacccggacctgccgcggactcccagaagctctccatgggaggtttacatagttcacggccgctgaaacggggcctgtctcatagcttaacccacctcaacgtgccgagcacgggccacccagccacttctgccccacacactaatggtccgcaagatctgcgaccctcaaccagtggggtcaccttccgcagccccttagttacttcacgcgcacgatcggtcagcatctccgtccccagcaccccccgcaggggaggcgccactcagaaaccaaaacctccttggaagtag

SEQ ID NO: 18051 - DNA, 618 bp, synthetic construct
  source 1..618: mol_type = other DNA; note = Synthetic coding sequence
atggacaaggatagccagggcctacttgactcctctctcatggcctcagggaccgcctctaggtctgaggatgaagaatcgttagccggccagaaacgagcaagcagccaggccttgggcaccatccccaaacggaggagttcgtctcggttcatcaagcggaagaagtttgatgacgaactcgttgagagtagcctggcaaagagtagtacacgagcaaaaggcgcctccggggtcgaacctggtagatgctctgggtcagaaccatccagctctgagaagaagaaagtttcgaaggcgccgtccacccccgttccaccttcaccagctcccgcccctggactcactaagcgagtcaaaaaaagcaaacagccattgcaggtgactaaggatctgggccgttggaaaccagctgacgatctgttacttattaacgccgtgctgcagaccaacgatctgacgagtgtgcatctcggagtgaaattcagttgcagattcaccctgagggaggtacaagaacgctggtacgccctgctgtacgaccccgtgatttctaaattggcatgccaggctatgagacagttacacccagaagccatcgctgctatccaaagttag

SEQ ID NO: 18052 - DNA, 540 bp, synthetic construct
  source 1..540: mol_type = other DNA; note = Synthetic coding sequence
atggactggacaccccggttaccgtcacggcatattatcagcgaactcgagcatttgacgtttgttaacaccgacgtgggccggtgtcgggcctggttgcgcctggccctgaatgacggactgatggagtgctacctgaaattgttattacaggaacaggctcgcctccagttgcaacgaaaagaaagtctcgattctatcagtcacagtagcgggtccgaagacattgaggttcatcattctggacacaagatccgccgcaatcagaaattaacagccagctctctgtctcttgataccgcatcctcttcccagctcagttgctcactgaactccgattcctgcttactgcaggagaatggaagcaaatcaccagaccactgtgaggagccaatgtcctgtgactccgatttgggaacagctaacgctgaggactcagaccggtctcttcaagaaaaaacaagagcgggctctcaacgtatgacaagtactggactgccaggttcgaatccctggcgcgtgctgcagactacccagtag

SEQ ID NO: 18053 - DNA, 735 bp, synthetic construct
  source 1..735: mol_type = other DNA; note = Synthetic coding sequence
atggagctgaccatcttcatcctgcggttggctatttacatcctgacatttcccctctatctgctaaattttttaggcctctggtcctggatttgcaaaaagtggtttccttactttctggtcaggtttaccgtcatctataacgagcagatggcctctaagaagcgggagttgttctccaatctgcaagagtttgcaggacccagcggaaaactctccttgctggaggtcggctgcggcaccggagcaaacttcaaattctacccccccggctgccgagttacttgcatcgaccctaatcctaattttgaaaagttcctgatcaagtccattgcagaaaataggcacctccagtttgaaaggtttgtcgtggcagcaggcgaaaacatgcaccaagtagccgatggatcagtggacgttgtcgtttgtactctcgtgctgtgtagtgtaaagaaccaggagagaatcctaagggaggtgtgtcgagtgctcagacccggcggggctttttacttcatggaacacgtggccgccgaatgctcgacatggaactatttctggcaacaggtgctagatcctgcctggcatctactttttgacggttgtaatttaacccgggaatcttggaaggctctcgaaagggcatcctttagcaaactgaagctgcagcatattcaggcaccattatcctgggagctggtgcgaccacatatttacggctacgccgtcaaatag

SEQ ID NO: 18054 - DNA, 558 bp, synthetic construct
  source 1..558: mol_type = other DNA; note = Synthetic coding sequence
atggataaggactctcagggcttgcttgatagtagccttatggccagcggaacagcctctcggtcagaggatgaagagtccctagccgggcagaagcgggcttcctctcaggcgcttggcactattccaaagcgccggtcctcaagcagattcatcaaacggaagaagttcgacgacgaactcgtggagtcttccctggccaagagttctacccgggctaagggcgcttctggcgtggagcctggccgctgctcaggctctgagccatccagctccgaaaaaaaaaaggtttcaaaagccccatccacgcccgtgccacccagtccggcccccgcccccgggctgactaagagagtgaaaaagagcaagcaaccgttgcaggtgaccaaggacctggggagatggaaacccgcagatgacctcttacttattaatgctgtgttacagacgaatgacctgacaagcgtacacttgggagttaagttttcttgccgctttactctcagagaggtacaggagcgatggtacgctctgctctatgatccagtaatcagctag

SEQ ID NO: 18055 - DNA, 3003 bp, synthetic construct
  source 1..3003: mol_type = other DNA; note = Synthetic coding sequence
atggtggagtgcttcgagtccggcggcactcgactaagcctcagcagcttcaatgtctcctgtgacagtctccgtgaacaattgcgagagtggcggtgctttcaatggtggcggatggattggacccccagactgccttcccgccatatcatttccgagctagaacacctcacatttgtcaatactgatgtgggtagatgtagggcctggctgcggctggcgctcaatgatggtttgatggagtgttacctcaaattgctgcttcaggagcaggcacggctccacgaatactatcagccaacagccctcctccgcgacgctgaggagggcgagtttctgctctccttcctgcagggtctgacatctctatcttttgagctgtcttacaagtccgccatactcaatgagtggacccttactccattagctctgtccgggttgtgcccgctgagcgaactggaccccctctcaacaagtggggccgaactacagcgcaaagaatccctagatagcataagccacagcagcgggtccgaagacattgaagtgcatcatagtggacataaaatcagaaggaatcaaaaattaactgccagctcactctcccttgacaccgcgtcctcatcacagttgtcctgttcactaaacagcgatagctgtctgctgcaggagaacggatccaagagcccggatcattgtgaggaacctatgagttgcgacagcgatttaggaactgcgaatgcggaagacagcgaccgcagccttcaggaagtgctgcttgagttttcgaaagctcaggtgaactctgtgcccaccaatgggctctctcaggagactgaaatcccaacccctcaggcaagtctgagtcttcatggcctaaacacatccacatacttgcattgcgaggcgcccgccgaacctttgcctgcgcaggccgcatcaggaacccaggatggtgtgcatgtgcaggagcctaggcctcaggctccctcccctctggatttacagcagccggtggagtccacgagtggccagcagccatcaagcaccgtgagcgaaacagcacgcgaagtaggccagggcaacggtctgcagaaggcccaggctcacgacggcgcgggcctgaaattggttgtgtctagtcccaccagccccaagaacaagtcatggatcagtgaagacgatttctatcgaccgagcagagaacaacctctggaaagcgcttccgaccaccctatcgcaagctataggggaacgccaggtagccgcccgggccttcacagacacttttcacaggagccccgtaaaaactgtagcctgggcgcccttgaccaggcctgcgtaccttctcccggccgcaggcaagcccaggcggcaccaagccaaggtcataaatccttccgggttgtgcaccggaggcagatgggactttctaatccctttaggggtctcatgaagcttgggactgtggaacgcaggggagccatgggtatatggaaggagttattttgcgagttgtcacccctcgagtttaggttgtacctatccaacgaagagcacacatgcgtagaaaattgtagtctgttacgttgtgagtctgtcggacctgcccatagcgacggccgttttgagctcgtcttttcaggcaagaaactagcgttgagggctagctctcaggatgaggctgaagactggttagatagggtgagggaggctctccagaaggttcggccgcaacaggaagacgaatgggtgaatgtgcagtacccagatcaaccggaggagcctcccgaagctcctcagggatgcctcagtccttccgacctgttaagtgaacccgcagctctgcaaggaacccagttcgactggagcagcgctcaggtgcctgagcccgacgcaataaaagagagtctgctttatctgtacatggataggacttggatgccttacattttctccctctccctcgaggctctgaaatgctttagaatccggaataacgaaaagatgctttccgattcgcacggcgttgaaaccatccgcgatattctccccgataccagtctggggggccccagcttctttaagatcatcacggcaaaagcagtgttaaagctgcaggcagggaacgcagaagaggccgcattgtggcgtgacttggtcaggaaggtgttagcctcctacctcgaaaccgccgaggaggcagtgacactgggcggctccctggacgaaaattgccaggaagtcctaaaattcgcaacacgagagaacgggttcctgctgcagtacctcgtcgctatccctatggaaaaaggactagatagccagggatgtttctgcgctggctgttcccgccaaataggattcagctttgtgcggccgaaactctgtgccttcagcgggctctactattgcgacatttgccaccaggacgacgcctcggtcatacctgccagaatcatacataattgggacctgactaagcggcctatatgccggcaggcacttaagtttttgacacagataagagcccagcctcttatcaatttgcagatggtaaacgctagcctttacgagcacgtagagcgaatgcacctaattggcagacgtagggaacagctcaagcttttaggtgattacctgggactgtgccgatctggtgccctgaaagaactctccaagaggctcaaccaccgcaattacctcttggaatccccacacagatttagtgtggccgatctacaacagatagccgacggggtgtacgagggctttagtcccaaagtgccatccgaggcggctggactgcgcccatggggcgcaaggtcccctgaggccgcctccgcttttcggtgtatcgacagtagccacctcccaagtctgcggaaggtcgtcccaaccctgttcttaaaatgttacttcatgcagtataccgtcccctctgagcaaggaagtgggccggaggaatccctgcagtgtatagaaggcatcgccgctgtgtag

SEQ ID NO: 18056 - DNA, 525 bp, synthetic construct
  source 1..525: mol_type = other DNA; note = Synthetic coding sequence
atggacactatgatgctcaatgtgaggaaccttttcgagcagcttgtaaggcgggtggaaattctgtccgaaggcaacgaagtgcagtttattcagctggctaaagatttcgaagacttccgaaaaaagtggcagaggacagaccatgaattgggaaaatacaaagacctactgatgaaggccgaaaccgaaagatctgcactggatgtgaagttaaaacatgctcgcaaccaggtagatgtagaaataaagaggagacaacgcgccgaggcagactgtgagaagctcgaacgccaaatacagctgatccgcgaaatgctgatgtgcgatacctcggggagcatccaactatccgaagaacaaaagtcagctctggctttcctgaaccgtggacagcctagcagcagtaacgcaggtaataagcggctgagtacaatcgacgaatctggcagtatcctgagcgatatcagcttcgataaaacagacgagtccctcgattgggacagttcgctggtgaagacatag

SEQ ID NO: 18057 - DNA, 2904 bp, synthetic construct
  source 1..2904: mol_type = other DNA; note = Synthetic coding sequence
atggactggaccccaaggctgcccagtcgccacatcatttcagaattggaacacctgacattcgtgaacactgacgtggggaggtgccgcgcttggctaaggctggcactgaatgatggcctgatggagtgttacttgaagcttctgctgcaggagcaggcccgactgcatgaatactaccagccgacggccctcctgagggacgctgaagagggagaatttctgctgagtttcctgcagggcctgacctctctgtcctttgagctctcctataagtcagccatactgaacgagtggactcttacacccctggctctctccggcctttgtccattaagcgaactcgaccctttgtctacaagtggcgctgagttacaacgaaaggagtccttggacagtatcagccattcatccgggtctgaggatatagaggtccaccattctggccacaagattagaagaaatcagaaactcacagccagttctctgagcctggacactgccagcagcagccagctgtcatgctcattaaactccgattcctgcctgctccaggaaaatggttcaaagtcaccggatcattgtgaagagcccatgtcttgtgatagtgacctcggcaccgccaacgcagaagattctgaccgttcactgcaggaggtgttactggagttctctaaggcacaggtaaatagtgtgcccaccaatggcttatcgcaggagacggaaattcctactccacaggcctcgttatcattgcacgggctgaacacctccacctaccttcactgcgaggctcccgccgaacccctgccagcacaagccgctagtggcacccaggacggggttcacgtgcaggaaccccgcccccaggccccttcaccgctggatctgcagcaacccgtggagtcgacaagcggccagcagccgtcatccactgtgtcagaaaccgctcgggaagtggggcagggaaacggcttgcagaaagctcaggctcatgatggagccggactcaaactggtagtgtcctcaccaaccagccccaaaaacaagagttggatcagtgaagatgatttttatcgccctagccgcgagcagcccctcgaatcggcgagtgaccaccccatcgcgtcttatcgtggtactcctggctcccgccccggcctccaccgccacttctcccaggaacctcgaaaaaattgctcgctgggggcgttagatcaagcctgcgtgccctccccggggcggagacaggcacaggcagccccgtctcagggacacaagtccttccgtgtagtgcatcggcgccagatgggtctctctaaccctttccgcggccttatgaaactgggtacagttgagcggagaggtgctatgggaatctggaaggagttgttttgcgagcttagccccctcgagtttcgtttgtacttgtccaacgaagagcacacctgtgtggaaaactgtagcttactaagatgtgagtccgttggcccagcgcacagtgacgggcgttttgagctagtgttctccggcaagaagcttgccctcagggcaagtagtcaggacgaggcggaagactggctcgacagggtaagagaagctctccaaaaggtgcgcccgcaacaggaggacgaatgggtgaacgtccaataccccgatcagccagaggagccccccgaggctcctcaaggctgtcttagcccaagcgatctgctctctgagcccgctgcattacagggcacccagtttgactggagttccgctcaggtaccagagccagacgccatcaaggaatcattgctatatctctacatggaccgcacctggatgccatacatctttagtcttagcttggaagccctgaagtgtttccgtataagaaacaacgagaaaatgcttagcgactcccacggcgtcgaaaccatcagggacatcctgcccgataccagtctgggagggccatcctttttcaagattatcactgcaaaggcggttctgaagctgcaggccggaaatgctgaagaggccgctctgtggcgcgacctggtgagaaaggtcctcgctagctatctggagactgcagaggaggcagtgaccctggggggatcacttgatgagaactgtcaggaggtgcttaaattcgccacacgggagaacgggttcctactgcagtatctggtcgccattcccatggaaaagggcctcgacagtcagggctgcttctgtgcgggatgtagccggcagatcggcttcagcttcgtacggcccaaattgtgcgccttctccggcctgtactactgcgacatatgtcaccaggacgatgcttccgtgatacccgcccgtattatccataattgggaccttacaaaacggccaatctgccggcaagctctcaagtttctaacacagattcgcgctcagccactcattaaccttcagatggtcaatgcttccttgtatgagcacgtggagcgcatgcacttaatcggtaggcgcagagaacagcttaaactgttaggtgattaccttgggctatgcagaagtggagcgctgaaagaactgagcaagagactcaatcatcggaactacctccttgaatccccccacagattcagcgtggcagacttgcaacagatcgcggatggggtgtacgaaggatttctaaaagctctgatcgaattcgccagccaacatgtgtaccactgtgatctctgtacccagcgcggcttcatctgccaaatctgccaacaccatgatattatctttccttttgagtttgatactactgtcaggtgcgcagagtgcaagactgtttttcaccagagctgccaggctgttgtgaaaaagggatgtcccagatgcgccaggcggaggaagtatcaagagcagaacatctttgcctag

SEQ ID NO: 18058 - DNA, 1446 bp, synthetic construct
  source 1..1446: mol_type = other DNA; note = Synthetic coding sequence
atggcttcagcggcatccgtgaccagtctagcagacgaagtgaactgccctatttgccagggcaccttgcgtgagcccgtgaccatcgactgtggccacaacttttgtcgagcatgcttaacccgctactgcgagattcccggccccgacttagaggagtcccctacctgtcccttgtgcaaggagccctttaggccaggaagtttccgccccaactggcagcttgccaacgtggtggagaatatcgagcggcttcaactggtcagcactctgggcctcggagaagaggacgtgtgccaggagcatggcgaaaagatctacttcttttgtgaggatgatgaaatgcagctgtgcgtggtttgccgggaagcgggtgaacacgccactcatacaatgcggttcctcgaggatgcagccgcaccgtacagagagcagatccataagtgtctgaagtgcctgaggaaggagcgtgaagaaattcaagagatccagagccgggagaacaaaagaatgcaagtgctactcacacaagtcagtactaagagacagcaggtcatcagtgagtttgcgcacctgcgaaaatttctggaggagcagcagtcgattctcttggcccagcttgagtcccaggatggagacattctcagacagcgtgatgaatttgacctcctggtggcgggggagatttgtaggttctccgctctgattgaagagctagaggagaagaatgagaggcctgcccgagaattgctgactgacatcaggagcactctgatccggtgcgaaacacggaagtgccgaaagcctgttgccgtttctcccgagctgggtcaaagaatccgggactttccgcagcaggcgctacctttgcagcgggagatgaagatgtttctcgagaatctgccaaatcacctcgtgattcctaccgctcatattagccttgatccccagactagccaccctaagctgctattgagtgaagatcatcagcgggcccagttctcatataagtggcagaactccccggataatccacaacgcttcgatcgggcgacctgtgttcttgcacatacagggattaccgggggtaggcacacatgggttgttagtatagatctcgcacacggcggatcctgcacggtcggagtggtcagtgaggacgttcaacgcaaaggggagttgcggttgcgtcctgaagaaggcgtgtgggccgtgcgactagcctggggatttgtgtctgccctagggtcatttcctacccggcttactctgaaagaacaaccccgccaggtgcgggtgtcattggactacgaagtaggatgggtgactttcaccaacgccgttacccgggagcctatctacacgttcaccgcctcctttactaggaaagtgattcccttttttggactttggggaaggggttcttccttttccctgtcctcttag

SEQ ID NO: 18059 - DNA, 462 bp, synthetic construct
  source 1..462: mol_type = other DNA; note = Synthetic coding sequence
atggctcctggaagtcggggcgagcggtcctccttcaggtcccggaggggacctggggtgccatctccacagcccgacgtaactatgttatcccgactccttaaggagcatcaagctaagcagaacgagcgaaaagagcttcaggaaaagcgcaggagagaggctattactgctgctacatgcttgaccgaggccctcgtcgaccacctcaacgtcggagttgcacaggcttacatgaatcagaggaagcttgaccatgaggtgaagactctgcaggtgcaggctgcacaatttgcaaaacagacaggtcagtggataggtatggtggaaaacttcaatcaagctttaaaggagatcggggacgtggagaattgggcccgcagcattgaattggatatgaggactatcgctacggcgctggaatatgtgtacaaaggccaactgcagagtgctcccagctag

SEQ ID NO: 18060 - DNA, 1311 bp, synthetic construct
  source 1..1311: mol_type = other DNA; note = Synthetic coding sequence
atgttgtggaactttaaacctcatgctcgggcgtaccgttacgttggccataaggacgttgtcacatctgtccaattttcaccccacggcaacctgcttgctagcgcctctagagatcgcacggttcgactatggatacccgacaagagaggtaagttcagtgagtttaaggcccatacggcacccgtccgatcagtggatttctctgctgatgggcagtttttagcaactgctagcgaggacaagtctattaaggtatggtctatgtaccgacagagatttctgtactcgctgtaccgccacactcattgggtgcggtgtgcaaagttttctcctgatgggagattaatcgtaagctgctctgaagataaaaccatcaaaatatgggacacaactaacaagcagtgcgtgaacaacttctcagacagcgtgggtttcgccaactttgtggattttaacccgagcgggacttgcatcgccagtgctggctccgaccagaccgttaaggtgtgggatgtcagagtgaataaactgctgcaacactaccaggtgcattctggaggcgtgaattgcatcagttttcacccgtccggcaactatctgatcactgcttcttcagatgggacgctgaagatactggacctgctggaaggccggctcatctacacattacaagggcatacagggcccgtcttcacagtgagtttttcaaagggcggcgagctttttgcctctggtggcgcagatactcaggtcctgctttggaggaccaatttcgacgaactgcactgcaaaggccttaccaagagaaacctgaaacgtctccacttcgatagccccccccatcttctagatatttacccgcgtacccctcatccgcacgaggagaaagttgagaccgtggagataaatccgaaacttgaggtcattgacttgcaaatttctaccccacccgttatggacatccttagcttcgattctacaaccaccaccgaaacaagcggacgaacgcttcctgacaagggtgaagaagcctgcgggtacttcctgaacccaagcctgatgtccccagagtgcctacccacgacgacaaaaaaaaagaccgaagatatgagcgatctgccctgtgagtcacaaagaagcattccacttgccgtcacagatgccctggagcacattatggagcaacttaacgtgttaacccaaacagtgtctatccttgaacaacggctcacattgaccgaggataagctcaaggactgtctggaaaaccagcagaaactcttctctgcagttcaacagaaatcttag

SEQ ID NO: 18061 - DNA, 597 bp, synthetic construct
  source 1..597: mol_type = other DNA; note = Synthetic coding sequence
atgaccctgcgatgcctggagccatctggaaatggaggggaggggacccggagccaatgggggaccgccggttccgccgaggagccgagtccccaggccgcccgacttgctaaggctctgcgtgaactggggcagaccgggtggtattggggatccatgactgtgaacgaagctaaagaaaaactgaaagaggccccagagggaacattcctgattcgggacagcagtcatagcgactacctgctcacaatctccgtcaaaacgtctgcaggtcccacaaatcttagaatagagtatcaagatggcaaattcagactcgatagcatcatctgcgttaaaagcaagctgaaacagtttgactccgtggtccacctgattgactactacgtgcagatgtgcaaagacaagcgcacaggtcccgaagccccaaggaatggaaccgtgcatctctatctgacaaaacctctgtatacctctgcaccaagtctccagcacctctgtcgcctgaccattaacaagtgcactggtgccatatggggcctgcccctgccgacccggttgaaagattatctcgaagaatacaagttccaggtatag

SEQ ID NO: 18062 - DNA, 597 bp, synthetic construct
  source 1..597: mol_type = other DNA; note = Synthetic coding sequence
atgacactccgctgcctcgaaccttctgggaatgggggcgaaggcactagaagtcagtggggcacggcaggatcagccgaagagccttcaccacaggccgccagactggcaaaggccctgcgtgagctaggccagactgggtggtattggggatctatgactgtgaatgaggccaaggaaaagctgaaggaagcccccgaggggaccttcttgattagggacagctcccattccgactacctcctgaccatctctgttaaaacaagcgcagggccaaccaacctgagaatcgagtaccaggatggcaagttccgtttagactcgatcatatgtgtgaaatccaagcttaagcagtttgattctgtcgtccatttgatcgattattacgtccagatgtgcaaggataagcgaaccggacccgaggccccccgcaatggtacggttcacctttatcttacaaaacctctgtacacttctgccccatccttacaacacctgtgtaggctgacgattaataaatgcaccggagcgatttggggtcttcccctccccacaaggctcaaagactacttagaagagtataagtttcaggtatag

SEQ ID NO: 18063 - DNA, 495 bp, synthetic construct
  source 1..495: mol_type = other DNA; note = Synthetic coding sequence
atgatggaaggcaatggtaccgagaattcttgttcccgcacacgtggctggcttcagcaggacaatgacgccaaaccatggttgtggaaattctcaaattgttttagcagaccagagcagacgttgcctcattccccacagacgaaagagtacatggagaataagaaggttgccgtcgagttaaaagatgttcctagccctctccacgcaggaagtaagctttttccggctgtcccactgcctgacattcggtcactgcagcagccgaagatacagctcagtagtgtcccaaaggtcagctgttgtgctcactgtcccaacgagccatcaacgagtcccatgcgattcggcggagggggaggcggctcaggtggcaccagtagcttaatccatccaggcgctctgctggacagtcagagtacacgcactattacatgtcaggttgggagcggctttgctttccagagtgcatcctctctccagaacgcttcatag

SEQ ID NO: 18064 - DNA, 855 bp, synthetic construct
  source 1..855: mol_type = other DNA; note = Synthetic coding sequence
atgctcagcgtagtcgagaatggactcgacccacaggcggcaatcccggtgatcaagaagaagctcgtcgggtctgtaaaggccctccagaagcaatacgtgagcctcgatactgtcgttactagtgaagacggggacgctaacacaatgtgtagtgcactggaggccgtcttcatccacggtctgcacgccaaacacattcgggccgaggcaggcggaaagcgcaaaaaatccgcccaccagaagcccttaccccagcccgtcttttggccactgctcaaggctgtgacacataagcatatcatttctgagctggagcacctaacttttgtgaatacagacgtcggtcggtgcagggcttggctccgcctagccctgaacgacgggctcatggagtgctatcttaagttgcttttgcaggaacaggcccgcctccagctccagaggaaggaatcccttgactctatctctcatagttcggggagtgaggacattgaggttcaccactccggccacaagatacgccgcaaccagaaactgaccgcgtctagtttgtccctcgacaccgctagtagttctcagctgagctgctcccttaacagcgactcatgtttactgcaagagaatgggtctaaatctccagatcattgcgaggaaccgatgtcctgcgattcagaccttggcacagccaatgccgaggattcggaccggagtctacaggacataaaaattttttcctgggcacagtggctgaccccggtgataccagccctatgggaggccgaggctgggggcagccagcgccagcagattgaaacctttctcgcaaatacagttaagccacatctttattag

SEQ ID NO: 18065 - DNA, 3282 bp, synthetic construct
  source 1..3282: mol_type = other DNA; note = Synthetic coding sequence
atgggtggcaaggcgtggcctcgcagggcagtcggtactgcaggcgggccgtgcgccgaacagatttctgccccatttcagacccttttaatgcctcaccttcctctggctagttttaggcccccgttctggggtctgcgtcactcccgggggctgcctaggtttcatagtgtgtctacacaatcagagccccatggatctcccattagccgacgcaatagggaggcgaagcagaaacggcttagagaaaaacaggcaacactagaggctgaaattgccggcgagagcaagtccccagccgaaagcattaaagcctggcgcccaaaggagcttgtgctgtacgagatcccgactaagcccggcgaaaaaaaagacgtgagcgggccacttccacctgcatacagtccccgctatgtagaagccgcttggtacccctggtgggtcagagagggcttttttaagccagagtaccaagcgcgactcccacaagccaccggcgagaccttcagtatgtgtatccctcctccgaacgttactggttcgctccacataggccatgccctgaccgtggctatccaagacgcactggtgaggtggcacaggatgaggggcgatcaggtgctatgggttcccggctctgatcacgcgggtatcgcaactcaggcagtggttgaaaagcagttatggaaggagaggggggttcgcagacatgagttatccagggaagccttcctgcgtgaagtgtggcaatggaaggaggctaaaggcggggagatctgtgaacaactgcgagccctgggcgcaagcttagattgggatcgcgagtgtttcacgatggatgttggctcaagcgtggctgtcaccgaggcattcgtgcggctgtacaaggccggcctgctgtatcgaaaccaccagctggtcaattggtcatgtgctctgcgaagtgccatcagcgatattgaagttgagaaccgcccactgcccggacacactcaactgcgcctgcccgggtgtcccactccagttagttttggccttctgtttagtgttgcatttccggtggacggcgagccagatgcagaagtggtggtgggcacaacccggcccgaaaccttgccaggagacgttgctgttgccgtccacccagatgatagcagatatacccatttacacggcaggcaactgagacacccactgatggggcagcccttgccgctgataactgactatgccgtgcagcctcacgtcggaactggtgcagtcaaggtaactcccgcacacagcccggccgacgcagagatgggggccaggcacggcctttctccacttaacgtgattgccgaagatgggacgatgacaagcctttgcggtgactggctgcaaggattgcatcgcttcgtggctagagagaagataatgagcgtcctcagcgagcggggcctattcaggggactgcagaaccaccccatggtcctgcccatctgttccaggtcaggcgatgttatcgagtacctgttgaaaaatcagtggttcgtgcggtgtcaggagatgggggctagagccgctaaagccgtggagtcaggagccctggagctgtccccgtccttccaccagaagaattggcagcactggttctcccacatcggagattggtgcgtttcacgacaactgtggtggggacaccagatccctgcctatctagtggtggaagaccacgcccagggcgaggaggactgttgggtggtgggacgctctgaggcagaagcaagagaagtggccgctgagttaacagggcggccaggagccgagctgaccctcgagcgtgacccggacgtacttgacacatggtttagtagcgctctattcccattctccgccttaggctggccacaggagaccccggacctggcccgattctatcctctgagtctgcttgagaccggctcagacctgctgctgttctgggtcggacgcatggttatgctggggacccaattgactgggcagctgccattttctaaagtcttactgcatcccatggttagggatcgccagggccggaagatgagcaaaagtcttggaaacgtgctcgacccgcgggacattatcagcggcgtggaaatgcaactgctgcaagaaaagctgcgatctggcaatctggatcccgcagagctggccatcgtggcagccgcacagaaaaaagattttccacatggcatccctgagtgcggaacagacgccctgcgcttcacattgtgctcccatggcgttcaggcaggcgacttacacctgtccgtcagtgaagtccagtcgtgtaggcatttttgcaataaaatatggaatgccctgcgcttcatattgaatgcactgggcgaaaaatttgtccctcagcccgcagaagaattgtctccaagcagtccaatggatgcttggatcctgtctaggttggccttagctgcccaggaatgtgagaggggctttttaactagggaactctccttagtcactcacgcattacaccacttttggctccataacctatgtgatgtttatttagaggcagtcaagccggtgctatggcattcacctcgaccgcttggccccccccaggttctgttttcctgcgcagacttgggccttagactactcgcgccgctcatgcccttcctcgcagaggaattatggcaacggctgccgccccgccctggatgccctccagcacctagtatctccgtggccccttatccttctgcttgcagcctcgaacactggcgccaaccggagctagaacggcggttctccagggtgcaggaggtggtgcaggtgctccgcgcccttcgggccacataccagttgacgaaggcacggccgcgggttttgctacagtcatctgaaccaggagatcagggtctcttcgaggcttttctggagcctttggggacactcgggtattgcggggccgtcgggctgctgcccccgggaaccgccgctccatccggctgggctcaagccccacttagcgacactgctcaggtgtatatggaactgcagggtttggtcgacccacaaatccagcttccactgctggctgccagacgatataagctgcagaagcagcttgacagtctgactgccagaacgccttccgagggggaggccggcacccaacgtcaacagaagctaagctccctgcaactggagttatccaaattagataaggccgctagccatctccggcagctgatggacgaaccgcctgcacccggaagccccgaattgtag

SEQ ID NO: 18066 - DNA, 3621 bp, synthetic construct
  source 1..3621: mol_type = other DNA; note = Synthetic coding sequence
atgacttccgcagccgagattaaaaaaccgcccgtggcccctaagcctaagttcgtggtggccaataataaacccgctccccctcctatcgcccccaaaccagacatagtaatctcttcagtgccccaaagcacaaagaaaatgaaaccggccatcgctcccaagcctaaagtactgaaaacctcacctgtccgggaaatcgggcagtcgccttcacggaagatcatgcttaacctggagggtcacaagcaggagttggcggaatcaacggacaactttaattgcaagtacgagggcaaccaaagcaacgattacatcagccctatgtgttcttgcagttccgagtgcatccataagctggggcatcgggaaaacttgtgcgtcaaacagctggtgttagagcctctagagatgaacgagaacctagaaaattctaagatcgatgaaacactaacaatcaaaacgaggtctaagtgtgacctttacggggagaaggctaagaaccagggaggcgttgtcctgaaagcctcggttctagaagaagagctgaaggatgcattaatccatcaaatgcctcccttcatcagcgctcaaaagcatagacccaccgatagtcctgagatgaacggaggctgtaactccaacggacaatttaggatcgagtttgctgatctctcgccgagcccatcgagcttcgaaaaagttcctgaccatcattcgtgtcatcttcaactgccttccgatgagtgcgaacactttgagacttgccaggacgactccgagaaatcaaataactgctttcagagttcagagcttgaagccctagagaatggcaagagatccacattgatcagctccgacggggttagcaagaaaagcgaggtgaaggatttgggtcccttagagatccacctggtcccttatacgcccaaatttccaacgccgaaacctcggaagacaaggactgctaggctgctcaggcagaaatgcgtcgacacaccttctgagtccaccgaagaacccgggaactctgactcaagcagtagctgtctcactgagaatagcctcaagattaacaaaataagcgttttacaccagaatgttctgtgcaagcaggaacaggtggataagatgaagttaggcaacaaaagcgagctgaacatggaaagtaactctgacgcacaggatttggttaactctcagaaggccatgtgcaatgagaccacgtccttcgaaaaaatggctccatccttcgataaggactcaaatttaagctcagactccaccactgttgatggaagctctatgagcctggcagtagatgaggggaccggctttatcagatgtacagtgagcatgtctctgcctaaacaactgaagctcacctgcaacgagcacttacaatctggaaggaatctgggggtatcggcgccacagatgcaaaaagaatcagtgataaaagaagagaactccctgaggattgtgccaaagaagccacagcgacactccctccctgcgactggagtgcttaagaaggccgccagcgaggaacttttggaaaagagtagctatccaagttcagaggagaagtcttcagaaaagagccttgagcgcaaccatctgcagcacttatgcgctcagaataggggcgtgagcagctcattcgacatgccaaagagagcatcggagaagcccgtgtggaaacttcctcacccaatcctgcctttctcgggcaatcctgagttcctaaagtccgtcacagtctctagcaatagtgagccctctacagccctgacgaaacctagggcaaagtctctatccgctatggatgttgagaagtgcaccaagccttgcaaagatagcaccaaaaaaaattcgtttaaaaaactgctatccatgaagctttccatctgctttatgaaatccgacttccaaaaattctggagtaaatccagccagctcggagacaccacaacaggccatctgagctccggggaacagaaagggatcgaaagcgattggcaaggtttattggtgggcgaagagaaaagatccaagcctattaaggcttactccaccgagaattacagtctggagtcccaaaaaaaacggaaaaaaagccggggtcagacctcagctgccaacggtctgagagccgaatcacttgacgaccaaatgctgtcacgcgagtcctccagccaggctccgtataagagcgttacatctttatgcgctccagaatatgagaacatacgccattatgaggagatcccagaatacgaaaatcttccatttattatggctatccgaaaaactcaggaactcgagtggcagaattcctctagcatggaagatgccgacgctaatgtgtacgaagtcgaagaaccatatgaagccccggatggacaactgcaactggggccaagacaccagcacagttctagcggcgccagccaggaagagcagaacgatctaggcctcggagacttaccctctgacgaagaggagatcatcaactcttccgacgaagacgatgtgagctctgaaagctccaagggtgaacctgatccactcgaggacaagcaggacgaggataatgggatgaagtctaaagtgcaccatatcgccaaggaaataatgtcatcagaaaaggtgtttgtggacgtgctgaaactactgcacattgacttcagagacgccgtagcccacgccagtaggcaactcggcaaacctgttattgaggatcggattctgaatcagattctatactacctgccccagctgtacgaactgaatagagacctgctgaaggaactggaagagcggatgctccattggacagagcaacagagaatcgcagacatatttgtcaagaaaggcccctacctgaagatgtactctacctatataaaggaatttgataagaatatcgccctactggatgaacagtgtaagaaaaatccgggctttgccgccgtggttcgagagtttgagatgtcgcctaggtgcgccaatctggccctcaaacactatctcttgaaaccagtgcagaggattcctcagtatagactactgctcacagactacctgaagaacttgattgaggacgcaggcgattacagagatacccaggacgctctggcagttgtcattgaagttgccaaccatgcaaatgatacaatgaagcagggagacaacttccaaaaactgatgcaaattcaatactcactcaacggtcatcatgaaatcgttcagcccgggcgggtgttcctgaaggaggggatcctgatgaaactgagccgaaaagtgatgcagccccgtatgtttttcctgttcaacgacgctttgctctacacgactccggtgcagagcggaatgtacaagctgaataatatgttgtctctcgcgggcatgaaggtgcgaaaaccaacacaggaggcctaccagaacgagcttaaaattgaaagcgttgagagaagcttcattttgtccgccagcagtgccacagaacgagacgagtggctggaggccatttccagggctatcgaggagtacgctaaaaagcgcatcacgttttgtccaagcaggagcctcgacgaggccgatagcgagaataagtag

SEQ ID NO: 18067 - DNA, 435 bp, synthetic construct
  source 1..435: mol_type = other DNA; note = Synthetic coding sequence
atggataaagattcccagggcttgctggactccagtctgatggctagcggaacagcttctcgatcagaagatgaggagagcttggccggacagaagcgggcgtcgtcccaggcacttggcaccatccctaaaagacgcagtagcagtagaacactctataggttcatcaagcggaagaagttcgacgacgaactggtggagtcctcactggctaagagcagtaccagagcaaaaggagcaagcggcgtggaacctggtaggtgttcgggaagtgagcccagcagctccgaaaagaagaaggtgagcaaggccccttcgactcctgttccaccaagtccagctccagccccagggctcaccaagcgggtgaaaaaatcaaaacaacccctgcaagttactaaggatctcggtcgctggaaacccgccgatgactag

SEQ ID NO: 18068 - DNA, 810 bp, synthetic construct
  source 1..810: mol_type = other DNA; note = Synthetic coding sequence
atgaaaacccctgtcgagctcgcggtctcagggatgcaaacactcggactccagcaccgatgtcgaggggggtaccgtgtgaaggctcgcacctcctatgtagatgaaactctctttggtagtcccgccggcaccaggccgacacctcctgattttgacccgccctgggtcgaaaaagcaaatagaacacggggcgtggggaaggaggctagtaaggcactgggcgccaaaggatcatgcgaaacaactccaagtcgcggatcaacaccaactctcactcctcgtaagaaaaataagtacagacctatatcacacacaccctcatattgcgacgaatctctcttcggcagcagatcagagggggccagcttcggagcccccaggatggcgaaaggtgacgctgccaaactcagagcattgctgtggacacccccccctacccccaggggttcgcactcacccaggccccgagaggcaccgctgagagctattcaccccgctgggccttcaaaaaccgagccaggccccgctgcggatagccagaaactgagtatgggcggcctgcatagttcacggcccctgaagcgtggccttagccatagtctgactcatctgaatgtgccgtctacaggacacccggccacatccgcgccacatactaatgggccccaggaccttagacctagtacctcgggagtaacttttcgaagccctctggtcacgtctcgcgctaggagtgtgtcgatcagcgtgcctagtacaccgcgaaggggaggagctacacagaaacctaagccaccctggaaatag

SEQ ID NO: 18069 - DNA, 501 bp, synthetic construct
  source 1..501: mol_type = other DNA; note = Synthetic coding sequence
atggctaacgaccccctggaaggcttccatgaagttaacctcgcctcccccacgtctcctgaccttctgggtgtctacgagtccggtactcaagaacagacaacctctccttccgtgatataccggccccacccatccgccctatcctcagtgcccattcaagcaaacgccctagacgtgtcagagctccctacgcagcctgtctattcttctccccgaagactcaactgtgccgaaataagctctatcagttttcacgtgacagacccagccccttgctctaccagcggggtgacggcaggacttactaaacttaccacgagaaaggataactacaacgccgaacgtgaatttctgcaaggtgcgacaatcacagaggcgtgtgacgggtctgacgacatattcggattaagtaccgattccctctctcgtctaaggtcgccatcggttcttgaggtgcgggagaagggatacgagaggctgaaggaggagcttgcctag

SEQ ID NO: 18070 - DNA, 390 bp, synthetic construct
  source 1..390: mol_type = other DNA; note = Synthetic coding sequence
atggacaccatgatgttgaatgtgcggaacctgtttgagcagctggtgagaagggtcgaaatcttgtccgaagggaacgaggtgcagttcatccagctggccaaggactttgaggattttcggaagaaatggcagcgcacagaccatgagctcggaaaatacaaagacttgctgatgaaggcggaaaccgagcgctctgcactggacgtgaagctgaaacacgcacgcaaccaggtggatgtcgaaatcaaaagaagacagagggccgaggcagattgcgagaaactcgagcgacagattcagcttatcagagaaatgctgatgtgtgatacttccggatccatccagttaagcgaagaacagaagtctgccctggcctttcttaactag

SEQ ID NO: 18071 - DNA, 486 bp, synthetic construct
  source 1..486: mol_type = other DNA; note = Synthetic coding sequence
atgacattacggtgcctggagcctagcgggaatgggggcgaaggtacccgtagtcagtgggggacggctggatcggccgaggaacccagtccccaggccgcacgcctggccaaggcattgagggaattgggccagactgggtggtattggggaagcatgacggtaaacgaagcgaaagagaagttaaaagaggcccccgaagggacattcctcatccgagatagttcgcactctgattatcttctgactattagcgtgaaaacttcagccgggcctaccaatctgaggatagaatatcaagacggcaaattccggctggactctatcatctgcgtgaaatccaagcttaaacagtttgactctgttgttcatcttatcgattactacgtgcagatgtgcaaggacaaaagaacaggtcccgaggccccgagaaatggaaccgtacatctgtaccttacaaaacccctatacactagcgccccatag

SEQ ID NO: 18072 - DNA, 1389 bp, synthetic construct
  source 1..1389: mol_type = other DNA; note = Synthetic coding sequence
atggacaaggactcacagggcttactggacagtagtctgatggcaagcggtaccgcatctcgaagcgaagatgaagagagcttagctggccaaaagagggccagcagtcaagcgctcggcaccattccaaagagacggagctcttcacgattcattaaacggaaaaagtttgatgacgagctcgtggaatcgagtctggcaaaatcgtcaacccgggcaaaaggcgcttccggtgtggaaccaggtaggtgctccggtagcgaaccaagttccagcgagaaaaagaaagtttcaaaggcaccaagtacaccggtgccaccatctccagctccagcgcccggtctaactaaacgcgtcaaaaaaagtaagcagcctctccaggtgaccaaggatctggggaggtggaagccagcagacgacctgctactgataaacgcggtgctgcagactaacgacctcacctcagttcacctgggtgtaaaattttcctgtcggttcacccttagggaagtgcaggaaaggtggtacgcgctcctatacgacccagtgattagcaaacttgcttgtcaggccatgaggcagctacatcctgaggccatcgccgccattcagagtaaggcactattcagcaaggctgaggagcaacttctatcaaaggtaggcagtaccagtcaacctaccctggagacattccaggacctgctacaccggcatccagatgccttttatctggccagaacagcaaaggccctccaggcccattggcagcttatgaaacaatactacttactggaggaccagacagtgcagcccctgcccaagggtgaccaggtacttaatttcagcgatgcggaagacctgatcgacgattctaagcttaaagacatgcgcgatgaggtgttggagcatgaactgatggtggctgaccgacgccagaagagagagatcaggcagctcgagcaggagcttcataaatggcaggtgttagtggattcaatcaccggcatgagctctcccgattttgataaccagacgctggccgtcctaagagggaggatggtgcgttatctcatgagaagtcgcgagatcaccctggggcgggctactaaggataatcagatcgacgtggatctcagcctggaaggcccggcttggaagatatcacggaaacagggcgtaatcaagcttaagaacaacggagatttttttatcgcgaatgagggaaggagaccaatatacatcgatggccgtccggtgctctgcggctccaagtggaggctaagcaacaattccgtggtcgaaattgcctcactgaggttcgtgttcctcatcaaccaggaccttatcgctctcataagagctgaagctgctaaaattactccacagtag

SEQ ID NO: 18073 - DNA, 576 bp, synthetic construct
  source 1..576: mol_type = other DNA; note = Synthetic coding sequence
atgggtaaaaagacaaaacggacagctgatagctcgagctctgaagacgaagaggaatacgtggtcgaaaaggtcctggaccggagagttgtgaaggggcaggtggaatatcttctgaagtggaaaggtttctcagaagagcataatacatgggagccagagaagaacctggattgccccgagctcatcagcgaattcatgaagaagtataaaaaaatgaaggagggcgagaataacaaacctagggaaaagagcgagtcaaacaagcgtaagtctaacttttctaacagtgcggatgacatcaagagtaagaagaagcgggaacagagcaatgatatcgcaagaggtttcgagcgcggtttggaaccagagaagattatcggcgccacagattcctgtggtgatctcatgttcctgatgaaatggaaggataccgacgaggcggacttagtgcttgcaaaagaggccaacgtgaaatgcccccagatcgtgatcgccttctatgaagagcgtctcacctggcatgcttacccggaggatgctgaaaacaaggaaaaagaaacagccaaatcctag

SEQ ID NO: 18074 - DNA, 1212 bp, synthetic construct
  source 1..1212: mol_type = other DNA; note = Synthetic coding sequence
atggccagttcgagcgtccctcccgccacagttagcgcagccaccgcgggaccaggacctgggtttggatttgcctctaagaccaaaaagaagcatttcgtgcaacaaaaggtgaaggtctttcgtgcagcagaccctctggtgggagtgttcctgtggggagtcgctcattcaatcaacgaactttcccaggtaccaccccctgtgatgttactgccggacgattttaaggcgtcatccaagatcaaagaatattgcccccaagtttttcggaacctcagagacaggttcgggattgacgaccaagactatttggtgtccctgaccagaaaccccccctcagagagtgaggggagcgacggacgctttctcatatcctacgaccggactttagttataaaggaagtatcctctgaggacatcgcagacatgcacagtaatctctccaactatcaccagtatatcgtgaagtgccatgggaacactcttctgccccagttcctggggatgtatcgagttagcgttgacaacgaagactcatacatgctggtcatgagaaatatgttttctcaccgcttgcccgtccacagaaagtatgaccttaagggctcattggtgtccagggaagccagcgataaagagaaagtgaaggagctacccaccctgaaggatatggacttcttaaataagaatcagaaagtgtacatcggagaagaagagaaaaagatatttcttgaaaagctgaagcgcgatgtggagttcctagttcaactgaagataatggattatagtctgttgctgggcatacatgatattatccgaggctctgagcccgaggaggaggcccctgtgcgggaggacgaatccgaagtagacggagactgcagtctgactggtccccccgcactcgtaggatcttacggcaccagtcccgaaggaatcggcggttatatccactcacataggcctttgggcccaggagagtttgaatcctttatagacgtgtacgccattcggtcagccgaaggagctccccagaaggaagtgtacttcatgggcctcatagatatcctgacccagtacgatgccaagaagaaagccgcccatgcagctaaaacagttaagcacggtgccggtgcggaaatcagtaccgtacatccggagcagtatgcaaagaggttcctagatttcatcaccaacatattcgcttag

SEQ ID NO: 18075 - DNA, 576 bp, synthetic construct
  source 1..576: mol_type = other DNA; note = Synthetic coding sequence
aagatagaagtaattgaaatcatgactgacagaggaagcgggaaaaagagaggcttcgccttcgtgacctttgacgaccatgacagtgtcgataagattgtgatccagaaatatcataccgtgaatggccataattgtgaggtccgcaaggcactctccaaacaggaaatggcctcggcatcatcctcccagcggggtcggagcgggagcgggaattttggcggggggcggggaggtggcttcggaggcaacgataactttggccggggaggaaacttttccggccgcggggggtttggaggtagccggggtgggggcggatatggcggttccggagatggatacaatggcttcggaaatgacggtagcaacttcggaggcggagggtcttacaatgacttcgggaattacaataaccagtcgtccaatttcgggcctatgaagggcggcaactttggtggacgaagttctggtccgtatggcggcggaggccagtatttcgccaagcccagaaaccaggggggctacggcgggtcatccagcagctcaagttacggatccggaagacgcttctag

SEQ ID NO: 18076 - DNA, 543 bp, synthetic construct
  source 1..543: mol_type = other DNA; note = Synthetic coding sequence
atggaattgaccatctttatcttgcggctagcgatttatatcctgacttttcctttgtacctgctgaattttctcggactttggagctggatctgcaagaaatggtttccctatttcttggtccgattcacagtgatttacaacgaacagatggcttccaagaagagagagctgttcagcaacctgcaagaattcgccggcccgagtgggaagctaagcctgttggaggtgggttgcggtaccggcgcaaattttaagttctatcccccaggatgccgagtcacatgtatcgacccaaatccaaatttcgaaaagttcctgattaaatctattgctgaaaacaggcatctccagttcgaacgctttgttgtagctgcgggcgagaatatgcaccaggtagcggacggctcggtggatgtggtcgtttgcactctggttctgtgtagcgtgaagaatcaggaacgcatactacgcgaagtgtgccgggtcctccgtcccggaggggccttttattttatggagcacgtggctgctgaatgttag

SEQ ID NO: 18077 - DNA, 1431 bp, synthetic construct
  source 1..1431: mol_type = other DNA; note = Synthetic coding sequence
atgggactcaaaaaaatgaaggggctatcttatgatgaggcattcgccatggctaatgatcctctggaaggatttcatgaggtaaacttagcatctcccacaagtcccgacctacttggagtctatgaaagcggcacccaggaacaaacgacctccccatctgtgatttacaggccacacccatctgctctcagttctgtccctattcaggccaacgcgctggacgtgagcgagctccccacccaacccgtgtattcatctccacgcaggctgaactgtgcggaaatatcatctatctccttccatgtgactgaccccgccccttgcagcacctcgggagtcactgccggactgacaaagctaacaacacgaaaggataactataatgccgagcgggaatttctgcagggcgcaaccatcacagaggcttgcgacgggtctgatgatattttcgggttatcgactgactccctgtctaggctgaggtcaccctcagtgctggaggtgagagagaagggatatgagcggctgaaggaggaactcgcaaaggctcagcgggaattgaagctgaaggacgaggaatgtgagcgcctgagtaaggtgagagaccagctgggtcaggaactggaagaacttactgcatcccttttcgaagaagcccataaaatggtgagggaagctaacattaagcaggcgacagctgagaaacaattgaaggaggcgcagggaaagatcgatgttctgcaagcagaagtggcggcactgaagactctggtgctgagctcttcaccaacgagccccacccaggagcccttgcctggcggaaagacaccgttcaaaaaaggacataccagaaacaaaagtacatccagtgccatgtcaggttcccatcaggacctgtccgtcatccagcctatagtgaaagactgtaaggaggctgacctgagtctgtataatgaatttcgtctctggaaagatgaacccacgatggatcgtacttgcccatttctggacaagatctaccaggaagatattttcccatgtctgacgttttccaagagtgaactggcatcagctgttctcgaggccgtggagaataacaccctcagcatcgaaccagtgggtttgcagcccattcgattcgtcaaggctagcgcagttgagtgcggtggcccgaaaaaatgcgctctgacaggccaaagcaagagctgtaagcatcggattaagctgggtgactcctccaactattactacatctcccctttttgccgctatagaatcaccagtgtctgcaattttttcacatatatcagatatatccagcaggggcttgtaaaacaacaggatgtggatcagatgttttgggaggtcatgcaacttagaaaagagatgtcactcgcaaagttagggtattttaaagaagagctctag

SEQ ID NO: 18078 - DNA, 336 bp, synthetic construct
  source 1..336: mol_type = other DNA; note = Synthetic coding sequence
atggacacaatgatgttgaacgtgcggaacctgttcgaacaactcgttcggagggttgagatattgagcgaggggaacgaggtgcagtttattcagctggctaaggacttcgaggactttcgaaaaaagtggcagagaacagaccatgagctcggaaagtacaaggatctgctgatgaaggcagagactgagcggtccgcgctggatgtgaagcttaagcatgcccggaatcaggttgatgtggagataaaacggagacagcgtgctgaggccgactgcgagaagctcgagaggcagatccaacttatccgcgagatgttgatgtgcgacacatag

SEQ ID NO: 18079 - DNA, 324 bp, synthetic construct
  source 1..324: mol_type = other DNA; note = Synthetic coding sequence
atgatcaaaaatctggaagtgcagctaaggcgggccactgatgaaatgaaggcctatatttcatctgatcagcaggagaagcggaaagccatcagagagcagtacacaaagaacactgccgagcaggagaatcttggcaaaaagctgagagagaaacagaaggtgatacgcgagtcacacggccccaacatgaagcaggccaaaatgtggcgtgacttggaacagctgatggaatgtaagaaacagtgctttttgaaacaacaatcccagactagtatcgggcaggtgatccaagaaggaggtgaggacaggctgattctgtag

SEQ ID NO: 18080 - DNA, 2772 bp, synthetic construct
  source 1..2772: mol_type = other DNA; note = Synthetic coding sequence
atgtgcattccccccccaaacgtcaccggatctctgcacattgggcatgcccttaccgttgctattcaggacgccctggtgcggtggcaccggatgcggggtgaccaggtgttatgggtgcccgggtcagatcatgccggaatcgcaactcaagctgtcgttgagaaacagttatggaaggaaagaggcgtgagaaggcatgagctcagccgagaagcctttctccgcgaagtgtggcagtggaaggaggctaagggaggcgagatctgtgagcaactcagagccctgggcgcttcactcgactgggaccgagagtgctttactatggacgttggaagcagtgtggccgtgaccgaggccttcgtgcggctgtataaggcaggcttattgtatcgcaatcatcaactcgttaactggtcttgtgcactcagaagcgccatctccgatatcgaagtcgagaatagacccctccctgggcatacccaacttagacttccaggctgccccacaccggtgtccttcggattgctgttcagtgtggctttccccgttgacggcgaaccagacgctgaggtcgtggtgggaactacacgccccgagacactgcctggtgacgtcgccgttgctgttcaccctgacgattcacgctacacacatctgcacggaaggcaactgaggcacccactgatgggacagccattgcccctgatcaccgactacgccgttcagcctcatgttgggacaggcgccgtcaaagtgacccctgcgcacagtcccgcggacgctgaaatgggtgccagacacggactaagtcctttgaatgtgatagccgaggacggaacgatgacctccctgtgcggggattggcttcagggattacacaggtttgtggcacgagagaaaattatgagcgtgctgtctgagagagggttgtttaggggcctacaaaaccatcctatggtccttcctatctgcagccgcagcggagacgtcattgagtatcttctcaagaatcagtggtttgttaggtgccaggagatgggcgcacgcgccgctaaggccgttgaatctggtgcgctggagctatcgccatccttccaccagaagaattggcagcattggttttcacacattggcgactggtgcgtgtccaggcaactctggtgggggcaccaaattcccgcttacctggtagtcgaggaccacgcacagggagaagaagattgctgggtggtgggccggtctgaggccgaagccagagaggtggccgccgaactgactggtcgccctggagctgagttgactctcgagcgggaccccgacgtcctggatacatggttcagtagtgccctttttccttttagcgcattaggttggccccaagagacacctgacctggctagattctaccctctgtcccttcttgagaccgggtccgatttgctacttttctgggtaggtaggatggtgatgctggggactcagctgacaggccagctgcctttttccaaggtactcctgcatccaatggtgagggaccggcagggacggaaaatgtccaaatcattggggaatgtgctggacccccgagacatcataagcggagtagagatgcagctgctacaggagaaactgcgatcaggtaacctcgaccctgccgaacttgccatcgtggctgccgcgcagaagaaagattttccccacggcattcctgagtgcggcactgatgccttacgattcactctgtgttctcacggggtacaggccggagacctccatttgtctgtctccgaggtccagagctgtcgacacttctgcaataaaatttggaacgccctgcgatttatcttgaatgctttaggagagaaattcgtgccgcaacccgctgaagagctctccccttcatcccctatggacgcatggattctgtcccgactggcgctagcggcccaagaatgcgagaggggatttttaacccgagagctttccctggttacgcacgcccttcaccatttttggttgcataacctctgcgacgtgtacttggaagcagtaaagccagtcttatggcacagtccccgacctctgggtcctccacaagtactgttttcctgcgctgatctaggactgcggctgcttgccccactgatgccgttcctggccgaggaattgtggcaacggcttcccccccgccctggctgccctcctgctccatcaatttccgtggccccctacccatccgcttgctccctggagcactggcgtcagccagaactggaacgtcgcttttcgagggttcaggaggtggtgcaggttctccgggcgctgcgcgctacataccaactgaccaaggctcgcccccgagtccttttacagtcctctgagcccggtgatcagggactgtttgaagcctttctggagcctctcggcaccttgggatactgtggagcagttggcctcttgcccccgggaaccgcggcccccagtggctgggcacaggcaccactgtctgacactgcccaagtttatatggaactgcaggggctcgtggacccccagattcagttgcccctgctcgctgccagacggtacaaactgcagaaacagctggattcactgactgcaagaacgccatcagaaggagaggcaggcactcagcggcaacagaaactctcatcgctgcagttggagctgagcaagttagacaaagccgcttcccacctgcggcagctgatggatgagccccctgctcctggttcacccgagctgtag

SEQ ID NO: 18081 - DNA, 2076 bp, synthetic construct
  source 1..2076: mol_type = other DNA; note = Synthetic coding sequence
atggaggaatctccactgtcaagggctccatcccgaggcggagtgaactttctcaacgtggccaggacttatattccaaacacgaaggtggagtgccactatacgctacccccgggcacaatgccatctgcctccgactggatcggcattttcaaagtggaagctgcttgcgtgcgtgactatcacacctttgtctggtctagtgttcctgagtccactactgacggctcaccgattcatacttccgtccagttccaggcaagctatctgccgaagccgggggcccagttgtaccaatttcggtacgtaaacaggcaaggacaggtatgcgggcagagcccgccgttccagttcagggaacccagacctatggacgaactagttactctggaggaggctgacggcgggagtgacatacttctggttgtgcctaaagcaactgtcctgcagaaccagcttgatgagagtcagcaagaacggaacgacctgatgcagctgaagctgcagctagagggacaagtgaccgagctgcggtctagagtgcaggagctcgagcgagccctggcaacggcaaggcaggaacatacagaattgatggaacagtacaagggtatttcgcggtctcatggagagatcacggaagagcgtgatatcctgtctagacagcaaggagatcatgtcgcgcgaatcctcgagctggaagatgatatccagaccatctctgagaaggtgctgacgaaggaagttgaattagatcggcttcgagacaccgtgaaagcgctgactcgggaacaggagaaactgctcgggcagttgaaggaagttcaagctgacaaagagcaatctgaagcggagctccaggtggcccaacaggagaaccaccatcttaatcttgatctgaaggaagccaagtcatggcaggaagaacagagcgcccaggctcaaaggctgaaggacaaagtggcacagatgaaagacacactggggcaggcgcagcaacgggttgctgagcttgagccgttaaaagaacagcttcggggagcacaggagctggcagcctcttcccagcaaaaagcaacactgctgggcgaagagctggcatctgccgctgctgcacgcgatcgcacgatcgctgaattacataggtctcgactcgaggtcgccgaggtgaatgggagactggcggaactgggtctgcaccttaaggaagagaagtgtcaatggtccaaggagagggccggcttgctgcaatccgttgaagccgagaaggacaaaatactgaaacttagcgcagaaatcctgcggctggagaaggccgtgcaagaagagaggacacagaatcaggtatttaagacggagttagcgagggagaaagactcctcactggtccagctctcagagtcaaagagggaactgacagaactgcggtctgctctgagagtgctccaaaaagagaaagagcagctccaggaggaaaagcaggaactcttggagtatatgcggaaactggaggctcgcctcgagaaagtcgccgacgaaaaatggaatgaggatgctacaaccgaagatgaagaagccgcagtcgggctgtcctgccccgcagccctgacagactccgaggacgaatcacctgaagacatgcgactgcctccttatggcttgtgcgagcggggtgacccaggttcgagtcctgccggaccccgcgaggcctccccactcgttgtgatctcccagccagcgcccatctcaccgcacctatctggacccgccgaggattcttctagcgacagcgaagcagaagacgaaaaaagcgtgctgatggcagccgtacagagcggcggggaggaagctaacctccttctgccagagctcggctccgctttctacgacatggcctccggctttacagtgggcacattgtccgaaacatccaccggcggcccagctacccccacctggaaagagtgtcctatttgcaaagaacgattcccagcagaaagcgacaaggacgccttagaggaccatatggacgggcatttttttttttctacccaagacccgtttaccttcgaatag

SEQ ID NO: 18082 - DNA, 366 bp, synthetic construct
  source 1..366: mol_type = other DNA; note = Synthetic coding sequence
atgaatgagagcaagccgggtgactcccagaatctcgcatgtgtgttctgtagaaagcatgacgactgccctaacaagtatggagagaaaaagacaaaagagaagtggaatctcactgtgcattattactgcctgctcatgagctcgggcatttggcagcgggggaaagaagaggagggcgtgtacggcttcctgatcgaggatatccgaaaagaggtgaaccgcgccagtaaactcaaatgttgtgtgtgtaaaaaaaatggcgcatccatcgggtgtgtggccccacgctgcaagaggagctatcactttccgtgcggtcttcagagggagtgcatctttcaatttacagggaattttgcttag

SEQ ID NO: 18083 - DNA, 657 bp, synthetic construct
  source 1..657: mol_type = other DNA; note = Synthetic coding sequence
atgaactgccgctccgaggtcttggaggtttcggtagagggaagacaagtcgaggaagctatgctggccgtgctccatactgtgctgctccacaggagtactggaaagttccactacaagaaagaggggacctactctattgggactgtggggacccaggatgtagattgtgattttattgacttcacatacgtgcgggtttcgtccgaggagctggaccgggcactcaggaaggtggtcggcgagtttaaggatgcccttagaaactctggaggcgatggtcttgggcagatgagtctcgaattctaccaaaagaaaaaaagccggtggcctttttcagacgaatgtatcccatgggaggtgtggacagtcaaggttcatgtggtggctttggctaccgagcaggaacggcagatttgccgggagaaagtcggagaaaaactgtgcgaaaagatcatcaacatcgttgaggtgatgaaccggcacgagtacttgccaaagatgcctactcagtctgaggtcgataacgttttcgacacagggcttcgagacgtgcagccatatctgtacaagatttcatttcaaattaccgatgctctgggcacttctgttaccacaacaatgaggaggcttatcaaggataccctcgccctgtag

SEQ ID NO: 18084 - DNA, 1899 bp, synthetic construct
  source 1..1899: mol_type = other DNA; note = Synthetic coding sequence
atggatactatgatgcttaacgtccgaaatctgtttgaacagctggtaaggagagtggaaattttatctgaggggaacgaggtgcaattcatccagctcgcaaaggatttcgaggactttagaaaaaaatggcagcgaaccgatcatgagctggggaaatataaagacctactaatgaaggcagagacagagcgcagcgctcttgacgtcaagctgaagcatgctcgaaaccaggtcgatgtggagattaagcgtcggcaaagggcggaagccgactgtgagaagctagagcgccagatccagttgatcagagagatgctaatgtgcgacacctcgggaagtatccagctttccgaagagcagaaatcagctcttgctttccttaataggggccagccttcttcttccaatgctgggaacaaacgtctgtctacaatcgatgaatctggcagcattttgtccgacataagcttcgacaagacagacgagagtctggactgggacagtagtcttgttaagactttcaagctcaaaaaacgggagaagcgaaggtctacctcaagacagtttgttgacggaccgcccggtcctgtcaaaaagactaggagcatcggttctgctgttgatcagggaaacgaatcaattgtggccaagaccacggtcacggtccctaacgacggcggccccatcgaggcggtctcaaccatcgagaccgtaccttattggacccgttctcggcggaaaaccgggacactgcagccatggaatagcgactcgacccttaactcccgccagctcgaaccacgcacggaaacagactcagtaggtacgccgcagtcgaatgggggcatgcgcctgcacgactttgtttctaagacggtgatcaaacctgagtcctgtgtgccatgtggaaagaggatcaagttcggaaagctatctctcaaatgtagggactgcagggtagtcagccaccctgagtgtagagatcgatgtccactgccctgtataccgactctgattggcactcctgtgaagatcggcgagggcatgctggccgactttgtgagtcagactagcccaatgatacccagcatcgtggtgcactgcgtaaacgaaatcgagcaacggggcttaacggaaactggcttgtaccggattagcgggtgcgaccgtacggtcaaagaacttaaagagaagtttctgcgtgttaagaccgtgccgctcctgtccaaggtcgacgatatccacgcaatctgctccctactgaaagattttctccgaaacttaaaagaacccctcctaaccttccggctcaacagggcattcatggaggcagctgagattacagatgaagacaactccatcgctgccatgtaccaggccgttggggaattacctcaggcgaaccgggacacactcgccttcttaatgatccacctgcagagagtggcgcagtccccccatacaaagatggacgtggcaaaccttgccaaggttttcggaccaacaatcgtcgcccatgctgtaccgaacccggaccccgtgactatgctccaggatatcaagcggcagcctaaagtcgttgagcggctgctctcgctcccattggaatattggtcacagtttatgatggttgaacaggagaatattgatcccctgcatgtgatcgagaattcaaacgctttttctactcctcagactcccgacatcaaggttagccttctgggaccagtgacaactccagagcaccagctgctcaaaacgccatcgagttcttccctgagccagagggtgaggtcaaccttgaccaaaaacacaccacggttcggtagtaagagcaagagtgcaacaaacctggggaggcagggcaatttcttcgctagcccgatgctgaaatag

SEQ ID NO: 18085 - DNA, 1134 bp, synthetic construct
  source 1..1134: mol_type = other DNA; note = Synthetic coding sequence
atggccactatccccgactggaagctgcagctactagccagacgacgccaggaggaagcttcagttcgagggcgagagaaggccgaaagggaaagattgagccagatgcccgcctggaaaagagggctgctggagcgccgaagagccaagttgggcctctctccgggcgagcctagcccagtgctaggaacggtagaggcgggcccccccgatcccgacgaatctgccgtgctgctggaggcaatcggccccgtgcatcaaaatagattcatccggcaggagcgccaacagcagcaacaacagcagcagcggtcagaagaactactggcggagaggaagcctggacctttggaagctagagaaagacgcccctccccaggagaaatgagggatcagagccccaaggggagagaaagtcgggaggagagattatcaccaagagaaactcgcgaacgaaggctggggattggaggggcccaggaactgtcattgcgccctctggaggccagggactggaggcagtcacccggcgaggtgggtgatcgctcttctagactgagcgaggcatggaagtggcggctgtcacccggggagacgccagaacgttccttgagactcgctgaatcgcgggaacagtctccacggcggaaggaggttgagagtcgcctctctcctggagagagcgcttaccaaaaacttggtttgactgaggctcacaaatggcgtcctgactcccgagagagccaagagcagagcctagtgcaactggaggcaaccgagtggcgattgcggtccggggaggaacgtcaggattacagcgaagaatgtggccggaaggaggagtggcctgttccgggggttgccccaaaagagacggctgagctaagcgagaccctcacccgggaagctcagggaaattcctctgccggcgtagaagcagccgaacagagacccgttgaagacggggaacgagggatgaaacccacagaaggctggaagtggactctgattatgtccctagctggcaagggaaatcagcacttagtgacgtgctttccccatcctgtgagtggcggtcgagcaaattgccccattagtaccctgatccaatcaccttggtgtgggtgggggtag

SEQ ID NO: 18086 - DNA, 1134 bp, synthetic construct
  source 1..1134: mol_type = other DNA; note = Synthetic coding sequence
atggcgacaatacccgactggaaattgcagctcttagcgcgacgacggcaggaggaggctagcgtaaggggacgcgagaaagccgagagggagagactcagccagatgcccgcctggaagcggggactgttagaacggagacgagctaaacttggtttaagccccggcgaaccatccccggtcctgggtactgtcgaggctggcccgccagaccctgatgagagcgccgttctcctcgaagctattggacccgtacaccagaataggtttatcagacaggagcgccaacaacaacagcagcagcagcagcgttcagaggaacttctggccgagaggaaacccggtccactcgaggctagagaaagacggcctagccctggagagatgagagaccagagtccaaaaggaagggaaagtcgcgaggagaggttgtctcctagagaaactcgggaaaggcggctgggaatcggcggcgctcaggaactgagccttcgccccctggaagctagggattggcggcagagcccaggggaggtgggagatcggagcagcagattgagcgaggcctggaaatggcgcctatctccaggcgagacccctgagagaagcctacgcctcgccgagtcacgggagcaatctcctaggcgaaaagaggtggagagtcgattgagtccaggcgaaagtgcctatcagaagctaggattaaccgaggcacataaatggagaccagacagccgtgaatcccaggaacagtcactcgttcagcttgaagccaccgagtggcggcttcgatccggcgaggaaaggcaggattactctgaggaatgtggccgcaaggaggagtggccggtccccggagttgcacctaaagagactgctgagctgagcgagaccttgacccgtgaggcacagggcaacagcagcgcaggcgtagaggcagcagaacagcgtcctgtcgaggatggagaacggggtatgaaaccgaccgaaggctggaagtggacactgattatgtccctggcagggaaaggcaaccagcatctggttacttgcttcccccacccagtgtcaggtgggcgggctaattgtcctattagtacactgatccagtccccttggtgcggctggggatag

SEQ ID NO: 18087 - DNA, 774 bp, synthetic construct
  source 1..774: mol_type = other DNA; note = Synthetic coding sequence
atgccacacctgccccttgcctcctttcgccctcctttctggggcctccggcattccaggggactgccgaggtttcatagcgtttcaacacagtccgagccacatgggtccccaatctcgcggaggaatagggaggccaagcagaagagactgagagaaaaacaggccactttggaggcggaaatcgctggagagtccaagagcccagctgagagtatcaaagcatggcgccccaaagagctggtgctgtatgagatccctaccaaaccaggcgaaaagaaggatgtatccggaccgctgccacccgcttactctccgcggtacgtcgaggccgcatggtacccatggtgggtaagggaagggttctttaagcccgaataccaggcaaggctcccacaggccaccggcgagacattctctatgtgcatcccacctccaaatgtaactggctctctgcatatcggacatgcgctaaccgtggccattcaggacgcccttgtgcgttggcatcgaatgcggggcgaccaagtattgtgggttcccgggagcgaccacgccggaattgccactcaggctgttgtggaaaagcagctgtggaaggaacggggagtacgacgccacgagctctcccgggaagcctttcttagagaggtctggcagtggaaagaggcgaaagggggcgaaatctgtgaacaactgcgagccctcggagcgtctctggactgggatagggtcttttaccatggctgttggctgctttcgggatgtgattag

SEQ ID NO: 18088 - DNA, 1446 bp, synthetic construct
  source 1..1446: mol_type = other DNA; note = Synthetic coding sequence
atggcgtccgccgcctcagttacctcactggccgacgaagtcaactgtccaatctgccaggggacactgcgcgagccagttaccattgattgcgggcacaacttttgtcgtgcatgtttgacacggtactgtgagattcccggacccgaccttgaggagtctcctacctgtcctctgtgcaaggaaccttttcggccaggctcattccgacccaattggcagctggccaatgtcgtggagaacatagagcgcctgcagctggtttctactctgggcctgggggaagaggatgtatgtcaagagcacggagagaagatctatttcttctgtgaggacgatgaaatgcaactgtgtgtagtgtgccgggaagctggagaacacgcaacccacactatgcgcttcctggaggacgccgcggccccatacagagaacaaatacacaaatgccttaaatgtctgaggaaggaacgggaggaaattcaggaaattcagtcccgggagaacaagcgaatgcaggtgttgctcacccaggtgagcacaaaacgacaacaggtgatcagcgaattcgctcatttacggaagttcctggaggagcagcagtccattctgcttgctcagctcgagtctcaagatggcgatattctcaggcagcgcgatgagtttgacctcttggtggctggagaaatttgccgttttagtgccctgattgaagagttggaagagaaaaatgaacgaccagctcgagagctcttaactgacatacggtccactctcattaggtgtgaaacgaggaagtgccggaagcctgtcgcagtctcacctgagttgggccagcggatccgcgattttcctcagcaggccctgccgttacagcgagagatgaaaatgttcctcgagaatcttcccaaccacctggtgatccctacagcccatataagccttgacccacagacatcccacccaaagcttctgctgagtgaggatcaccagcgggcgcagttcagttataagtggcagaacagtcccgacaaccctcagcggtttgacagagctacctgcgtcctggcccacaccgggatcacaggaggacgacacacgtgggtcgtgtccatcgacctggcacatgggggatcttgtactgtcggggtggttagcgaagacgtgcagcgaaagggagaattacggctcaggccagaagaaggcgtgtgggccgtgcgcctggcctgggggttcgtatctgccctggggtcatttccaactcgcctaacactgaaagagcagccaaggcaggtccgcgtctctttagactacgaagtgggctgggtgacgttcacaaacgcggtaaccagggaacccatctacacatttaccgcaagcttcaccaggaaggtgattcccttctttggcctttggggaagaggcagtagcttctcacttagcagctag

SEQ ID NO: 18089 - DNA, 597 bp, synthetic construct
  source 1..597: mol_type = other DNA; note = Synthetic coding sequence
atgacgctgaggtgtttagaacctagtggtaacggaggcgaaggcacccgctcccaatgggggacagcgggaagtgccgaggaaccatcgccacaggccgcccggcttgctaaggctttacgtgagttagggcagactgggtggtattggggtagcatgacggttaacgaggccaaggagaagcttaaagaagccccagagggtaccttccttatccgtgatagttcacactctgattacctacttacaatttctgtgaaaacaagcgcagggcctaccaacctacgtatcgaataccaagacgggaagttcagattggactctattatatgcgtgaagtctaagctgaagcaatttgattcagttgtgcacctgatcgattattacgtgcagatgtgcaaggataagcgtactggcccagaggcgcccaggaatgggacagtgcatctgtatctgaccaagccgctgtatacttccgctccatctctccagcacctgtgccggctgaccattaataaatgtacaggtgcaatttggggccttcccctcccaactaggcttaaagactatctggaagagtacaagtttcaggtgtag

SEQ ID NO: 18090 - DNA, 345 bp, synthetic construct
  source 1..345: mol_type = other DNA; note = Synthetic coding sequence
atgaccactcgacaagctactaaggacccccttctgaggggcgtatctccaactccgtccaaaattccagtgcggagtcagaaaaggacgccatttcccactgtaacctcgtgcgccgtggatcaggaaaaccaggatccacgccggtgggttcagaagccacctcttaacatccaacgccccttagtggattctgcgggacctcgcccaaaggcccgccaccaggcagagacatctcagcggcttgtcggaatatctcaacctcggaaccctctggaggagctgcgaccgtctccgagaggccagaacgtggggccaggtcccccggcccaaacagaggcctag

SEQ ID NO: 18091 - DNA, 1446 bp, synthetic construct
  source 1..1446: mol_type = other DNA; note = Synthetic coding sequence
atggcgtccgccgcctccgtcacctctctggctgacgaggttaactgtccaatttgtcaggggacactccgggaacccgtgaccattgattgcggccacaacttctgtcgtgcttgtctgacacgatattgcgaaatcccgggtcctgacctcgaagaatccccaacttgccccctgtgtaaagaacctttcaggcctgggtcttttaggcccaattggcagttggctaatgtagtggaaaacattgagcgcctgcagctggtgtccacgctgggtctgggagaagaagacgtctgccaagaacatggcgagaagatttactttttttgtgaggacgatgaaatgcagctctgcgtggtctgcagagaggcaggcgaacacgccacacataccatgagatttttagaggacgccgctgccccctaccgggagcaaatacataaatgtctgaaatgccttaggaaagagcgggaggagatccaagagatccagagccgcgagaacaagaggatgcaggtgctgctcacacaggtgtctacaaagaggcagcaggtcatttcagagtttgcgcacctgaggaagtttctggaggagcaacagagcatcctgcttgcgcagctggagagtcaggatggtgatattcttcggcagcgcgatgagttcgacctgctggttgcaggcgaaatctgcagatttagcgcactcatcgaagaactggaggagaagaacgagaggcctgccagagagcttctcactgatattaggagtactctgatcaggtgcgagactcggaagtgtcgaaaaccagttgcagtgtccccagagctgggtcagagaattagggattttcctcagcaagctctgcccctacagcgggaaatgaagatgttcctcgagaacctgcccaatcacctcgtcatccccaccgcccacatctccctggatccccaaaccagccaccccaagttgctcctgtcagaggatcatcagagagctcaatttagctacaaatggcagaactctcccgataatcctcaacggttcgaccgcgcgacatgtgtactagctcataccggaattactggaggccggcatacttgggtcgtcagcatagatcttgcacatggaggctcctgtactgtgggggtggtgtccgaggacgtgcagcgcaagggcgaactgcgtcttcgaccagaggaaggcgtttgggcagtgcgactggcttggggcttcgtgtccgctttgggatctttccctactcgactgacgctaaaagaacaacccaggcaggtgagggtgagcctggattacgaggttggctgggtgacatttaccaatgcagtaacccgggagcctatctacacattcacagcttcttttacaaggaaagttattcctttttttggattgtggggtagaggctcctccttctcactttcttcctag

SEQ ID NO: 18092 - DNA, 396 bp, synthetic construct
  source 1..396: mol_type = other DNA; note = Synthetic coding sequence
atgtctaagagatacctacagaaagccactaagggcaagctgttaattatcatcttcatcgtcaccctctggggaaaggtagtgagcagcgctaaccaccacaaagcacatcacgtgaaaacagggacttgcgaagtggttgctctgcataggtgttgcaacaaaaacaagatcgaagaaagaagccagacagtgaagtgctcttgtttccccggccaggtggcaggaaccacacgtgctgccccctcctgcgttgacgctagtattgttgaacaaaagtggtggtgccacatgcaaccctgcctggaaggtgaggaatgcaaagtgctcccggacagaaagggctggtcgtgtagctcaggtaataaagtgaagaccacacgggtaacacattag

SEQ ID NO: 18093 - DNA, 765 bp, synthetic construct
  source 1..765: mol_type = other DNA; note = Synthetic coding sequence
atggtacgagaggccaacattaagcaagccacagcagagaaacagttgaaggaggctcaaggcaaaattgacgtgctgcaggcagaggtcgccgctctgaaaacattagtccttagctcctcccccacgtcccccacacaggagcctttgccaggcggtaagactcctttcaagaaaggtcatactagaaataaaagcacgtcctccgccatgagtgggtcccatcaagatctgagcgtcatccagcctatagtgaaagattgcaaggaagctgatttgtcattgtacaacgagtttagactctggaaggacgaaccaacgatggatcggacctgtccttttctggacaagatttaccaggaggacatctttccgtgtctgacatttagcaaatctgagttggcttctgccgtgctggaggcggttgaaaacaatactctgagtatcgagcccgttggcctgcagcctatccgctttgtgaaggccagcgcagtagaatgtggaggtcctaagaagtgcgccctgaccgggcagtctaagagctgcaagcacagaattaaactcggtgatagctctaattactactatatttctccattttgtcgatatcggattacctccgtgtgtaacttcttcacttacatcaggtacatccagcaaggcctggttaaacagcaggatgtggaccagatgttttgggaggtgatgcaactacgtaaggagatgagcttggccaaactcggatacttcaaggaggagctgtag

SEQ ID NO: 18094 - DNA, 2772 bp, synthetic construct
  source 1..2772: mol_type = other DNA; note = Synthetic coding sequence
atgtgcattccgccccccaatgtcaccggctcgctccacattggtcatgccctgacagtggccattcaagatgcgttggtgcggtggcaccgcatgcgcggcgaccaggttctgtgggtgccagggagcgatcacgccggtatagccacgcaggccgtggtcgagaagcagctttggaaggaacggggcgtaaggaggcacgaactgagtagggaagcttttctgagggaggtgtggcagtggaaggaggcaaagggaggagagatctgtgagcaactgagggccctgggcgcatcccttgattgggatcgagagtgctttacaatggacgtgggtagctccgtcgcagtgaccgaggctttcgtgagattgtacaaggctggtttgctgtatcgcaaccaccagctagtgaattggagttgtgccctgcgatctgctatctcagacatagaggtggagaatagacctctaccaggccacacacagctcagattgcccgggtgtcccacgcccgtctcctttggcctgctcttttccgttgcatttcctgtggacggagagcccgacgctgaagtggtcgtgggtaccacccggccggaaactctgccaggcgacgttgctgtagcagtgcatcctgacgacagtagatatacccatctgcacggccggcagctcaggcatccattaatggggcagccacttccacttatcactgactatgctgtgcagcctcatgttggtaccggcgcggtgaaggtgacgccggcacatagtccagcagacgcagagatgggagccaggcacggcctctccccgctgaacgtcatcgcagaagacgggaccatgacgagcctttgcggtgactggcttcagggcctgcacaggttcgtggctcgtgagaaaatcatgtcagtccttagtgagtggggcttgtttcgaggcctgcagaaccatcccatggtcctgcctatttgttctagatctggcgatgtgattgaatatctgctcaagaatcagtggtttgtaagatgccaggagatgggagcccgcgcagctaaagccgtggaaagcggcgctctggagctttctcccagcttccaccagaagaactggcagcactggttttcccacataggggattggtgcgtgtctaggcaactctggtggggacatcagattcccgcctatctcgtcgtggaggaccacgcccaaggggaggaagattgttgggttgtggggcgatccgaagcagaggctagggaagtggccgccgagctcacaggcaggcctggagccgaattaaccctggaacgtgaccccgatgtactggacacatggtttagtagtgcattattcccattcagcgccctcggctggccacaggaaacccctgatctcgccaggttctacccactgagcctgctggagacaggaagcgaccttttgctgttctgggtaggccggatggttatgctggggacccaactcacgggccagctgcccttttccaaagtgctcctgcatcctatggttagagacaggcagggaaggaagatgtctaaaagcctcggcaacgtattagatcctcgcgacatcataagtggcgtggagatgcaagtgctccaggagaaactcagatcggggaacctcgaccccgctgagttagcgatagtggccgcagcccagaagaaggacttcccccacggcattcctgagtgtggcacggacgccctgaggttcacattgtgcagccatggagtccaagctggagatctccatctctcagttagcgaagttcaatcatgccggcacttttgcaacaagatctggaacgcactgcgctttattctgaatgccctgggcgaaaaattcgtccctcagccagccgaggaactgtccccctccagccctatggatgcctggatcctgtccagactcgccctagctgcacaggaatgtgaacgcggcttcttaacccgggagctcagcctggtcacgcatgcgctccaccacttctggcttcacaacctgtgcgatgtgtaccttgaagctgtgaagcccgtcctttggcattcgccaaggccgctaggcccaccgcaagtgctcttttcttgtgcagacctcgggctgcgcctgctcgcccccctcatgccttttctggccgaagaactgtggcagcgccttccccctcggcccggatgccctcctgctccttctatatcagtggctccttacccaagcgcatgctctcttgagcactggcgacaacctgagcttgagcgccgattttctagggttcaggaggtcgttcaagtgcttcgcgctttaagggccacatatcagctgactaaggccagacctcgcgtccttctgcagagcagcgagcccggggaccagggtttgttcgaggcatttctcgagcctttgggcacacttggatactgtggagctgtcggccttctgccccctggcgccgctgctccatccggctgggcgcaggctcccttaagtgatactgctcaggtgtacatggaactgcagggattggtggacccccagattcagctgcctttgttagccgctcgccgctacaagttgcagaagcagctcgatagcctgaccgcacgcacgccatcagaaggcgaagcaggaacgcaacggcagcagaagctgagtagcctccagctcgaactgagcaaattagataaagctgcttcacacctgcggcagctgatggatgagcccccagcgccaggcagccccgagctttag

SEQ ID NO: 18095 - DNA, 5229 bp, synthetic construct
  source 1..5229: mol_type = other DNA; note = Synthetic coding sequence
atgatggagggcaatggtacggagaacagttgtagccgtaccagagggtggctccaacaggacaacgacgcaaagccttggctgtggaagtttagcaattgcttctcacgccccgaacagaccctccctcacagtccccagacgaaggaatacatggagaacaagaaggtggcagtggagttgaaggatgtgccatcacctctgcacgcagggagcaagctcttccccgcagtgcctctgccggacatcagatctctgcagcaacctaagatccagctttcaagtgttccaaaagtatcttgctgcgctcactgcccaaatgagccgtccacaagtccaatgcggttcggagggggtggaggagggtccggcggcacctcaagccttatacaccccggggccctcctggacagtcagtccactaggacaatcacctgtcaagttgggagcggtttcgcgtttcagtccgcgtcatctttgcagaatgcatctgctcgcaataacctggcaggcatcgctagcgacttcccctccatgtgcctggagagcaacctaagctcttgtaaacatttaccctgctgtgggaagcttcactttcagtcctgccacgggaacgtacataagctgcaccaattcccgagtctccagggatgtacttccgccggttactttccttgctctgactttacgtccggcgcccccgggcacctggaggaacacatctctcagagcgaactcaccccccacctttgcaccaattccctgcacctgaatgtggtgccgcctgtgtgtctgaaaggctcgctgtactgtgaggactgtctgaataagccggctagaaactcgataattgacgctgcaaaggtctggccgaatattccacccccaaatactcaacccgctcccctcgccgtgcctctgtgcaacgggtgtggaactaagggcaccggaaaagaaaccactctgctgctcgccacatccttggggaaagctgcctctaaattcggatcccccgaggttgctgtggcggggcaggtcctggaaaacctgccacccattggcgtgttctgggacatagagaactgttccgttccatcaggccgttcggccacggctgtggtccagcgcatcagggagaagttttttaagggccatagagaggcagagttcatttgtgtttgtgatatcagcaaagaaaacaaagaagtcatccaggaactgaataattgtcaggtgactgtcgcacatatcaatgctacagccaagaacgcggctgatgataaactgcgccaatctctgagacggttcgcaaacacgcatactgccccagccaccgtcgtgctcgtgtccacggatgtgaatttcgcactcgagttatccgatctgaggcataggcacggtttccacatcattctagtgcataaaaatcaggcgtccgaagctttactgcaccacgctaacgagctgattcgatttgaggagttcatttctgacctgccaccaagactgcctctgaaaatgccatgccatacactgctttatgtatacaacctgcctgccaataaagatggcaaaagtgtaagtaacaggctgcgccgcctgtctgacaattgcggggggaaggtcttgtcaataaccgggtgttccgccatactgcgcttcataaaccaggactctgctgagagggcccagaagagaatggaaaatgaggatgtcttcgggaatagaattattgtctcttttacccccaagaatagagagttgtgtgagactaagtcaagcaatgctatcgctgacaaggtgaagtcacccaaaaagctgaagaatccaaaactatgcctaatcaaggatgcctctgaacagtcgagttcagccaaggcgacgccagggaagggcagccaggcaaacagtggctcggctacaaagaatacgaacgtgaaaagcctgcaggaactgtgcagaatggagagtaaaactggccatcgcaactcagagcaccagcaaggccatcttcgcttagtggttcccacccatgggaattcatctgccgcggtcagcacacctaaaaacagcggggtggctgagccagtctacaagacatcacaaaagaaggagaacctcagtgctagaagtgttacaagcagccccgtcgaaaagaaggataaagaggaaacggtatttcaggtgtcttacccatcagccttttccaagcttgtagcatctcgccaggtatcccctctgctggcatcgcagagttggagtagctcccggagcatgtcacccaatctgttgaacagagccagccccctggcttttaacatcgctaacagtagttccgaggccgattgtccagaccccttcgccaatggggctgacgttcaggtgtccaacatcgactatcggctgtcccgtaaagagttgcaacagttgctccaggaagcttttgcccgtcacggcaaggttaagtcagtagagctgagccctcataccgattaccaactgaaggccgtcgtacagatggaaaacctgcaggatgccattggagcagtcaattctctgcaccgctacaagatagggagtaagaagatcctggtctctttagccaccggtgcggcatcgaaatctctgagcctgctgagcgccgagaccatgagtgtgctgcaagacgctcctgcctgctgcttgcccctgttcaaatttactgatatttatgaaaaaaagttcgggcacaaattaaatgtttctgacctatacaagctgacggataccgtcgctatccgtgaacagggaaatggcagacttgtgtgcctgctgccttctagccaggctcggcagtctccgctgggatcatctcaatcccatgatgggtcctctaccaactgttcacctataatctttgaggaactggagtatcacgagccggtgtgccggcagcattgttctaataaagacttcagtgaacatgagttcgaccccgatagctataagataccattcgttattctatctttgaagacattcgcacctcaggtccattccctgctgcaaacccatgaagggactgtcccgctcctatctttcccagactgctatatagccgaattcggcgatctcgaagtagtgcaggaaaatcagggtggcgttccccttgaacattttattacatgtgtccctggagttaacatagcgactgcacagaatgggattaaggtcgttaagtggatccacaataaaccccccccccctaacaccgatccatggctcttgcgcagtaaatcgcctgttgggaacccccagctcattcaattctctagggaggtcatcgacctactaaaaagccagccctcttgcgtgatcccaatctcacacttcattccttcttatcatcaccatttcgctaagcagtgccgggtgagcgattatggatactcaaaattaatcgagctgctggaggcagtgccccatgtgctgcagattctcgggatgggatctaagcgcctgcttacactgacgcatcgcgcccaggttaagagatttactcaagatttacttaaactccttaagagccaagcatcaaaacaggttattgtgcgcgagttttcccaggcctatcactggtgtttctcgaaggactgggacgtcaccgagtacggggtctgcgagctgatcgacatcgtctccgaaatccctgacacaaccatctgcttgtcacagcaggacaatgagatggtcatttgtatccccaagagggagagaacccaggacgagatcgagagaaccaaacagttcagcaaggatgtggtggacttgctgagacatcagccacattttagaatgcctttcaataaattcatccccagttaccaccatcacttcgggcgtcagtgtaagttagcgtattacggattcacgaaactcctggagctgtttgaagcaattcccgatacgttgcaggtgctggagtgtggggaggaaaagatccttaccctgaccgaggtcgagagatttaaagccctagcggcccaatttgtaaaactgcttcggtcccagaaagacaactgccttatgatgacagatctcctgaccgagtacgctaaaaccttcggctacacgttcaggctccaggattatgacgtgtcgtccatcagcgctttaacgcagaaactctgccatgtagttaaagttgctgacatcgagtcagggagacaaatccagttgatcaaccggaaaagtctgcggtccctcacagcccagctgttggttctgctcatgagctgggagggtaccactcacctttccgtcgaggaactcaagcggcactacgagtctacacacaacacgccactgaacccctgtgagtacgggtttatgaccctgaccgagctccttaaaagcctcccataccttgtagaggtcttcaccaatgacaaaatggaggaatgtgtaaaactaacaagcctgtacctgtttgcaaaaaacgtaagaagtcttttgcacacgtaccattaccagcagattttcctgcatgagttctctatggcatacacgaagtacgtgggtgagacgctccaacccaagacatacggtcacagcagcgtggaggagctccttggagctattccacaggtggtctggataaagggtcacggccataagaggatcgtcgtactcaagaatgatatgaaaagccgccttagctccctctcgctgagccctgccaatcatgagaatcagccaagcgaaggcgaaagaatccttgaggtgcccgagtctcacaccgcctctgagttgaaactcggagccgatggttcaggcccctcacacactgagcaggagctgttgaggttaaccgatgactcaccagtggacttgttgtgcgctccggtcccgtcttgcctgccctccccccagttgaggcccgatcctgtgattctacagtccgctgaccttatccagtttgaagagaggcctcaagagccgtccgagatcatgattctcaatcaggaggagaaaatggaaataccgatccccggaaagtccaaaacactcacaagcgacagcagctcttcatgcattagtgctgcggtccccgtgcctccctgcccatccagcgagaccagtgaatctctgctgtccaaagatccagtggagtcgccagcaaagaaacagcctaaaaacagagtgaaactcgccgcaaattttagcttggctccgattacaaaactgtag

SEQ ID NO: 18096 - DNA, 774 bp, synthetic construct
  source 1..774: mol_type = other DNA; note = Synthetic coding sequence
atgccgcacttgcccttggcctctttccgcccacctttctggggactgagacatagtcgcggtcttccccgcttccacagtgtgagcacccagtccgagcctcacgggtcaccgatcagcaggcggaatcgggaggccaagcagaaacgccttagggaaaagcaggctactctagaagctgaaatcgcaggggagagcaagtcccccgccgagagcatcaaagcttggcggcctaaagaactggtcttatatgagattcccacgaaacctggggaaaaaaaagacgtgagcggacccctgccccccgcgtattctccccgttacgttgaggccgcctggtatccgtggtgggttagggaaggatttttcaagcctgagtaccaggcccgcttgccccaggcaaccggcgagactttttccatgtgtatccctccacccaatgttactggctctctccatattggtcatgctctaacagtcgccatccaggatgctttggtgcggtggcatagaatgagaggtgaccaggttttatgggtccctggctcagaccatgccggaatcgccacacaggcagttgtagagaagcaattatggaaagagaggggcgtgagaagacacgagttaagccgagaggcctttttacgagaagtgtggcaatggaaggaggccaagggcggagagatctgcgaacagctcagggcacttggcgccagcttggattgggatcgggtgttttatcacggatgctggctgctgtcgggttgtgattag

SEQ ID NO: 18097 - DNA, 1134 bp, synthetic construct
  source 1..1134: mol_type = other DNA; note = Synthetic coding sequence
atggcaacgattcctgactggaagctgcaacttctggcccgcagacgacaggaggaggcttcggttcgcgggagagaaaaagcagagcgagaaaggctgtctcagatgcctgcatggaaacgcggacttttggagagacgccgcgccaagctcgggcttagtcccggcgagccttccccggtgttgggtaccgtggaggctgggccgccagaccctgacgaatcagccgtgctgctggaagccatcggccccgtacaccaaaatcgctttatccggcaggagagacagcagcagcagcagcaacaacagagaagtgaagaacttctggccgagcgaaagccaggtccgctggaagcacgcgaaagaagacccagtccgggtgagatgcgggaccagtcccccaaaggaagagaatcaagagaggaaaggctttcacctagagaaaccagggaaaggcgtctgggaattggaggcgctcaagagttgtctctgaggccgttggaggctcgcgactggcggcagtcaccgggcgaagtcggggatagatctagtcgactgagcgaagcctggaaatggcgcctgagtccaggggagacacccgaacgatctctgcgacttgccgagtctcgcgagcagtccccaagacggaaggaagtcgagagtcgtctgtcaccaggcgagtcagcatatcagaaacttggcttaactgaggctcataagtggaggcctgactctcgcgaaagccaggagcagagtttggtccagctggaagccaccgagtggagactgagaagtggggaggagcgccaagactatagcgaggaatgtggacgaaaagaagagtggccagtccctggggtggccccaaaggagaccgccgaactgtctgaaaccttaacccgagaggcacagggcaattcttctgcaggggtggaggccgctgaacagcgaccagttgaggacggagaaagggggatgaaacccaccgaaggctggaagtggactttaattatgtctctcgcaggcaaggggaaccagcatctggttacgtgcttcccccaccccgtttccggtgggcgcgctaattgtcctattagtactttaatccagagcccatggtgcgggtggggctag

SEQ ID NO: 18098 - DNA, 495 bp, synthetic construct
  source 1..495: mol_type = other DNA; note = Synthetic coding sequence
atgcggatattaatacttggattggatggagcaggaaaaaccactatactgtacaggttgcaggtgggggaggtggtcaccacaatacccaccattgggttcaacgtagagacagtgacatataagaatcttaagttccaggtgtgggacctgggtggtcaaacgagcatccggccctactggagatgttactatagcaatacagacgctgtgatttatgttgtggacagctgcgatagagacaggatcggtatatccaagagcgaattggtggcaatgttagaggaggaagaactcaggaaggccatcttggtagtgtttgccaacaaacaggatatggagcaggccatgacatcttccgagatggccaattcccttggccttccagccctgaaggatagaaaatggcaaatttttaaaacatctgcgaccaagggcacagggctggacgaagccatggagtggctggttgagaccctgaagtccaggcagtag

SEQ ID NO: 18099 - DNA, 393 bp, synthetic construct
  source 1..393: mol_type = other DNA; note = Synthetic coding sequence
atggatacgatgatgctgaatgttagaaacctcttcgagcagctggtgaggagagtcgagattctgagtgagggcaacgaggtgcaattcattcagctggccaaggacttcgaagacttcagaaagaaatggcaaaggacggaccacgagctgggcaagtacaaagacctcttgatgaaggccgaaacggaaaggtccgcattggacgtgaagcttaagcacgcgcggaaccaagtggatgtggagattaaacgacggcagcgcgcagaggcggattgtgaaaagctggagagacaaatccagctcattcgtgaaatgttgatgtgcgacacctctgggtccattcaactgagcgaggagcagaaaagtgccctggcattcctgaataggtag

SEQ ID NO: 18100 - DNA, 324 bp, synthetic construct
  source 1..324: mol_type = other DNA; note = Synthetic coding sequence
atggataccatgatgttgaatgttcgaaacttgtttgagcagctggttaggcgtgtcgaaatcttgtcggaggggaacgaggtgcagtttattcagctcgcgaaagacttcgaagactttagaaaaaaatggcagcgtaccgatcatgagctaggcaaatataaggacttactcatgaaggccgagaccgagagatcagccctggatgtcaagcttaaacatgcacgaaatcaggtcgacgtggaaattaagcggcggcagcgggcagaagctgactgcgaaaagttagagaggcagatccagctaattcgcgagatgctgtag

SEQ ID NO: 18101 - DNA, 885 bp, synthetic construct
  source 1..885: mol_type = other DNA; note = Synthetic coding sequence
atggacacaatgatgcttaacgtgaggaacctcttcgaacaactggtcaggcgcgttgaaatcctcagcgaaggcaatgaagtccagttcatccagctggccaaggatttcgaagacttccgcaagaagtggcaaagaacagatcacgaactgggcaagtataaggacttactcatgaaagctgaaactgagcggtcagcactcgatgtaaaattgaaacatgctcgtaatcaagtggatgtcgagatcaagcgccgccagcgcgctgaagcggattgcgagaaattggagaggcagatacagctgatcagggagatgcttatgtgcgatacatctggatctatccaactgtcagaggagcaaaagtctgcgctggcttttctcaaccgaggtcaaccctcatctagcaacgctggaaataagaggttatccaccatagacgagtctggaagcatcctgtcggatatttcattcgacaagactgacgagagtctagactgggacagttccttagttaagacatttaagttaaaaaaaagggagaaaaggagatcgaccagtaggcaattcgtcgacggcccaccggggccggtcaagaagacgcgttctataggcagcgcagttgaccagggaaacgaatctattgtcgccaagactacagtgacagttcccaacgacggaggccccatagaggcagtgagtaccatcgagaccgtgccatactggacaaggagcagacggaagactggcacactgcaaccatggaattctgatagcacgttgaattcacgccagctggagccacggacagagaccgacagtgtgggcaccccccaaagcaacggggggatgcggctgcacgatttcgtgtctaaaacagtgtag

SEQ ID NO: 18102 - DNA, 504 bp, synthetic construct
  source 1..504: mol_type = other DNA; note = Synthetic coding sequence
atggaagaaacatacacagatagcttagaccctgaaaagctcttgcagtgtccctatgacaagaaccaccagattagagcctgtcgttttccctaccatctcattaagtgccggaagaaccaccctgatgtggccagcaagctggccacatgcccatttaacgctcgtcaccaggtcccccgcgccgagatttcccatcatatttcatcttgtgacgataggtcttgcattgagcaggacgtggtcaatcagacacgctctctgagacaggagaccttggctgagtctacctggcaatgccccccatgcgacgaagactgggacaaggatctttgggagcaaacctctacgccttttgtgtggggtaccacccactatagcgacaacaattccccggctagtaatattgttactgagcacaaaaataaccttgcctcgggaatgcgagtgcccaagtccttgccctacgtgctcccttggaagaataatggcaacgctcagtag

SEQ ID NO: 18103 - DNA, 882 bp, synthetic construct
  source 1..882: mol_type = other DNA; note = Synthetic coding sequence
atgctgagggaacctaggaagcaggggctggccggccgcgcccatctactgtcacctggaactacaggctctatgaaaacgcccgtggagctggcagtgagcgggatgcagacgctggggttacaacaccgttgcagggggggttatcgcgtgaaggcacggacttcttatgtggacgagacgttattcggaagtcccgctggaactcggcccactccgccggacttcgacccaccttgggttgagaaggccaatcgaacaagaggagtcgggaaagaagcatctaaagccctcggagccaaaggtagctgcgaaaccactccaagccgcgggagtaccccaactctcaccccgaggaaaaagaataaataccggccaatcagccacactccttcttactgcgatgaaagcttgttcgggtctcgctctgaaggggctagctttggcgcaccacgcatggccaagggtgacgcggctaaactgagggctctgctgtggacaccacccccaacaccacgaggtagccacagcccgcggcccagagaagcccccctgagagctattcacccggcaggcccatcaaaaacagaacccggaccagcagcagattcccagaaactatctatgggggggctccattccagtcgcccactcaagagagggttgagccattctctgacccatctaaatgtgccatctacaggacatcccgctaccagcgcgcctcacactaatggcccacaagaccttaggcccagcacttcaggagtaacatttcggagccctctggtcacgagcagggctcgatctgtgtccatctctgttccctccactccgcggagggggggagccacacaaaagcccaaacctccctggaagtag

SEQ ID NO: 18104 - DNA, 3282 bp, synthetic construct
  source 1..3282: mol_type = other DNA; note = Synthetic coding sequence
atgggagggaaagcctggccaagacgagcagtcggaaccgcaggaggcccgtgtgccgagcaaatcagtgcacctttccaaacgttattaatgccccacttgccactggcctcctttcggccacctttttgggggctgaggcacagtagaggtttgcctagattccattcggtttccacacagagcgaaccgcacggctcaccaatatccagacgcaatcgggaagcaaaacagaagcgcctcagagagaaacaagcaacactggaggctgagatcgcgggcgaatctaagtcacccgcggagtccatcaaggcttggaggccaaaggagctggtgctgtacgagattccaactaaacctggcgagaaaaaggatgtctctgggcctctgccgccagcctattctcccaggtacgtcgaagccgcctggtacccatggtgggttagagagggatttttcaagcctgagtatcaagcccgcctccctcaggctactggcgaaactttcagcatgtgtatacccccaccaaacgtgaccgggtctctccacatcggtcatgctctgaccgtcgccattcaagacgccttggtacgctggcatcggatgaggggggaccaggtcctgtgggtgcccggaagcgaccatgcagggattgcgactcaggctgttgttgaaaagcagctgtggaaggagaggggggtccggcgccatgagctttctagagaagcttttttgagggaagtgtggcagtggaaggaagcaaaggggggggagatctgtgagcaacttagagcactgggcgccagcctcgattgggaccgggagtgtttcaccatggacgtcggctcttcggttgctgtgacagaagccttcgtcaggctgtacaaagcaggtctcctgtaccgcaatcatcagctggtgaattggagttgcgctttgcgctctgctatctcggacattgaggtcgaaaacaggccactccctggccacactcaactgcggcttcctggctgccccacacccgtgagctttgggctcctgttctcagttgcattcccagtggatggagagcccgacgccgaggtcgtggtcggaacaactcgtccagaaactctgccaggggacgtggccgtggcggtacaccccgatgactcacggtatacccacctccatggtcgtcagctgcgacaccccctgatgggccaacctctgccactgatcaccgattatgccgtccagccccatgtgggaactggagccgtgaaggtgactcccgctcactctccggctgatgccgaaatgggcgcgcggcacggcttgtctccacttaacgtcatcgcagaagatggcactatgacgagcttatgcggagactggctccagggcctccatcgatttgtcgcgagagaaaaaatcatgagtgttctcagcgagagaggtctttttagagggctacaaaatcatcctatggtcctgccaatctgcagtaggagtggcgacgtgatcgaataccttcttaagaatcagtggtttgtcagatgtcaggagatgggagcccgagcagccaaggctgtcgaaagcggtgcactggagctgtcgccgtcctttcatcaaaagaattggcagcactggttctcacacatcggagattggtgtgttagtcgacagctgtggtgggggcatcaaattccagcctatctggttgttgaagaccatgcacaaggggaagaagattgctgggtggtgggaaggtcagaggctgaggcgcgcgaagtcgccgcggaattgactggaaggcccggcgcagaactcacgctggaacgcgacccagacgtcctcgacacatggttctcaagtgctctcttccccttttccgccctgggatggccacaggagactcctgacttggcgaggttttatcccttatctttgttggagactggaagcgatctgctgctgttttgggtcggccgcatggttatgctgggtactcagctgacaggacagttgccgttttcgaaggtcttactccatcccatggttcgggacagacaaggcaggaaaatgagcaagagtctgggaaatgtcttggaccccagggatatcatatcaggggtggagatgcagctgctgcaagagaaactgcggtccggaaacctggatcctgcagaactcgcgatagttgccgccgctcagaagaaagactttccacatgggattcccgaatgtggcactgacgcgttgcggttcaccctctgttcccatggggtgcaagccggggatttacatctgagtgtgtcagaggtgcagtcatgccgccatttttgtaacaagatctggaacgctcttagatttatcctcaacgcactgggcgaaaagttcgtacctcagccggcagaagagttgagtccatcgtccccaatggacgcctggatcctgtctaggttggccctagccgcccaggaatgtgagcgtggcttcctgacccgcgaactgtccttggtgacacacgccctgcatcatttttggttgcacaacctttgcgacgtgtatctggaggcagtcaaacccgtgctttggcattcaccaaggccactggggcccccccaagttcttttctcatgcgcggacctcggtcttcgcctattggcgcctttaatgccattcctggctgaagaactgtggcagcgattaccgccacgtccgggctgcccaccagcaccaagtatttcagtcgcaccgtacccttcagcttgtagtctcgagcattggaggcaaccagaattggaacgtagattttcgcgcgtccaggaagttgttcaggtcctcagggcactcagggccacttaccaactgacgaaagctcgcccgagagttttactacagagctctgagcccggcgatcaggggctgttcgaagcttttttagagcccctggggaccctcgggtattgtggagcggtagggctgttgcccccaggtacagccgctcctagtggatgggcccaggcccctttgagcgataccgcccaggtctatatggaactccagggccttgtcgacccccagattcagcttcctctgctagccgccagacggtacaagctacagaagcagctggactctctgacagctaggaccccaagtgaaggagaggccggcactcagagacaacagaagttaagctccctgcagctggaactgagcaagctcgacaaagcggcctctcatctacgtcaactcatggatgagccaccagcccctgggtcccctgagttgtag

SEQ ID NO: 18105 - DNA, 276 bp, synthetic construct
  source 1..276: mol_type = other DNA; note = Synthetic coding sequence
atgggcaagaagacgaagaggaccgctgatagctcctctagcgaggacgaggaggaatacgttgtcgaaaaagtgctcgaccgccgggtggttaagggacaggtcgagtatctgttaaagtggaaggggtttagcgaggaacataacacctgggagccggaaaagaacctcgactgtcctgagctcatttccgagtttatgaaaaaatacaaaaagatgaaggaaggcgaaaataataagcctcgcgaaaagagtgagtctaacaaaaggaaatag

SEQ ID NO: 18106 - DNA, 390 bp, synthetic construct
  source 1..390: mol_type = other DNA; note = Synthetic coding sequence
atggcagaactcattcaaaaaaagttgcaaggagaagtggaaaaataccagcagctgcaaaaggatctctccaaatctatgtctggacgtcagaagctcgaagctcagctgaccgagaataacattgtcaaggaagaactagccctgcttgacgggagcaacgtcgtctttaaactgctcggccccgtcctggtgaaacaggagctaggtgaggcaagagccaccgtcgggaagcggctcgattacatcaccgcagagatcaagaggtacgaaagccagctgagggatctagagaggcaatccgaacagcagcgcgagacattggcccagttgcaacaggagtttcagagagcacaggctgccaaagccggggcaccaggcaaggcatag

SEQ ID NO: 18107 - DNA, 1134 bp, synthetic construct
  source 1..1134: mol_type = other DNA; note = Synthetic coding sequence
atggccacaattccggattggaagctgcagctgctggccagaaggagacaagaggaggcctcagtccgcggccgcgagaaggccgagcgagagaggctttcgcagatgcccgcttggaaaagggggctccttgaacgaagacgtgcaaagctcggcctgagtcccggcgagccttcgccggtacttggcaccgtggaagccggtcctcctgacccggatgaaagtgccgtgctgctggaagcaattgggcccgtgcaccaaaatcggttcatccgccaagagagacagcagcagcagcagcagcaacagagatccgaagagctattggcagaaaggaaacccggtccactcgaagcaagagagaggcgaccaagccctggagagatgagagatcagtcgccgaaaggaagggagagcagagaagagagactgtctccaagagagaccagagaacggcggctgggcataggcggtgcccaggaactgagcttacggccactcgaagcccgcgattggcgacagtcccctggagaggtcggcgatcgaagcagccggctgtccgaggcttggaagtggcgcctcagtccaggcgaaacccctgaacgcagcctgcgattagctgagtctcgggaacagagcccacgccggaaggaggtggagagcaggctgagccccggagagtctgcatatcagaagctgggcctgactgaagctcataaatggcgacccgactcgagggaaagtcaggagcagagtttagtacagttagaggccaccgaatggcgccttcggtctggagaagaacggcaggattactccgaagagtgtggacggaaggaggaatggcccgtgcctggagtggcgccaaaagagactgcggagttgagcgaaacactcacacgggaagcccaggggaatagcagcgcaggcgtggaagcagcagagcagagaccggtggaggatggtgagcgtggaatgaagccaacggagggttggaagtggactctgataatgtccctggctggtaaggggaatcagcatttggtgacgtgcttccctcaccccgtttcaggaggcagagccaattgccccatcagcaccttgatccagtcaccatggtgcggctggggttag

SEQ ID NO: 18108 - DNA, 2031 bp, synthetic construct
  source 1..2031: mol_type = other DNA; note = Synthetic coding sequence
atgtccgatcagattaaatttatcatggattctctcaacaaggagccttttaggaagaattataatctcatcacctttgacagtctcgagccaatgcagttgttacaggttctgagtgatgtgctggctgaaattgatcccaagcagcttgtggacattagggaagagatgcctgaacagacagcaaagaggatgctgtctctcctggggatcctaaagtacaagcccagcggaaacgcaaccgatatgagtacattccgccagggtctggttatcggttctaaacccgtaatttacccggttctccactggctgttacagcgcaccaacgagctgaagaaacgtgcataccttgctaggttcctgatcaaactggaggtgccaagcgaatttctgcaagatgagacggtggcggacacaaataagcagtacgaagagcttatggaggcgttcaaaacactccacaaggagtacgagcagttgaaaataagtggatttagcaccgccgaaattcgtaaggacatatcagccatggaagaggaaaaggaccagcttatcaagagggttgaacacctgaagaaaagagttgagaccgcccagaatcaccagtggatgttgaaaattgcacgccagctcagggtggagaaggagagagaagagtacctcgctcagcaaaagcaagaacagaagaaccagttgtttcacgctgttcagaggctgcagcgagtgcagaaccaattaaagagtatgaggcaagctgctgccgacgctaaaccagagtcactgatgaaacgactcgaggaagagatcaagttcaatctgtacatggtcaccgaaaagttcccgaaggaactggaaaataaaaaaaaagagctgcattttctgcagaaggtagttagcgagcccgctatgggccattcagatctactagaactagaaagtaagattaatgagattaatacagagatcaatcaactaatagaaaaaaagatgatgcggaacgagcctatagagggaaagctgagtttgtaccgccagcaagcttccattatctcaaggaagaaagaggccaaggcagaggagctccaggaagctaaagagaagctcgctagtttggaaagagaggcgagtgtgaaacggaatcaaactcgtgaattcgatggcactgaggtgctgaaaggagacgaattcaagaggtatgtgaataagctgaggagcaagagtacagtcttcaagaaaaagcatcagattatcgccgaactgaaagcggaattcggcctgctgcagaggaccgaagaactgcttaagcagaggcacgagaatatccaacagcagctacaaaccatggaagagaagaagggcatctcaggctactcctacactcaggaggagttggaacgcgtgagcgctctcaagtccgaggtggatgagatgaagggccgcactttggacgacatgtctgaaatggtcaagaagttgtacagcctggtgtccgagaagaaaagtgccctcgcctccgtaattaaggagttgagacaattgaggcagaaataccaggagttgacccaggagtgtgatgagaaaaaatcacaatacgatagttgtgccgcagggctggaaagtaataggagcaaacttgagcaggaggtgaggaggctgcgcgaggaatgcctccaggaggagagcaggtaccactacacgaattgtatgattaagaatttggaagtccagctccggcgggccaccgacgagatgaaggcctacatctctagtgatcaacaggagaagcgcaaggctatccgtgagcagtacacaaaaaataccgccgaacaggagaatttaggaaagaaactgagagaaaagcagaaggtgatcagggagagtcatgggccaaacatgaaacaggcaaaaatgtggagagacctggagcagctgatggagtgtaagaaacagtgctttctcaagcaacagtcccaaacctccattggtcaggtgattcaggaaggaggcgaggatcgcctcatcctctag

SEQ ID NO: 18109 - DNA, 456 bp, synthetic construct
  source 1..456: mol_type = other DNA; note = Synthetic coding sequence
atggacactatgatgctgaacgtgagaaacctgttcgagcaattagttagacgggtcgagattttatccgagggcaacgaagtgcagttcatccaactcgctaaagattttgaggacttcagaaagaagtggcagcggacggaccatgagctgggaaaatataaggacctcctcatgaaggccgaaaccgaaaggtccgcgctagacgtgaaattgaagcacgctcgcaaccaggttgatgttgaaattaaaagaagacagagggcagaggccgactgcgagaagctagagagacaaattcaactcatccgcgagatgctcatgtgcgacacctctggatccatccaactcagcgaggagcagaaatctgcattggcctttctaaatcgtggccaaccctcttcttccaacgcagggaataagcggctgtctaccatagatgaatccggatcatag

SEQ ID NO: 18110 - DNA, 1446 bp, synthetic construct
  source 1..1446: mol_type = other DNA; note = Synthetic coding sequence
atggcctcggccgcttctgttacctcgcttgccgatgaggttaactgcccaatctgccagggaactctaagagaacctgttacgatagactgcggacataacttctgcagagcttgcctgactcggtactgtgagatcccgggaccagacctggaggagtcacctacctgcccactctgcaaagagcctttcaggccaggaagctttaggcccaactggcaactcgcgaacgtcgtcgagaacatagagaggctccagctggttagtaccctgggcttaggcgaagaagacgtctgtcaggaacatggtgaaaaaatctacttcttctgtgaagatgacgaaatgcagctgtgcgttgtgtgtcgggaggcaggtgaacatgccacacacacaatgagattcctggaagacgccgcagcgccttaccgcgaacagatacataaatgcctcaagtgtcttcggaaagagagagaagagattcaagaaatccaatcacgagaaaataagcggatgcaggttttgctcacccaagtaagcactaagagacagcaggtgatctctgaattcgctcatcttaggaagttcttggaggagcagcagtccatactcttagcacagcttgaatcacaagatggcgacattttgaggcagagggacgaatttgacttactggtagccggggaaatatgccgctttagcgcactcattgaagagctcgaagaaaagaatgaacgacctgctcgagagctcctgactgacatccgctccaccctcatccgctgcgagactcgtaagtgccgtaagccagtcgcggtgagtcccgaactgggtcagagaattcgcgactttccacaacaggccctgcctttacagcgtgaaatgaagatgtttctggaaaacctgcctaaccaccttgtgattccgactgcacacatcagccttgatcctcagactagccaccctaaattgctactgagcgaagatcatcagagggctcaatttagctacaagtggcagaattcccctgacaatccccagcggttcgacagggcaacctgcgtgctcgctcacaccggtatcactggaggtaggcacacctgggtggtgtcaatcgatctggcccacggaggcagctgcactgttggtgttgtgagcgaggatgtgcagcggaagggtgaactacggctgaggcccgaagaaggtgtttgggccgtgcgtctcgcctggggctttgtgtctgcgttaggaagcttcccaacaaggctgactttgaaagaacaacccagacaggtccgagtgtctctcgactacgaggtgggatgggtgacatttactaacgccgtgacgagagagcctatctatactttcactgcaagctttacacgcaaagttattccgttttttggcctttggggaaggggaagcagcttttccctgtccagctag

SEQ ID NO: 18111 - DNA, 765 bp, synthetic construct
  source 1..765: mol_type = other DNA; note = Synthetic coding sequence
atggtacgggaggctaacatcaaacaagccaccgctgagaaacagctcaaggaggcacaggggaagatcgatgtcctgcaggctgaagtcgcggcacttaaaaccctggttctaagcagtagccctacctccccaacacaggagccactaccgggcggaaagaccccgtttaaaaagggccacacacgaaataagtctaccagctcagctatgagcggatcgcaccaggacttgtctgtcatacagccgatagtcaaggactgtaaggaggctgatctgagcctgtacaatgaattcagactttggaaagacgagcctaccatggataggacatgcccgttccttgacaaaatttaccaggaggacatcttcccttgcctgacatttagcaaaagcgaactcgccagcgctgtgttggaggccgtggagaacaatacactgagtatagaacctgtaggcctgcagcctatacgcttcgtcaaggccagtgccgtggaatgtggtggccccaagaagtgcgcgctgaccggtcagtctaaaagttgcaagcacagaataaaacttggagattctagcaattactattacatctctccgttctgccgatataggatcacaagtgtgtgcaactttttcacatatatccgttacattcagcagggcttagtcaagcagcaggatgtcgatcaaatgttctgggaagttatgcaacttagaaaagaaatgagcctggctaaactggggtattttaaagaagaactctag

SEQ ID NO: 18112 - DNA, 1446 bp, synthetic construct
  source 1..1446: mol_type = other DNA; note = Synthetic coding sequence
atggcttccgcagctagcgtgacgtccctcgctgacgaagttaattgtcccatctgtcagggcactctccgcgagcctgttactattgactgcggtcataatttttgcagagcatgtctgaccagatactgtgagattccggggccggatctggaggagagccctacatgtccgctgtgtaaagaaccatttcggcctgggtcatttcgacccaactggcaattagctaacgtggtcgagaacattgagaggctacaattagtatcaaccctgggcctgggcgaggaagatgtgtgtcaggagcatggcgagaaaatatatttcttttgcgaggacgacgaaatgcagctttgtgtcgtctgtcgcgaagctggagaacacgccacacacactatgaggttccttgaggacgctgcagctccttaccgagagcagattcacaagtgtttgaaatgtcttcgtaaagagcgagaggaaatccaggagattcaaagcagagagaacaaaaggatgcaggtgctcctcacccaggtgtcaaccaaacgccagcaggtcatctctgagttcgctcatctgcggaagtttctcgaggagcaacagtctatactgctggctcagcttgaatcccaagacggcgatatactaaggcagcgggatgagttcgacttgttagtggcgggtgagatttgccggttctctgccctgatcgaggaattggaagagaaaaacgagagaccagcccgcgaacttctaaccgacatccgcagcacactgattagatgcgagactcgaaaatgtcgcaagcccgtcgcggtgagtcccgagcttggacagcgaatccgcgatttcccccaacaggcacttcctctccaacgggagatgaagatgtttctggaaaaccttcccaaccaccttgtcattccaacagcccatatttccttggacccccaaactagccatccaaagctactgctgagcgaggatcatcagcgcgcccagttttcctacaaatggcaaaatagtcccgacaatcctcaacgttttgaccgtgctacctgtgtgctggcccacaccggaatcaccggcgggcgccatacctgggtggtgtccattgatctggctcacggggggtcctgcaccgtcggcgtggtgagtgaggacgtgcagaggaaaggtgagcttcgcttgaggcctgaggaaggcgtgtgggctgtcagactagcctgggggtttgtgagtgcacttgggagtttcccaacaagactgaccctgaaagagcagccgcgtcaggtccgagtgagcctggactacgaggtgggctgggtcacattcacaaacgctgtaactagagaacctatatatacttttacggcatctttcactcgaaaggtaattcccttctttggcctgtggggccggggttccagcttctctttgagttcatag

SEQ ID NO: 18113 - DNA, 1974 bp, synthetic construct
  source 1..1974: mol_type = other DNA; note = Synthetic coding sequence
atgcttgggccttcttgggacggtgatgaggcagagtcaaccggtgaaattattagactcggagacactgctcatacattttccctgagatctaatggtgcacagtgcccaaacgagatgctgtccaagaaagctttggctagcccgagctccaaaagccacgaagacatgttgtacccccctagtgtcctgagtaaaagccgcacttccttcgtagaagacacagaaacccttagtgttagtggtatcccaaatgcacgaaagctgggtgaacccatacgcgcggcaatcccgctgcatccgccatatcaccctagcgagcctagagcaccctgtcctatcgggaaggaatacctccattcgtcccactgttccccagcagttaactcgacgggagagcataccgaattttctggtgatctcgatgatggattatttctgatttccaagctgccaaaagggtccaagtgggaggtgtacccggcccaggtccagggtcctcgaacacgaaagccaccgaaggggaagaggaacgagaatcgcgcaacagcctcatcctgcaattctccattcccgcagagaccaaggaagcggttaactgagcaggaattgcatgacgtctctgagaaactgagccagagactcagcgaactggattggatgttgaaatctgcccttggcgacaggatcaaggaaaaaactgatcacaaggaggagaatacagggaatgaagaggttgaggacggaacagaagagaccctgtcgcagcactcggatggaatcgttgagtatggtcctaagaaaagcagaccaggactttccatgagacgcaaacctccttacaggtctcacagcctgtcaccctcccccgtgaacaaacataaacagttccatctcgaacgcaaacggcagaggaagccaagagaaactgacgtccgccagtttcaggcccaggcctttactgaggccttcgaacgcgagcttcggcgccacaaagtgcaagagaacattggaccactgcgtatccatgagaaggaggaagaaactgagaagatttatcggggcgaggccgtcagaaaagggacaccggaatgtagccagccgtggaaaatttactcgcgtaagactaccacacagagtctcagggggggtctgcctaagcctaacaaggctgtaccaatgaaagttagtgagcattcccttctccctcttatgcttgagcagtttcctttcttgtatgtgtctggacctactctctctaagatgtggaagcaacagatagctcaggtggaacaactcaaaaaagaggcctgtcgagaaaaccgctctaagaagaagctccaggacgaaattgaagaagcgttgcgacggcatgatctcctgaccacactcgtcaaaaaggaatacgagcataataagcgacttcaggattttaaggactgtattcgacgtcagaggctaactcagtctaaaatcaaagaaaatagacagcagatcgtcagggcacgaaagtactacgacgattatcgcgttcaactctgtgcaaaaatgatgcggatgcgcactagggaagagatgatttttaaaaaactgtttgaggagggattaaatatacagaaacagcgactgagggacctgagaaattacgccaaagagaaaagagatgagcagcggagacgacaccaagatgaactggacagtatggagaactactacaaggatcagttctctctgctcgccgaggccataagtcaagagcatcaggagctgaaagccagagagaagtcccaggcacaaacattgcacaaggtgaagagagaactgcgtagcaagatggagaaggagattcaacagctgcaggacatgattacccagaacgatgacgacgttttttttagggaacttgaagcagagagattccgctccagacttcagctggctagcttccagtattccaaatctccgtccctttag

SEQ ID NO: 18114 - DNA, 507 bp, synthetic construct
  source 1..507: mol_type = other DNA; note = Synthetic coding sequence
atgcagactttcctaaaagggaaaagggtcgggtattggctgagcgagaagaaaattaaaaaactaaatttccaggctttcgccgagttatgcagaaagagaggaatggaggtcgtgcagttgaacctcagccgcccaatcgaggaacaggggccactcgatgtgattatacataagctaacggatgtgatcctcgaagcagaccagaatgattcccagtctcttgaattagtgcataggttccaggagtacattgacgctcacccagaaactattgtactggacccgctccccgccattcggacactgctagataggtccaaaagctatgaactcattagaaagattgaggcgtatatggaggatgaccgcatttgttcaccaccattcatggaactgacatccctgtgtggtgatgacaccatgagactgctcgagaaaaacggcttgacctttccttttatctgtaagacccgagtggcacatgggaccaatagtcatgaatag

SEQ ID NO: 18115 - DNA, 2211 bp, synthetic construct
  source 1..2211: mol_type = other DNA; note = Synthetic coding sequence
atgctgattccggcactgcaaatttcggatagtgaatctgtgggtttggaggatggcattgagcaatccgcttacctgaccgagtctaaaatgaacgagagcaaaccaggtgatagtcaaaatctagcctgcgtgttctgccggaaacatgatgactgccctaacaaatatggggagaagaaaacaaaggaaaagtggaacctgacggtacattactattgcctcctgatgagcagcggcatctggcaaaggggaaaggaggaagagggagtctacggcttcttgattgaagatattaggaaagaggtgaaccgggcgtctaaactcaaatgttgtgtgtgcaagaagaatggagcctctattgggtgtgtggcccctaggtgcaagcgctcctatcattttccctgcggcttgcagcgcgagtgtatattccagtttactggcaacttcgcctcattttgttgggaccaccggcctgttcagattatcaccagcaataactatcgcgaatcccttccttgcaccatctgcctggagttcatcgagcccatccctagctacaatatacttcgaagtccctgctgcaagaacgcatggttccatcgagactgtcttcaagtgcaagctattaatgcgggtgtatttttctttcggtgtacgatctgtaataacagcgacatatttcagaaagaaatgctgagaatgggcatccacatccccgagaaggatgcctcctgggaacttgaggagaacgcttatcaagagttgttgcaacactatgagcggtgtgatgtgaggcggtgcagatgtaaagaaggtagggattacaatgcaccagactctaagtgggagatcaaacgctgccaatgttgtgggtctagcggaacccatctggcttgttccagtctgcggtcttgggagcagaattgggagtgcttggagtgtaggggaattatatataactccggtgaatttcagaaagctaagaagcacgtccttcccaacagtaataacgtcggaatcactgactgcttgttggaagaaagcagcccaaagctgccccggcaaagccctggttctcagagcaaggatctccttcggcaaggatcgaaatttaggaggaatgttagcaccctcttgatagagctgggatttcagattaaaaaaaagacgaagagactttatatcaacaaagcgaacatctggaatagcgctctcgacgcttttcgcaataggaattttaacccgtcctacgccatcgaggtggcctacgtgatcgagaacgacaatttcgggtccgagcacccaggctccaaacaggagttcctgtcccttcttatgcagcatctggaaaacagtagccttttcgaggggtcactgtctaagaatctaagcctgaacagccaggccctgaaagaaaacttgtattacgaagccggcaagatgctggcgattagcctcgtccatggaggaccttctccagggtttttctccaagaccctgttcaattgtttggtatatggccctgagaatacgcagcccatccttgacgacgtgtcagattttgacgtggctcaaattatcattaggattaacacggcaactacggtcgctgaccttaaatcaataattaacgaatgctataactatctggaactgataggctgtctgcgactcataactactctgagtgacaaatatatgctggtgaaagatatactcggctaccacgtaattcagcgggtccacaccccattcgaaagttttaaacagggacttaagaccctgggagtgctcgagaagatccaagcatatccggaagcattctgcagcatactctgtcacaagccagagagcctgtccgctaagatcctaagtgaactcttcaccgtgcatactctgcccgacgtgaaggccctgggcttctggaatagctaccttcaggccgtggaggacgggaaatccactaccaccatggaagacattcttatcttcgcaaccggttgtagctcaatccctccagccggctttaagcccaccccctccattgaatgcttgcacgtggattttcccgtcggtaacaaatgcaacaactgtctggcaattccaattacgaatacatataaggagtttcaggagaatatggactttactattagaaatacactacgactggagaaggaagagtcctcacactatatcgggcattag

SEQ ID NO: 18116 - DNA, 1131 bp, synthetic construct
  source 1..1131: mol_type = other DNA; note = Synthetic coding sequence
atggccaatagcgcgaataccaataccgtgcccaagctttacagaagtgttatcgaggatgttataaacgacgtgagggacatctttctggacgatggagtggacgagcaggtgctcatggaactgaagacgctttgggagaacaaacttatgcagtccagggccgtggatgggtttcattccgaagaacagcaactcctccttcaggtgcagcagcagcaccagccacaacagcaacaacatcatcatcaccaccaccaccagcaggcacagcctcagcagaccgtaccgcagcaggcacagactcagcaagtactcattccagcctcacagcaagctacagcgcctcaggtcatcgtgccggacagcaaactcatacagcatatgaacgcctcaaatatgtctgccgcggcgaccgctgctacgctcgcacttcccgccggcgtaaccccagtccagcagattttgactaattctgggcagctgctgcaggtcgtgcgggcagccaacggggcccagtatattttccagccccagcagtccgtcgtgcttcaacaacaggtcattccacagatgcagcctggcggagtccaggctcctgtgattcagcaggtgctcgcaccattacccggaggcatctcccctcaaaccggagtcatcatccagccacagcagatactgtttacagggaataagacccaggtgatcccgacgactgtggccgcccctactcccgcgcaggctcagatcactgccacggggcaacaacagccacaggctcaacctgcccagactcaggccccactggttctccaggtcgacggcaccggggacacttccagcgaagaggacgaagacgaagaagaggactacgatgacgacgaggaggaggacaaggaaaaagacggagctgaggacgggcaggtcgaagaggagcccctgaattctgaagacgatgtatccgatgaagagggacaagaactgttcgacactgaaaacgtggtagtgtgccagtacgacaaaatacatcggagtaaaaataaatggaaatttcacctcaaagacgggattatgaatctgaatggtcgagattatatcttctcaaaagccattggcgacgccgagtggtag

SEQ ID NO: 18117 - DNA, 237 bp, synthetic construct
  source 1..237: mol_type = other DNA; note = Synthetic coding sequence
atggaaacggattgtaaccctatggagctctctagcatgtcaggattcgaggagggatctgagttgaacggcttcgagggcactgatatgaaggacatgcggctggaagctgaagctgttgtcaatgacgtgttattcgcagttaataatatgttcgtgtcgaaatctcttcggtgcgccgacgacgtggcctacatcaacgtggaaactaaagagcgtaacagatactgtctgtag

SEQ ID NO: 18118 - DNA, 747 bp, synthetic construct
  source 1..747: mol_type = other DNA; note = Synthetic coding sequence
atggcgtttagtggccgcgctagaccctgcatcataccagagaatgaagaaataccccgcgccgctctcaacactgtgcacgaagcaaacggtaccgaggacgagagagctgtctctaaattgcaacgtcgacactctgacgtaaaagtgtacaaagaattttgcgacttttacgcaaagttcaacatggccaatgcactggcttcggccacgtgcgagcgctgcaaaggaggctttgctccggctgagacgatagtgaattcgaatggagagctctaccacgagcaatgcttcgtgtgcgcacagtgcttccagcaattccccgagggccttttctacgagttcgagggaagaaagtattgcgagcatgatttccagatgctcttcgctccatgttgtcaccagtgtggcgagttcatcatcggccgagtaattaaagccatgaataatagctggcatccggagtgctttaggtgcgacctatgtcaagaggtgctggccgatattggattcgtcaagaacgccggcagacacctgtgtaggccttgtcataacagggaaaaagctcgcggtctgggaaaatacatctgccagaaatgccatgcaatcattgatgaacagcctctgatttttaaaaacgacccatatcatccagaccactttaattgtgccaattgcggacaagaaggaagcgattgtcgttgtacaggcgcagagcggggtgcaattctccctgccatgccttag

SEQ ID NO: 18119 - DNA, 2370 bp, synthetic construct
  source 1..2370: mol_type = other DNA; note = Synthetic coding sequence
atgagcgctcagaccagtcccgcagagaaagggttgaatcccggcctcatgtgtcaggaatcgtacgcatgtagtggaacagacgaggctatcttcgaatgcgatgagtgctgctccctgcagtgcttaaggtgcgaagaggaactgcataggcaagaacgtctgcgaaatcacgaaaggatccggctgaagccggggcacgtgccctattgtgacctctgcaaaggactcagcggtcatctccccggcgttcgccagagggctattgtgagatgccagacttgcaagattaatctttgcctcgaatgtcagaagcgtacacattcgggtggcaataaacgcagacatccagtaacggtctacaacgtgtcaaacctccaagaaagtctggaggcagaggaaatggatgaggaaacaaagcggaaaaagatgaccgagaaagtggtatctttcctcctggtggacgagaacgaggaaatacaggtgaccaatgaggaggactttataaggaaactggactgcaaaccggatcagcaccttaaggtagtgtcgatcttcggcaacactggtgatggcaaatcccacactttgaaccacacattcttttacggcagggaggtctttaaaacatccccgacacaggaaagttgcacagtcggggtgtgggccgcatatgatccggttcataaggtggcagtgattgacacagagggcctcctgggcgctactgtgaatctgagccaacgtactcgccttcttctcaaggttttagcaatctcggacctggtgatataccgcacccatgcagatcggctacacaacgacttgttcaaatttctgggtgacgcttccgaggcttacctgaaacatttcaccaaagagctgaaggccacgactgcccgttgtgggctggacgtgcccttaagcaccctgggtcccgccgtgataatcttccatgagacagtgcacactcaattgttaggatccgatcacccatctgaggttcctgagaagctcatacaggatcgctttaggaaactcggacgctttcccgaggcgttttccagtattcattacaagggcactaggacatacaatcctccaacggatttcagcggcctgcgtcgtgcactggagcagttactggaaaataataccacgaggtcaccgcggcacccaggtgtcatttttaaagctctaaaagctctcagcgataggttttccggtgaaatccccgacgatcagatggcacactcatccttttttcccgacgagtattttacttgctcttccctgtgcctttcttgtggggtaggatgcaagaagagcatgaaccacggcaaggaaggcgttccccacgaggctaagtcccgctgtcggtactctcatcagtacgacaacagagtttacacctgtaaggcttgctacgaacgcggtgaggaggtgtccgtagtgcctaagacatcggcaagtacagatagtccctggatgggcctagctaaatacgcttggtccggctatgtgatcgaatgtcctaactgcggcgtggtgtatagaagccggcaatactggttcggaaatcaggatcctgtggacactgttgtcaggaccgaaatcgtccatgtctggcctggaacagacggatttttgaaagacaataacaacgctgctcaacggctgcttgatgggatgaactttatggcgcagtccgtctcagagctcagtctagggcctaccaaagctgtgacatcttggttgacagaccaaatcgcacccgcgtactggagaccaaacagtcagattttgtcctgtaataaatgtgcaacatccttcaaagacaacgacacaaagcaccattgcagagcctgcggagaggggttttgcgatagctgctccagcaaaacaaggcctgtccccgaacggggttggggccccgccccagtgcgcgtctgtgataactgctatgaggccagaaatgttcagttggcggtgaccgaggcacaggtcgatgatgagggtggcaccctgattgcgcgcaaagttggcgaggcagttcagaacaccctgggggctgtggtgacggccatcgacatcccccttggcctggtcaaagacgccgctagaccagcatattgggtccctgaccatgagatcttacactgtcataattgtcggaaggaattctccattaagctgagcaaacatcattgtagagcctgtggacagggtttctgcgatgaatgttcccatgacagacgggcagttccatctagaggttgggaccaccctgtgcgggtctgcttcaactgtaacaagaaacctgcctggacgtcgctgagtgtcatgactggaaaggggccactctgttag

SEQ ID NO: 18120 - DNA, 2271 bp, synthetic construct
  source 1..2271: mol_type = other DNA; note = Synthetic coding sequence
ctggccgggaatgaaaccgaatgggtcacaatcgcgaataacctactgttcaaatgccacatacacctaagaatccacgagttgcaggattgtgatgcaaacgtgttcattgcactttaccagtctatcttaggcgagaaagtacctgatctgattgtgattccccgatcccaggaggatgatgcccacaacgtgcaggctgtgatcgattcactggccctagattatctccaagtcagccttagccacattacagccctctacagcgtttcgcgtcgtaagtattctgagcgtagaatgctgggaccgtcttgggacggagacgaggccgagtcaacaggagaaatcataagacttggtgataccgcacatacgttctcccttcgctctaacggcgcacaatgcccaaatgagatgttatccaagaaggctttggcaagtcccagttcaaagagccacgaggatatgctgtatccacctagcgtgctttccaagagccgcacttccttcgtggaagacaccgagactttgtcagtcagtggaatccccaacgcaagaaaactgggggagccgatcagagcggcaattccactccaccctccttaccatccaagtgaacctcgggccccctgcccaatcggcaaggaatatctgcatagcagtcattgttcacctgcagttaacagcaccggtgaacatacagaatttagtggagacctggacgacggactgtttctgatttctaagctgcctaagggatccaagtgggaagtttatcctgctcaggtacagggacctagaacccgcaaacctccgaagggtaagagaaacgaaaaccgtgccactgcgagcagctgcaatagtccttttccacagcgtccgaggaaacgccttactgagcaggagctccatgacgtatccgagaagctgtcccaaaggctgagtgaactggactggatgctcaagagcgcgctgggagatcgcattaaagagaagaccgatcataaagaggagaatactggcaatgaagaagtggaagacggcaccgaagagaccctatctcagcatagcgacggaatcgtcgaatacggacccaagaaatcaaggcccggtctctctatgcggcgaaagcctccatacagatcacactctctgagcccctcaccagttaataaacataaacagttccacttggagcggaagaggcagcggaaacctagggaaaccgacgtgagacagttccaggctcaggctttcaccgaggctttcgagagagaactgcgtcgccataaagttcaggagaatatcgggcccttgagaatccacgaaaaggaggaggagacggtgggaaaaaatatccaacggaggtccttcgttaaagagttacagaatgttgtttccccgggccggttcaccctggagaaaccccagcgaagagtgcggggcggattacccaaacccaacaaggcagtgcccatgaaagtcagtgagcattcccttctaccgctcatgcttgaacagtttccgttcctgtacgtgagtggccctacattaagcaagatgtggaagcaacaaatagcccaggtggaacaactgaagaaggaagcatgccgcgaaaacaggagtaagaagaaactgcaggatgaaatcgaagaagcgttgcgccgacacgaccttctcaccacacttgtgaaaaaagagtatgaacacaacaagaggctccaggatttcaaggactgcattcggagacagagacttacccagtccaagattaaggaaaatcggcaacagatcgtgagggctagaaaatactacgacgattaccgagtacaactgtgtgctaagatgatgcgaatgcggactcgggaggaaatgatctttaaaaaactctttgaggagggactcaacattcaaaaacagagactgagggatctgcggaattacgccaaagaaaagcgagacgagcaacgacggcgtcaccaggatgagctggactctatggagaactactataaggatcagttctcactgctcgcggaagccatatcccaagaacaccaagagttgaaggccagagagaagtcccaggctcagacacttcacaaggtcaaacgggagctgcggtcgaaaatggagaaagagatccaacaactgcaggacatgataacccaaaacgatgatgacgtgttcttccgagagctagaagcggaacgcttccgttcccgcctgcagttggccagctttcagtattccaaaagccccagcctgtag

SEQ ID NO: 18121 - DNA, 420 bp, synthetic construct
  source 1..420: mol_type = other DNA; note = Synthetic coding sequence
atggaaactgattgtaaccctatggaactcagctctatgtccggatttgaagagggcagtgagctcaatgggttcgagggcaccgatatgaaagatatgagattggaggcggaggccgtcgtaaacgatgtgctcttcgccgtgaacaatatgttcgtttctaagtcactcagatgcgctgatgacgtggcctatattaacgtggaaaccaaggagagaaataggtactgcttggagctgacggaggctggtctgaaggtggtcggatatgcttttgatcaggtggacgaccatctgcagaccccctaccatgaaaccgtgtactccctgctggatacattatcccccgcctatcgagaagccttcggtaacgccctgctgcagaggctggaagcactgaagcgggacggccagagctag

SEQ ID NO: 18122 - DNA, 300 bp, synthetic construct
  source 1..300: mol_type = other DNA; note = Synthetic coding sequence
atgaccgacactagacgtagggttaaagtctacacccttaatgaagatcgccagtgggacgatcgtggcactgggcacgtgagctcaggttacgtggagaggctaaagggtatgagcctgttggtgcgcgccgagtccgacggctctctgctgctggagtctaaaattaaccccaacacagcgtatcaaaagcagcaggacaccctcattgtgtggagtgaggcagaaaactacgacctcgccctctcttttcaagaaaaggccggatgcgatgaaatttgggaaaagatttgtcagtag

SEQ ID NO: 18123 - DNA, 2463 bp, synthetic construct
  source 1..2463: mol_type = other DNA; note = Synthetic coding sequence
atgacagatactcggcgtcgcgtaaaggtttacactttgaatgaggaccggcaatgggatgatcggggtacaggtcacgtgagtagtggctacgtagagcgtctgaaggggatgagcctgctggtgcgggctgagagtgatggttctttgctacttgaaagcaagatcaaccctaacaccgcctatcagaagcaacaggacacgctcatcgtgtggtcagaggccgagaactatgatcttgcactaagtttccaggagaaggcagggtgcgatgagatctgggagaagatctgtcaagtacaggggaaagacccctccgtggacattacccaagatcttgtagacgagagcgaggaagaacgtttcgatgacatgtcgtcaccagggctggagctgccctcttgcgagctaagccgcttggaggagatcgctgaattggtggcctcctcactgccctcccctctgaggcgagagaaactggctctcgccctcgaaaatgagggttatattaagaaattgctggagttattccacgtttgtgaagatctggaaaacatcgaggggttgcatcacctgtacgaaatcatcaagggtatattccttcttaatcggacagctctgtttgaggttatgttctctgaagagtgcattatggatgtgatagggtgtttagagtatgacccagctttgtcacagccaaggaaacaccgcgaatttctgaccaaaaccgcaaagttcaaggaggtgatcccaatttctgatcctgaactgaagcagaaaatacaccagacatacagagtgcaatatatccaggacatggtcctgccaaccccgagcgtgttcgaagaaaatatgctgagcaccttgcactcctttattttctttaacaaagtggaaattgtgggaatgctgcaggaagatgagaagttcctgactgatctgttcgcccaactaacagatgaagccactgacgaagaaaagagacaagagcttgtgaattttctaaaagagttctgtgcattcagtcagacgctccaaccacagaaccgagatgcgttcttcaagaccctgtctaatatggggatcttacctgcattagaggtgattctcggcatggatgatactcaggtgaggtccgccgccactgatatcttttcatatctggtggaatacaatcccagtatggtgcgggagttcgttatgcaggaggcccagcagaacgatgacgatattctccttattaatctgattatcgaacatatgatctgcgacactgatccagaattaggaggggctgtccagctgatggggttgctccggactttggtggacccggagaacatgttggcgactgccaataagacggaaaaaaccgagttcttggggtttttctataaacactgcatgcacgtgctcacagcccccctgctggccaacaccaccgaggataagccaagtaaagatgactttcagactgcccagctcctggccttagtgttggaactgctcaccttttgcgtagagcaccacacgtatcacattaaaaattatattatcaacaaggatattctgcggagggtacttgtccttatggccagtaagcacgccttcctggcactgtgcgcacttagattcaaacgaaaaattataggcctgaaagatgaattttataacagatacatcatgaaaagtttcctgttcgaaccagtggtgaaggctttcctcaataacggctcacggtataatctgatgaatagcgcaatcatcgagatgttcgagtttattcgggtggaagatatcaaatccttgactgcacacgtgatcgaaaattactggaaggcacttgaagacgtcgattatgtccagaccttcaaaggactgaaactgagattcgaacaacagcgcgagagacaagacaatcctaagctagactcaatgcggagcattttgcgtaatcaccgatacagaagagacgcaaggaccctggaggatgaagaggaaatgtggtttaacaccgacgaggacgatatggaggatggtgaagcagtggtgtccccctcggacaagacaaagaatgatgatgacattatggaccccatcagcaagttcatggagcgaaagaaacttaaggagagcgaagagaaagaggttcttctgaaaaccaacctttctgggcgacagtccccaagctttaaactgtctctctccagcggaactaaaaccaatctcaccagccagtcctccactacgaaccttccaggctctcccggctctccgggatcacccggctccccgggctcaccaggatctgtgcccaagaatacatcacaaaccgctgcgatcaccacgaagggcggtctggttggcctagtggattacccagatgatgacgaggatgatgacgaagacgaggacaaggaagatacccttccgctgagcaagaaagccaaattcgatagctag

SEQ ID NO: 18124 - DNA, 396 bp, synthetic construct
  source 1..396: mol_type = other DNA; note = Synthetic coding sequence
atgaatgagtccaagcctggagacagccagaacttggcttgcgtcttttgtaggaaacacgatgattgtcctaacaagtatggagaaaaaaaaaccaaggagaagtggaacctgactgtgcattactattgtcttcttatgtccagtggaatttggcaacgggggaaggaagaggagggggtctacggctttctaattgaggacattagaaaagaagtgaaccgggcgagcaaactgaagtgctgtgtatgtaaaaagaacggcgcgagcattggctgcgtggctccccgatgcaagaggtcgtatcatttcccttgtgggctgcagcgggaatgtatattccagttcaccggcaattttgcatctttctgctgggatcatcgccctgtgcaatag

SEQ ID NO: 18125 - DNA, 5934 bp, synthetic construct
  source 1..5934: mol_type = other DNA; note = Synthetic coding sequence
atggcggcaagatctgcaccctcttgccatctgagactggaatgggtttacggctacaggggtcatcaatgccgaaacaatttatactatactgccgccaaagagattgtgtactttgtggcgggcgtaggcgtcgtgtattcacctcgagagcaccgccagaagttttaccgtggccacagcgatgatatcatttctctagccctacatccggaaagagtgctcgtcgctaccggccaagtagggaaagagccttatatttgcatatgggatagttatacagtgcagactatttctgtcctgaaagacgtgcatacacacggtatcgcatgcctcgcatttgatctggacgggcagcgcttagtctccgtgggcctcgattccaagaacgcagtttgcgtctgggactggaaacgtggaaagatgttgtccatggcccctggccacactgatcgcatttttgacatttcttgggacctctaccagcctaacaagctggtttcgtgcggtgtgaaacacattaaattttggagcttatgtggtaatgctctgacccctaaacggggcgtttttggcaaaacgggggacttacagaccatcctgtgcctggcttgtgctcgagacgaattaacttactccggggcattgaatggcgatatctacgtttggaaagggatcaacctaattcgaaccattcagggggctcacgccgccggaatattctccatgaacgcctgtgaagagggcttcgcgaccggcggacgggacgggtgcattcgtctgtgggaccttacgttcaagcctattactgtcattgatctgagagaaaccgaccagggctataaaggtcttagcgtccgaagcgtctgttggaggggagaccatatcctggtcggtacgcaggactctgagatcttcgagattgtcgttcaggaaagaaacaaaccctttcttatcatgcagggtcactgcgagggggagctctgggcccttgccgtccacccaacaaagccccttgctgtgacggggagtgatgatcggtccgttcggatctggtctctggtggaccatgcgttgattgctcggtgtaatatggaggagcccattaggtgcgccgctgtaaatgccgatggaattcatctggccctgggcatgaaggacggatcgttcaccgtgctcagagtccgtgatatgacggaagtagtgcacatcaaggacaggaaggaggctatccacgagttgaaatattcacctgatggcacctatctggccgtcggctgcaatgattcatccgtggatatttatggggtggcgcagagatacaagaaagtgggtgaatgtcttggatctctcagcttcatcacacacttggactggtcttctgatagcagatatctgcagactaatgacgggaatggaaaacgcttattttaccgtatgcctggcggcaaggaggtaaccagcacggaagagatcaagggtgttcattgggccagctggacatgcgtctcaggactggaggttaatggcatctggcccaaatacagtgatatcaatgacatcaattctgtcgatggaaattacattggccaggtgctcgtgacagctgacgactacggtatcattaaactcttcagatatccttgcctgagaaaaggtgcaaagttcaggaagtacatcggtcacagtgcccacgtgacaaatgtaaggtggagtcacgactaccagtgggttatctccatcgggggtgccgatcatagtgtgttccagtggaagttcatcccagaacgaaaactaaaggacgctgtgcacatcgccccccaagagtccctggcagattcccatagcgacgagagcgattctgatctctcagatgtgcccgagctggacagcgagatagagcaggaaacccagctcacttacagacggcaggtgtataaagaagacctgccccaactaaaggagcagtgtaaggaaaaacaaaagtccgcgacatctaagagacgtgaaagagcgcccggcaactccatacgactgcattttgtgcacggttatcgaggctacgattgtagatcaaaccttttttacacccaaattggagaaatagtttatcatgtggcagccgtcggtgttatctataaccgccagcagaatactcagaggttctaccttgggcacgatgatgatatcctttgtctcaccatccatcccttaaaagactacgtggcaacgggacaggtaggcagggatccttctatccacatctgggataccgagaccatcaagcctctctctattctgaagggccatcatcagtatggagtcagcgcagttgattttagcgcagacggcaaaagacttgcctctgtgggcatagacgacagccatacagtggtgctgtgggactggaagaaaggggagaagctgtctattgcacgggggtctaaagataaaatttttgtagtgaagatgaatccgtatgtgcctgataaattaataaccgccggcataaaacacatgaaattttggcggaaagccggcggcgggcttatcgggagaaagggctacattgggaccttgggaaaaaacgataccatgatgtgtgctgtgtacgggtggaccgaggaaatggcctttagcggaaccagcacaggtgacgtgtgtatctggcgtgacatcttccttgtcaaaaccgtgaaagcccacgatgggcctgtgttttctatgcacgccctcgaaaagggctttgtgactggcggcaaagacggtatcgttgcattatgggatgattctttcgagaggtgcctgaagacttatgcgatcaagagagccgcgcttgctccaggaagcaagggactgctgctcgaggataacccgtccattcgggcaatctccctgggccatggacatatactcgtgggaaccaagaacggggagatactcgaagtggataagagcggacccattaccctgcttgtccagggtcacatggaaggcgaagtgtggggcctggcaactcatccatacctccccatatgcgccacagtgtccgatgataagaccttgcggatttgggatctttccccttctcactgcatgctggccgttcgcaagttaaaaaaaggtggacggtgctgttgtttctcccctgacgggaaggccctggctgtaggcctgaatgatggtagctttcttatggcgaatgctgacaccctcgaagatttagtgtcctttcaccatagaaaggacatgatcagtgacatcagattctcgcccggctcaggcaaatacttagccgtcgccagccatgactcctttatcgacatatataatgtgatgtctagcaagagagtcgggatttgtaagggtgctacctcttacatcacgcatattgactgggacattcgaggcaagctgcttcaagtcaatactggggccaaggagcaactgttctttgaggcgcctaggggtaagaaacagaccattcctagcgtcgaagtagaaaagatcgcctgggcgtcctggaccagtgtactcggcctgtgctgcgaaggtatttggcccgtcatcggtgaggtgaccgatgtcacagcgagttgcttgacctccgataagatggtgttggccactggcgatgaccttggctttgtcaagttatttcggtaccctaccaaagggaaattcggaaagttcaaacgctacgttgcacacagcacccacgtaacaaatgtccgctggacatatgacgattcaatgcttgtgacactgggcggcacagatatgtccctgatggtttggacaaacgagatggagggctatcgcgagaagcggccatgtgattcagaagaatccgacattgattctgaggaagatggcggatatgattcagatgtgactcgtgaaaatgagatctcgtatacaattcgggccctcagcacaaacatccggccaatgctggggattaaaccccatttacagcagaaagagcccagtatcgatgagcgccaaggcgtagtacgggggagccgaccccctgtctccagagctccacctcaaccagagaaactccagacaaacaacgtgggcaaaaaaaagagacccattgaagacctggtcctcgagctgatttttggctatagggggcgcgattgtaggaacaacgttcattatctgaatgacggagacgatatcatataccatacggcctcagtgggaatcctgcataatgtcgctaccggctcccagagcttctatcaggaacacaacgatgatatcctgtgtctgaccgtgaaccagcatccgaagtttattaacatcgtcgccacaggccaggtgggcgattccgccgacatgtcagcgaccgctccctccatccacatttgggacgctatgaataaacaaaccctcagcattctccgttgttaccatagtaagggggtctgctcggtgtccttcagtgcaaccggcaagttattattaagtgtcgggctggatccagaacatacaataacgatttggcgatggcaggagggagcaaaaatcgcctccagggccggtcacaaccagaggatctttgttgctgaattccgcccagactcggacacccaatttgttagcgtgggcgttaagcacgtgaagttttggacgcttgccggtcgcgctctgctaagtaaaaaggggctcctatccaccttagaggacgcccgtatgcagactatgctggccatcgcctttggcgccaacaatctcacctttactggcacaatctcaggggacgtctgtgtgtggaaagatcatatcctgtgccgcatcgtggcgcgggcccacaacggcccagtcttcgcaatgtacacaacgctgcgagatgggctgatcgtgactggtggcaaggagcggcccagtaaggagggaggcgcagtaaagctttgggaccaggagctgcgtagatgccgtgcatttagactcgaaactggccaggctacagactgcgttcggtctgtgtgtagggggaagggcaagattttagtggggacaaggaatgctgagatcatagaggtgggcgaaaagaacgcagcctgcaacattcttgtaaacgggcacgttgacgggccaatctggggactcgccacacacccatcaagggatttcttcctcagcgctgccgaagacggtaccgtgcggttgtgggatattgccgacaagaagatgcttaataaagtgaacttgggccacgccgcaagaacagtttgctattcacctgaaggggacatggttgctatcgggatgaagaatggggagtttattatcctgctggtctcttccctgaaaatttgggggaagaagcgggacagaaggtgtgcaattcatgacatcagattctccccagattcacgttacctagccgtgggatcgtcagaaaatagcgttgacttctacgatttaactcttggtcccactctgaatcggatctcctattgtaaagatattccgtcattcgtcatccaaatggacttcagtgcagacagtagctacctacaggtgtcttccggatgttacaaacgccacgtttacgaagtgccatccggtaagcacttgatggaccatgcagccattgataggattacctgggcaacatggacctcaatccttggtgacgaagtgcttgggatctggtccaggcacgccgagaaggccgatgtcaactgcgcgtgcgtatcccattctggtattagcctagtgactggcgatgattttggaatggttaagctgttcgactttccatgccccgagaagttcgccaaacataaacgcttcctgggccatagtccacatgtgacaaatattcggtttaccagtggcgatagacacgtggtgagcgctggcggtgacgattgtagcctcttcgtttggaagtgcgtgcacacaccacactag

SEQ ID NO: 18126 - DNA, 2502 bp, synthetic construct
  source 1..2502: mol_type = other DNA; note = Synthetic coding sequence
atgacggatacacggcgacgcgtgaaagtatacacacttaacgaggataggcagtgggacgacagggggaccggccacgttagtagcgggtatgtggaacggttgaagggcatgtccctgctggtgcgggcagagtctgatggctcgttgctgttggagtccaagataaatcctaacactgcatatcagaagcagcaggatacactcatcgtctggagcgaagcagaaaattatgatttagcgctgtcgttccaggagaaggcagggtgtgatgagatctgggagaaaatctgccaagtgcaagggaaggacccaagcgtcgacattacacaggacctggtagacgaaagtgaggaagagagatttgacgacatgtcatcacctgggctggaattgccaagctgcgagctatctcggctcgaggagatcgccgagttagtcgcatcatcgctccctagccctcttcgccgggagaaactggcccttgccctggagaacgaaggctacattaaaaaactgctcgaactcttccatgtgtgcgaggatttagaaaatattgaggggctgcatcatctgtatgaaatcataaaaggaatatttctcctgaaccgcacggccctgtttgaagtgatgttctccgaagaatgtatcatggatgtcattgggtgtctggagtacgacccagctcttagccagccccgtaaacacagggaattcctgaccaagactgctaaatttaaggaggtgatacccattagcgatcctgaattgaaacagaagattcaccaaacctatcgggttcagtacatccaagatatggtactgccaacgccgagcgtttttgaggaaaacatgctttccactctccattcattcatttttttcaacaaggtagagattgtgggaatgctccaggaggacgagaagtttctgacagatctcttcgcacagctgaccgacgaggctacggacgaggaaaagcgccaggagttagttaatttcctcaaggaattttgtgccttcagccaaactttgcagcctcagaaccgagatgctttttttaaaaccctttccaacatgggcattctgccagcattggaagtgattctcgggatggacgacactcaggtgcggtcagcagcgaccgacatcttctcgtatctggttgaatacaacccatccatggtgcgagaattcgtgatgcaagaggcccagcagaatgacgatgtttcaaagaaactgacagagcagaaaattaccagcaaggatatcctcctcatcaaccttattatcgagcatatgatctgtgataccgatccggaactgggcggcgccgtgcaattgatgggtcttttgcggactctcgtcgaccctgagaacatgctcgcaacagctaataagactgaaaagacagagttcctcggatttttttacaagcactgcatgcacgtcctgactgcaccacttctggccaacaccactgaggataagcctagcaaggatgacttccagaccgcacagcttctcgcactggtcctcgaacttcttacattttgcgtggagcaccacacctatcatattaagaactacatcattaataaggacattcttcgccgtgtcttagtactcatggcgtcaaagcacgctttcctcgcgttatgcgcactgcggtttaaaaggaagataataggactcaaggacgagttctataatagatatatcatgaaatcctttctctttgaaccggttgtaaaagccttcttgaataacgggagccggtacaatcttatgaatagcgctatcattgagatgtttgagttcatcagggtggaggatatcaaatccttaacagctcatgtgattgaaaactattggaaggctttggaagatgttgactacgtgcagacatttaaagggctcaaactgcgttttgagcagcagcgtgagagacaggacaaccctaagctcgactccatgagatccatcctcaggaaccaccgatataggcgagatgctcggacactggaagacgaggaggagatgtggtttaatacagacgaggacgacatggaggatggcgaggctgttgtcagtccttcagacaagacaaagaacgacgacgacattatggatcccatctctaagtttatggagagaaaaaaacttaaggagagtgaagagaaagaggtgctgttgaagactaatcttagtggccgacagtcccccagcttcaagctcagcctctctagtggtaccaaaactaacctgactagccaatcttcaactaccaatttaccgggaagtccaggctcccccggctcccctggaagtccaggatcacctgggtccgtgcccaaaaatactagccagacggcagccataacaacaaagggggggttggttggcctcgtcgattatcccgacgatgatgaagacgacgatgaggatgaggacaaagaggacacattgccgctgtctaaaaaggctaaattcgacagctag

SEQ ID NO: 18127 - DNA, 3987 bp, synthetic construct
  source 1..3987: mol_type = other DNA; note = Synthetic coding sequence
atgtggcgccggaagcatccaagaaccagcgggggaacgaggggcgtgctgtctggcaaccgcggagtggagtacggcagcggccggggacacctcggcactttcgagggccggtggcgaaagctgcctaaaatgcctgaggctgttggaacggatccctcaaccagccggaagatggccgagctggaagaagtgaccttggacggcaagcccctgcaagccttgcgcgtcactgacctgaaggctgcactggaacagcgagggcttgcaaagagcgggcagaaatcggccctcgtcaagaggttgaagggggcgctgatgctggaaaaccttcagaaacattcaacgccccatgctgcattccaaccgaacagccagataggcgaggaaatgagtcaaaatagttttattaagcagtatctcgagaaacagcaggagctgctccgacagcgactagagagggaggccagagaggccgccgagctcgaggaagccagcgcggagagtgaggatgaaatgattcatcctgaaggggtggcttccctgttgccgcccgatttccaaagctcactggagaggcccgaattggagttaagcaggcactcacctcggaagtcgtcaagcatttctgaggaaaaaggtgactcagacgacgaaaagcctaggaagggcgaacggcgtagcagtcgagtaaggcaggcacgggccgcaaagttgtcagagggatctcaacccgcagaagaggaggaagaccaggagacacccagccgaaacctgcgcgtgagagctgataggaaccttaagaccgaggaagaggaagaagaggaagaggaagaggaagaggatgatgaggaggaggagggtgatgatgagggccagaagtccagggaggccccaatcttaaaggagtttaaggaagagggagaggaaattccccgggtgaaacctgaggaaatgatggacgaaaggccgaagacacggagccaggaacaggaggtgttagagcgtgggggccgcttcacaagatcccaggaggaggctcgtaaaagccatctggcacggcaacaacaggaaaaagagatgaagaccactagccccttggaagaggaagagcgtgagatcaagagcagtcaaggattaaaggaaaaatccaaatctccctctcccccaagactgaccgaagatcggaaaaaggcgtctctggtagctctgccagagcagaccgctagcgaagaagagactccccccccccttctgacgaaggaggccagctcacctccccctcaccctcagctgcattcagaggaggaaattgaacctatggagggacctgcccccgctgttctgattcagctgtctccgccgaacaccgacgctgatactcgggagctcctggttagccaacacacagtccagcttgtcggaggtctgtctccactcagctccccgtctgacactaaagccgaaagcccggcagaaaaagtaccagaggagagcgtgctgcccttggtacagaagagcacactggcggattattctgcccagaaggatttagagcccgaatcagaccgctccgcgcaacctctaccactgaagattgaggagctggctcttgccaaagggataacggaggagtgtcttaagcagccaagcttggagcagaaggagggtcgtcgggcatctcacacccttttgccttcccaccgactaaagcaatcagcagattcaagcagttcccggtcaagtagcagttcatccagttcctcccgtagtcgctctagatctcctgattcctcaggatcacgatcccacagccctctgcggtctaaacagcgagacgtggcacaggccaggacccacgcgaaccctagggggaggcctaagatggggtcccgatcaacttcagagtcgcggtcgcgctctagaagcagatcccggtctgcctctagtaatagtcgaaagtctctgtcccctggcgtctccagggacagcagtacttcctatacggaaacaaaagatccctcatccggtcaagaagttgcaaccccacctgtcccccagctacaagtatgtgagcccaaagagcgtacgtccacatctagtagttctgtgcaagcacgacggctcagtcaacctgaaagtgccgagaaacacgtcacacagagacttcagccggagagggggtcacctaagaagtgtgaagccgaggaagcagaaccccctgccgctacacagccccaaacatccgagactcagaccagtcacctgccggagagcgaaagaatccaccacacagtggaagagaaggaggaggtcactatggatacttctgagaaccgacccgaaaacgacgtgcctgagccacctatgcccatcgcagatcaggtcagcaacgatgatcgccctgaagggtcagttgaagacgaggaaaagaaggaaagctctctccctaaatccttcaaacgcaagatctctgtggtttcaaccaaaggggtgcccgccggcaatagcgatacagaaggcggacagccaggtagaaagcggagatggggcgcttcgactgcgaccactcagaagaaacccagtatttcaattacaacagagtcattgaaagaagcggtggtggatttacacgctgatgatagtcgaatctctgaggacgagacagaacgcaatggcgacgacggcacacacgataagggactgaagatatgtcgcacggtcacccaggtcgtgcccgcggaaggacaggagaacggccaacgagaagaagaagaggaggagaaagagcccgaggcagaaccacctgtgccacctcaggtgagtgtggaggtggccctgcctcccccagcagagcacgaagtcaagaaagtcactcttggcgacactttaacacggcgcagcatcagtcaacaaaagagcggggtttctatcactatcgatgatcctgtacggacagcccaggtcccaagccctccgcgcggcaaaatcagcaacatcgtgcacattagtaacctggtacgcccattcaccctgggccagctaaaagagttgctcggcagaacaggcactctggtcgaggaggctttctggatcgataagataaaatctcactgctttgtcacctactcaacagtggaagaagccgtggccaccagaaccgccctgcacggagtgaagtggccccaaagtaatcccaagttcttatgtgccgactatgcggaacaggatgagttggactatcataggggactgctggtggatcgtccttctgaaaccaagaccgaggagcaggggatcccgcgccccctgcatccacccccaccaccccctgtgcaacccccccagcacccacgtgctgaacagcgcgagcaggagagagccgtgcgggaacagtgggccgaacgggaacgcgaaatggagaggcgcgagcgcacaagaagcgagcgcgaatgggatcgtgacaaggtaagagaggggcccagatccagatcccgaagtagagaccggagacggaaagagagggccaagtccaaggagaagaagtccgagaaaaaagagaaggcgcaggaagaacctcctgcaaaactcctggatgatctgtttagaaagaccaaggctgccccttgcatttactggctgcctttaaccgacagccaaattgtccagaaggaggccgaaagagccgaaagggccaaagaaagggagaagcggcgcaaggaacaggaggaagaggagcaaaaggagcgggagaaggaagctgagcgagaaagaaaccgacagcttgagcgtgagaagcgtcgcgagcactctcgggagcgggatcgggagcgcgaacgggagcgggagagggaccggggagatagggatcgggaccgcgaacgcgatcgtgagcgggggcgtgaaagagaccgtcgcgataccaaaaggcactcgaggtctcgctcccggtccacaccagtcagagaccgaggcggacggcgctag

SEQ ID NO: 18128 - DNA, 1089 bp, synthetic construct
  source 1..1089: mol_type = other DNA; note = Synthetic coding sequence
atggcccatagctctttcttccctgacgagtacttcacatgctcgagcctctgcctttcatgtggagtgggttgtaagaaatccatgaatcacgggaaggagggagtgccgcacgaggccaaaagccgctgcagatactcccaccagtacgataaccgtgtttacacatgcaaagcgtgctacgaaagaggtgaagaagtctccgtggttcctaagacctcagccagcactgactctccatggatggggctcgcaaagtacgcctggtctggatatgtgatcgaatgtccaaattgcggcgtcgtgtataggtcacgtcaatattggttcggcaatcaggatcccgtagacaccgtggtgcggactgaaatcgtgcacgtctggccaggaactgacggttttttgaaggacaacaacaacgccgcccagcgtcttctggacggcatgaacttcatggcacagagtgtgagtgagttgagcctcggtcctacgaaagcggtgacctcgtggctcacggatcagatcgccccagcctactggcggccaaactcccaaattctcagttgtaacaagtgcgctacaagtttcaaagacaacgacaccaagcatcactgccgggcatgtggcgaagggttttgcgactcctgctcatcgaagaccaggccagtcccagagagaggatgggggccagcacccgttcgagtatgcgacaactgttacgaggccagaaatgtacaactcgcagtgacggaggcacaagtggacgatgagggcggcaccctcatcgccaggaaggtcggtgaagccgtccagaacaccctgggagcagttgttaccgctatcgatatcccattgggactggtgaaagacgccgctcggcccgcctattgggtgccggatcacgagattttacattgccacaattgcagaaaagagtttagcattaagctctccaagcaccattgtagggcgtgcggccagggattttgcgatgagtgctcgcacgataggagagccgtgccaagcagaggatgggatcaccctgtgcgggtgtgttttaattgtaataagaaaccaggcgatttgtag

SEQ ID NO: 18129 - DNA, 420 bp, synthetic construct
  source 1..420: mol_type = other DNA; note = Synthetic coding sequence
atggaaactgattgcaacccaatggagttaagctcaatgtccggattcgaggagggcagtgaactgaatgggttcgagggcacggacatgaaagatatgcgcctggaggccgaggcagtggtgaacgatgttttgttcgccgtcaataacatgttcgtgtcgaagtctctgcgttgcgccgatgatgtcgcctacatcaacgtagagactaaggaacgaaatcggtactgcctagagctgaccgaagccgggttaaaggtcgtaggatacgcttttgatcaggtggatgatcaccttcagaccccatatcacgagaccgtatactccctgctcgacaccctcagtcctgcctacagagaggcgttcggcaacgccttgttgcaacgcctcgaggctctgaagcgcgatgggcaatcttag

SEQ ID NO: 18130 - DNA, 2256 bp, synthetic construct
  source 1..2256: mol_type = other DNA; note = Synthetic coding sequence
atgtccgaggaggaactcaccaaggccatggagggactcgggatggatgagggagatggagaaggtaacattctgcccatcatgcagtcaatcatgcagaacttactgtcaaaggatgtgctttatccaagtctcaaggagataacagagaagtatcctgaatggcttcagagtcacagagagtctctgcccccggagcagtttgaaaaatatcaggagcagcacagcgtgatgtgtaagatctgtgagcaatttgaagctgagactcccactgacagtgagactacacagaaagcccggtttgagatggtccttgacctcatgcagcagttacaagatctgggacatccaccaaaagaacttgccggggagatgttgacttggctgtttttctgcggctcacaatgggtctacggtccctggttgacttatgtcggttggctacaacagacctctttcaagatgagttccaaggggagcagcacggatggccgcactgatctggctaacggtagcctctcttctagccctgaagaaatgagcggggccgaggaggggagagaaaccagctccggaatcgaagtggaggcctcagatctgtcacttagtttgactggagatgacggcggccctaaccgcacctctactgagtctagaggaacagataccgagagctcaggggaggataaggattcagactccatggaggataccggacattatagtattaatgatgaaaacagagttcacgaccgatctgaggaagaggaggaggaggaggaagaggaggaagaggaacagccgcgcagacgagttcagagaaaacgagccaacagagaccaggacagctccgacgacgagcgggcgctggaggattgggtgtcaagcgagacatcagcactccccagaccccgatggcaggctctaccggcgctcagagagagggagctgggatcttctgcaagattcgtctatgaagcttgcggagcccgagtgttcgtgcagcgatttcgtctgcagcacggtcttgagggccacactgggtgcgtgaacaccctgcactttaatcagaggggtacctggttggcaagtgggagtgacgacctgaaggtggttgtctgggattgggtgcgtagacagcccgttctagacttcgagtccgggcataagagcaacgtgttccaggcaaagtttctccccaactctggcgactctacgctcgccatgtgcgcccgcgacggacaagtgcgggtggccgaactgagtgccacacagtgctgtaaaaacacaaaaagagtggcacagcacaagggtgcttctcacaagcttgctttggaacctgactctccttgcactttccttagtgccggcgaggatgccgtcgtgttcaccattgacctccgacaggacagaccagcatctaaattggtcgtgaccaaggagaaggagaaaaaagtcgggctctacactatctatgtgaatcccgcaaacacccaccagttcgcggtggggggcagagaccagtttgtgagaatctacgatcagcgcaagatcgacgaaaatgagaacaatggagttctcaagaaattctgtccacatcaccttgtgaactcagaaagtaaggctaatattacgtgtctcgtgtacagtcatgacggaactgaactgttggccagctacaacgatgaggacatatacctctttaacagctctcattccgatggagctcagtatgttaagagatacaaggggcatcgcaataatgctacggtgaaaggtgtcaacttctatgggcctaagagcgaattcgtcgtgtcaggttcagactgcgggcatatctttctttgggaaaaaagttcctgtcaaatcatccagttcatggagggggacaaagggggggtggtgaactgcctggagccgcatccccacctcccagtgttagccacatccggcctggatcacgacgtgaaaatctgggccccaacagccgaagccagtacagaactgactgggctgaaggatgtcattaagaaaaacaaaagggagcgtgatgaggatagcctccaccagacggacttatttgattcccatatgctctggtttttgatgcatcacttgcgccagagacggcaccatcggcgctggagggagccaggtgtcggcgccacagacgccgatagtgatgagagtccctcgagcagcgatactagcgatgaagaggagggccctgatcgtgtccaatgcatgccatcgtag

SEQ ID NO: 18131 - DNA, 1056 bp, synthetic construct
  source 1..1056: mol_type = other DNA; note = Synthetic coding sequence
atgatcgttcagcgcgtcgtgctcaactcgcgcccaggaaagaatggaaacccagtggccgagaacttcagaatggaggaagtttatctcccagataacattaacgagggacaagtgcaagttaggacactgtatctgagcgtagacccatacatgaggtgccgaatgaacgaggacaccgggaccgattacatcactccctggcaactgagtcaggtagtggacggtggcggaattggaattatagaagaatcgaagcataccaaccttacgaagggcgatttcgtcacctctttctattggccttggcagaccaaggttatcctggatggcaactccctggagaaagtagatcctcaactcgttgacggacacctgtcgtactttcttggggccatcggcatgcccggtctgacatctctgatcggcattcaggaaaaaggccacattaccgcaggttcgaataagactatggtcgtttcgggagccgccggcgcttgtggatctgtagctggccaaattggacactttcttggttgctctcgcgtggtgggaatctgcggtacccacgagaaatgtatcctgctaaccagcgaacttgggttcgacgctgctataaattacaaaaaggataatgtggctgaacagctcagggagtcgtgtccagccggcgtcgatgtgtattttgataacgtcggggggaatataagtgacacggttatttctcagatgaacgagaacagccacatcatactgtgcggccaaataagtcagtacaacaaagatgtgccataccctcccccactcagtccagctatcgaagccatacagaaggagcgtaacatcactcgtgagagattccttgtgcttaattacaaggacaagttcgagcctggaatcctgcagttgagtcagtggtttaaggagggcaagcttaaaataaaagaaactgtgatcaacggattggagaacatgggcgcggcttttcagtcaatgatgaccgggggcaacatcggaaagcagatcgtgtgcatcagtgaggaaataagcctctag

SEQ ID NO: 18132 - DNA, 588 bp, synthetic construct
  source 1..588: mol_type = other DNA; note = Synthetic coding sequence
atgccgctgcccttcggattgaagctgaaaaggacacgccggtacacagtatcgagcaagtcctgtcttgtcgcacggatccagctcctgaacaacgaattcgtcgagtttaccctgtcggtagagtcgaccggacaggaaagtttagaggccgtggcccagcggctggaactgcgtgaagtcacatacttctcattatggtattacaacaagcagaaccagcgccgctgggtggacctcgagaaacccctgaaaaagcagttggataaatacgccctagagccaacagtgtacttcggcgtcgttttctacgtaccctcggttagtcaactccagcaggaaattacacgataccagtattacctgcagctcaaaaaagatattctcgagggcagcatcccatgcactttggaacaagcaatacagcttgccggcttggctgtccaagctgacttcggtgacttcgaccagtacgagagccaggactttttgcagaagtttgcactgtttcctgtcggctggctgcaggacgagaaagtgctcgaagaagcaacgcagaaagttgccttgttgcaccagaagtactag

SEQ ID NO: 18133 - DNA, 354 bp, synthetic construct
  source 1..354: mol_type = other DNA; note = Synthetic coding sequence
atgggagacaagaagagtcctacacgccccaagaggcagccaaaaccatcatccgacgaaggatactgggactgctcggtgtgcacctttaggaattccgccgaagcgttcaaatgcatgatgtgtgatgtgaggaagggcaccagtacccgagatagtaaggagggaggcaaattggtgtcctatagtaccgcttcactgggtgtaaggggaactttacgcaatcgagtcggggggggcagcagcgaagagaaaaaacaagcagagtacctcgctcctggacgacgcagaaatattgtccaccgcggcgttggcccaggccagcgttctggacctagccttaaagaggcctag

SEQ ID NO: 18134 - DNA, 3285 bp, synthetic construct
  source 1..3285: mol_type = other DNA; note = Synthetic coding sequence
atggctgaatcctcttcggagtccgatcacttccggtgcagggatcggctgtccccttgggctgccaggtccacccaccgaggcactaggtcattacctactgtcgaggtaacagaaaaagtgaacacgataacctccactctccaggacacctcccgaaatctgcgacaggtggaccaaatgttgggccggtacagagaatactcaaatgggcaggcaggggctattgagcacctgaaagaaagtctcgagcagagcatcgatcagctccgctctcagcgcttactgagaaactccggaggacgcagtatttccgttacaagcctcagtgcttctgatctggacggcggaactgggtcagaactccaccacttcccccctacaagccccttgaaggattatggagatccacagggcatcaagcggatgcgatcaaggacaggggtccgcttcgtacaggaaacagatgacatgacacagctgcatggtttccaccagagtctgcgggatctgtctagcgagcagatacgccttggcgatgattttaaccgggagctgtcgcggcggtcgagatccgacgcagagaccaaaagggcccttgaggagctgacagagaagctgaatgaggcacaaaagcaggaggtggtttctgaccgagtagagcggcgtctgcaagagttagaacgcgaaatgaggacggaacgcgagctcgtggaacggagacaggatcagttgggcctaatgtcactccaactccaggaagctctgaagaagcaggaggctaaagctgacgagcacgagggtgcaatcaagaacaaactgaggcagactgagacagaaaaaaatcagctggagcaggagttggagttatcacgccgtcttctgaatcagtccgagggaagccgcgagacactattgcatcaggttgaagaactgaggacccaactgacgaaggcggaaggcgatagaaaaggactgcaacatcaggtctctcagatcagtaagcagcagtccaattaccaggacgagcaaggagaggactggcggttccggaggggagtagagcgcgagaaacaggacttggagaagcaaatgagtgatctacgagtgcagctaaacttcagtgctatggcgagcgagctggaggaagtgaagcgctgtatggagaggaaagacaaggagaaggctcacctggcctcccaagtggagaatctgacacgggagttggagaatggcgaaaaacagcagttacagatgctggatcggctgaaagagatacaaaaccactttgatacgtgtgaggccgagaggaaacacgctgacctgcagataagcgaactcactcggcacgctgaagacgcaacaaaacaggcagagagatacctgagtgaacttcagcagtccgaggcccttaaggaggaagcagaaaaacggagagaggatctgaaattgaaggcgcaggagtcaattcgccaatggaaactcaaacataaaaaactcgagcgggcacttgaaaaacagagcgagacggtcgatgaactgaccgggaagaataatcagattttgaaagagaaggacgagcttaagactcagctttacgcggcccttcagcagattgagaatcttcgaaaagaactgaatgacgttctgacaaagcgggcattgcaagaggaagagctgcatagcaaagaggaaaaattacgagatataaaatcacaccaggccgatctggagctcgaagttaagaattcactggacacaattcatcgtttagagtctgagctgaagaagcagagtaagattcagagtcagatgaaggttgagaaggcacatttagaggaagagatagctgagctgaagaagtctcaggctcaggacaaggctaagctgctggagatgcaagaatccattaaggacctctcagcaatccgcgcagatttagcgaacaagctggcggaggaggagcgcgctaaaaaagccgtactgaaagatctgtcggatctgacagcgcaggccaaatcacgggacgaggaaaccgccacaataattactcaacttaaactagagcgagacgtacatcaacgcgagctgaaagacctcaccagcagcctccagagcgtcaaaacgaagcacgagcagaatatccaggagctgatgaaacacttcaaaaaggagaaatctgaggctgagaaccacattagaaccctgaaagcggaatcactcgaggagaagaacatggcgaagatccatcgggggcaattagaaaagttaaagtctcaatgtgataggcttacggaggaactaacccagaacgagaatgagaacaaaaagcttaagctcaagtatcagtgcttaaaggaccagctggaagaaagagagaagcatatttcaattgaggaggagcacctgagaagaatggaggaggcacgcctccagctgaaggatcaactcctctgtctggagactgagcaggagtctatcctgggcgtgatcggaaaggagatcgacgccgcttgtaagaccttctctaaagacagtgtggagaaactcaaagtgttttccagcggccctgacatccactacgaccctcataggtggctggctgagtcaaagacaaaactccagtggttatgtgaagaactcaaagagcgagaaaatcgggagaaaaatctgagacatcaattaatgctgtgcaggcagcagctgcggaatctcactgagaataaggaatcagagctccagtgtctgttccaacagatagaacgccaagagcaactgctggacgagattcatcgagagaagagagacctcttagaggaaactcagaggaaggacgaggaaatgggaagtctgcaagatagagttatcgccctggagaccagtacccaggtggctctagatcaccttgagagtgttcccgagaaactgtccctcctggaggacttcaaggacttccgcgattcctgttcctctagcgaacgcacagacggcagatactccaaatatagggtccggcggaactcgttgcaacatcaccaggacgacactaaataccggacaaagtcgttcaagggagatcgaacctttttagagggttctcatacccggggtctggatcatagtagttcttggcaggatcacagcagatttttgtcctccccccgcttctcctatgtgaactcttttaccaagcggaccgtggcaccggactctgccagtaacaaggaagacgccacgatgaatggcacaagctctcagcctaagaaggaagagtatggatcttag

SEQ ID NO: 18135 - DNA, 1353 bp, synthetic construct
  source 1..1353: mol_type = other DNA; note = Synthetic coding sequence
atgagagaaatcgtccacatccaggcaggccaatgtggcaatcaaatcggagcaaagttctgggaggtgatcagcgatgaacatggaatcgatccaagtggaaactatgtaggtgactcagatctccagctggaaagaattagtgtttactacaatgaagcttctagtcataagtatgtcccgagggcaattctcgtcgacctggaaccgggaactatggacagcgtgcggtctggcgcgttcggtcacctgtttcgccctgataacttcatttttgggcaatctggagctggcaacaattgggcgaagggccattacaccgagggggccgagttggttgactctgttcttgatgtggttcggaaggaatgcgagaattgcgactgtctgcagggatttcagctcacacactcactgggaggaggcactggatcgggaatggggaccctattgatcagcaaagttagggaggagtatccagatcggataatgaacactttctctgtggtgccctcacccaaggtgtcagatacagtggtggaaccctacaatgctaccctgagcattcaccaattagtggagaacactgatgaaacctattgtatcgacaatgaggcactttacgacatctgtttccgtaccctcaagctggcaacccccacgtacggcgatctaaaccatctagttagtgctactatgagcggggtgactaccagtctccggtttccggggcagctcaatgctgacctcaggaagctggcagttaatatggtgcccttccccagacttcacttcttcatgcccggctttgcccctctgactgcacggggttctcagcaataccgcgccctcaccgtgcccgaactcacccagcagatgttcgatgcaaagaatatgatggccgcctgcgaccctagacacgggagataccttaccgttgccactgtgtttagaggccgcatgtctatgaaagaggtggacgaacagatgctggctatacagtctaagaattccagctattttgtcgagtggatcccaaataacgtgaaggtagccgtatgcgatatcccaccccggggtcttaagatgtcatcaacatttatcgggaacagcaccgctatccaggaactgtttaagagaatttcagaacagtttacggcaatgtttcgtcgcaaagcttttctgcattggtatactggggagggcatggatgagatggaattcaccgaagcagagtcgaatatgaacgatctcgtgtcagagtaccaacagtatcaagatgcaaccgccgaggaggaaggcgaaatgtacgaggatgatgaagaagagagcgaggcgcaggggcccaagtag

SEQ ID NO: 18136 - DNA, 240 bp, synthetic construct
  source 1..240: mol_type = other DNA; note = Synthetic coding sequence
atgaacgagtctaagccaggcgacagtcagaatttggcatgcgtgttttgccgaaagcatgatgattgcccaaacaagtacggcgagaaaaaaaccaaagaaaaatggaacttaactgtacattattactgcctgctcatgagttctggtatttggcagcggggaaaggaagaagagggcgtctacggattcttaattgaggacatccggaaggaagtcaacagggcgtcgaagctgtag

SEQ ID NO: 18137 - DNA, 1785 bp, synthetic construct
  source 1..1785: mol_type = other DNA; note = Synthetic coding sequence
atgaccgacacacgccgcagggtgaaggtctatactctgaacgaggatagacagtgggacgacagaggtactggacacgtgagtagcggctacgtcgaacgactgaaaggcatgtctctgcttgtgcgggcagagagcgatggctccctactactcgagtcaaaaattaatcccaatactgcttatcagaagcagcaggaggacgagaagttccttaccgaccttttcgcccagttgaccgacgaggccaccgacgaggaaaaacggcaagaactcgtcaattttctgaaggaattctgcgccttctcccagactttgcaaccccagaatagggacgcattctttaaaactctgtccaacatggggatcctgcccgcactggaggtcatccttggtatggatgatacccaggtcagatccgcagctaccgacatttttagttatttggtggagtataacccaagcatggtccgcgagtttgtgatgcaggaggctcagcaaaacgatgatgtgtccaaaaagctcactgagcaaaagattacaagtaaagatatcctgctaatcaacttgattatagagcatatgatatgtgataccgatccagaactcgggggcgcagtgcagttgatgggactactgcgtacccttgttgacccggagaatatgcttgccaccgccaataagacagagaaaacagagttcttgggattcttctacaagcattgtatgcacgtgctgaccgcaccgttgctggctaacacaactgaggacaagcctagcaaggatgactttcagaccgcacagcttctagctttagttttggaactactcactttttgtgtcgaacatcacacctatcatattaagaactatattatcaataaagacatcctgcgcagggtgctcgtgctcatggcctcaaaacatgcttttctcgcactctgcgccctccggttcaagcggaaaatcattggtttgaaggacgaattctataaccggtatattatgaagtcattcctgtttgagccagttgtcaaggctttccttaacaatggcagccggtacaacctcatgaatagcgctatcatagagatgttcgaattcatacgagtagaggatatcaagtctctgactgctcacgtgattgagaactactggaaggccttggaggacgtggattatgttcagacttttaaaggactgaagctgcgctttgagcagcagcgggagaggcaggacaaccccaagctggattccatgcgctctattctcaggaaccaccgctaccgccgagacgccaggaccttagaagacgaggaggagatgtggtttaacaccgacgaggacgacatggaggatggtgaggccgttgtcagcccatcagataaaacaaagaacgatgacgatatcatggacccgatcagcaagtttatggagcgtaaaaaattgaaagagagcgaggaaaaggaggtgttgcttaaaaccaacctctctgggcgccaaagcccgtcctttaaactctccctgtcaagcggtaccaagaccaacctcaccagtcagtcaagtaccaccaatctgcctggtagccctggttcccccggtagtccaggtagtccagggtcccctgggtccgtgcctaaaaatacctcacagaccgctgccatcaccaccaagggtggattggtaggcctcgtggactacccagacgatgatgaagatgacgatgaggacgaggacaaggaggatacccttccacttagcaagaaggcgaagttcgactcctag

SEQ ID NO: 18138 - DNA, 540 bp, synthetic construct
  source 1..540: mol_type = other DNA; note = Synthetic coding sequence
atggccgagtccagcagtgagtccgaccatttcagatgcagggaccgactgtctccctgggcagctcgatcaacccaccgtggaacgaggagtctcccaaccgtggaagtgaccgagaaggttaacacgattacaagcaccttgcaggacactagccgcaatctccggcaggttgaccaaatgctaggccggtatcgtgagtattccaacggtcaggctggtgccattgaacatctcaaggaatcattggagcagtcaatcgatcagctccgcagccagaggctcctgagaaacagcggcgggagatcaatctcggtcacaagcctcagtgccagcgacctcgatgggggcaccggctctgaactgcaccatttccccccaacatcgcctctcaaagattacggggacccccaagggatcaaacgtatgcggtctcgaacaggcgtgagattcgtgcaggagaccgacgatatgacccagttacacggcttccaccagtcccttcgagatctgagctctgagcaaatccgtctcggctag

SEQ ID NO: 18139 - DNA, 1056 bp, synthetic construct
  source 1..1056: mol_type = other DNA; note = Synthetic coding sequence
atgattgttcagagggtggtgcttaacagtaggccaggaaagaatggcaaccccgtcgccgagaatttccgcatggaagaggtgtatcttccagataatatcaacgagggacaggtgcaagttcgaaccctctacctcagcgtcgacccgtatatgcgctgtagaatgaatgaagacacaggtactgactacatcactccttggcagctaagccaggtggtggacggcggaggcattggtattatcgaggagtcaaaacacaccaatctgactaaaggggacttcgtcacctcattctattggccttggcagaccaaagtgatcctggacggcaattcactcgagaaggtggatccacagctcgtcgatggccacttatcttactttctgggagcgatcggcatgcccggcttgaccagccttattgggatccaagagaaaggccacattactgcggggtccaacaagactatggttgtgtcaggcgccgctggcgcttgtggcagtgtggcgggccagatcgggcactttctgggctgtagccgagtggtggggatttgcggcacccacgagaaatgcattctgctgacatctgaactgggctttgatgcggcgatcaattataagaaagacaatgtcgccgaacagttgagagagtcgtgcccggccggcgtcgacgtctatttcgacaatgtcggtggcaatatttctgacactgtgatctcgcagatgaacgagaattcacacattattctatgtggtcagattagccagtataataaagacgtgccttatccacctcccttatcccctgccatagaagccatccagaaagaacgaaacatcacacgggaacgcttcctggtgcttaattacaaagacaaattcgagcctggaatcctgcagctctctcagtggttcaaagaaggtaaactgaagatcaaagaaactgtgattaatggcctggagaatatgggggccgccttccagtcaatgatgacaggggggaacatcggcaagcagattgtctgcatttctgaggaaatttcactgtag

SEQ ID NO: 18140 - DNA, 330 bp, synthetic construct
  source 1..330: mol_type = other DNA; note = Synthetic coding sequence
atggagactgattgcaacccaatggagctcagctctatgtcaggcttcgaagaagggagtgaactgaacggtttcgagggcaccgatatgaaagacatgcgcctcgaagccgaagctgtggtgaatgacgtcttgttcgccgtcaacaatatgtttgtgtctaaatcactgagatgtgccgacgacgttgcctatatcaacgtggagaccaaggagcgcaaccgctactgcctggagttaacggaggcaggactcaaggtggtgggatatgctttcgaccaggtggatgatcacctgcagacaccctatcacgaaaccgtgtattcgtag

SEQ ID NO: 18141 - DNA, 387 bp, synthetic construct
  source 1..387: mol_type = other DNA; note = Synthetic coding sequence
atggctgagtcctcttcagaaagtgatcacttccgatgccgagatagactgtctccttgggcagcgaggtcaacccatagggggacccggtcattacctaccgtggaagtgacagaaaaggttaacacgattactagcacattgcaggatacttctcgtaatttacggcaagtggaccagatgctaggcagatatcgcgagtactccaatggtcaagctggggccatcgagcacctgaaagagtcacttgaacaaagtatagatcagctgcgtagccaacgtctcctgcgaaacagtggaggtcggtcaatttctgtgacatctttaagcgcctccgacttggatggcgggaccgggtccgagcttcaccacttccctcctacgtag

SEQ ID NO: 18142 - DNA, 369 bp, synthetic construct
  source 1..369: mol_type = other DNA; note = Synthetic coding sequence
atgctgttcgctccttgttgtcatcagtgtggagagttcatcatcgggagagtgataaaagccatgaacaacagctggcaccctgagtgttttcgatgcgatctatgccaggaagtgctagctgacatcggattcgtgaagaacgcgggcagacacctgtgtcgaccctgccataaccgggaaaaggctaggggcctggggaaatacatctgccagaagtgccacgctattatcgatgagcaacccctcatctttaagaacgacccatatcatccagatcacttcaactgcgccaattgcggccaggagggtagcgattgtagatgtaccggagcagagagaggcgctatactcccagctatgccttag

SEQ ID NO: 18143 - DNA, 420 bp, synthetic construct
  source 1..420: mol_type = other DNA; note = Synthetic coding sequence
atggaaacagactgcaatccaatggagctgagcagcatgagtgggtttgaagaagggagcgaattaaatggattcgagggaacagacatgaaggatatgcgtctggaggccgaagctgtcgtaaatgatgtgcttttcgcagtcaataatatgtttgtgtcaaaatccctgcgctgcgctgacgatgtcgcatacataaatgtcgagacaaaggaaagaaatagatattgtcttgaattgacggaggctggacttaaggtcgtgggatacgcctttgaccaggtggacgaccatcttcagaccccatatcatgagacagtctactctctcctcgacacgctctctccagcctacagagaggcgtttgggaacgccctcctgcagagacttgaggccctgaaaagagatggtcagagctag

SEQ ID NO: 18144 - DNA, 4602 bp, synthetic construct
  source 1..4602: mol_type = other DNA; note = Synthetic coding sequence
atgcctgtgaaaagactacgagaagtcgtctctcagaaccatggagatcatttggtccttctgaaggatgaactcccttgcgtgccccctgcactaagtgccaataaaaggctgccggtgggaacgggcacctcgctcaacggtacatcacgagggagttccgatctcacatcggccagaaactgctaccaacccttgttggagaacccaatggtcagtgagtctgatttttccaaggacgtggcagtgcaggttctgcctctggacaagatagaggagaacaataaacagaaggctaacgacatttttatctcacagtacaccatgggacaaaaagacgccctccgtaccgttttgaagcaaaaagcccaaagtatgcctgtgtttaaagaggttaaggtgcatctgctcgaggacgctggcattgaaaaggacgccgtgacacaagagacacgcattagcccctctggtatcgattcggctactaccgtggcagcggctactgcggctgctatagcgactgccgccccactaattaaggtccaatcagatttggaagcgaaggtaaatagcgtaacagagcttctgagcaagctccaggagaccgacaaacatcttcagcgggtgacagagcagcaaacctcaatacagcggaagcaggagaagctgcattgtcatgatcacgagaaacagatgaacgtgtttatggagcagcacatcaggcacctcgagaaactgcaacagcagcagatagacattcagacacatttcatcagcgccgctcttaagacttcttcctttcagcctgtgagcatgccaagttcccgggccgttgaaaaatattctgtgaaacccgaacatccaaacctgggatcctgtaacccgtccttatacaacacttttgcctcgaagcaggcccccctgaaagaagtcgaggatactagtttcgacaaacagaagtctccattggaaactcccgccccgcgaaggttcgctcctgtgcctgtctccagggatgacgaactctccaagagagagaatctcctggaggagaaggagaacatggaagtgagctgccaccgcggtaacgttcgcctcctcgagcagattcttaataacaacgacagcctcacacgcaagagtgaatctagtaacactacgagtctcaccagatccaagatcggttggacacccgaaaagaccaacagattcccaagttgtgaagaactggagaccacgaaagtcacaatgcagaagtctgacgacgtcctacacgacttagggcagaaggaaaaagagaccaactctatggtgcagccgaaggaatcgttgtctatgctcaaactccccgatctcccgcagaattcggtgaaattacagacaaccaacaccacacgctccgtgcttaaagacgccgaaaaaatcttgcgaggggtgcagaataacaaaaaggtgcttgaggagaatctggaagccattatccgcgctaaggatggggcagccatgtattccttgataaatgcgctctccaccaaccgcgagatgagtgagaagatcagaattcgaaaaaccgtggacgaatggatcaagactatttcggcggagattcaagacgagctcagccggaccgattacgagcagaagaggtttgaccaaaaaaaccaacgcacaaaaaagggccagaatatgacaaaggacatcaggacgaacacgcaggacaagaccgtcaataagtccgtcattccaagaaagcactcacaaaaacagattgaggaacactttaggaatctccctatgagaggaatgccagcgtccagcctgcagaaggaacgtaaggaaggactcctcaaggctactactgtgattcaggatgaggactacatgctccaagtgtatggaaagcctgtgtaccagggacatagaagcacattaaaaaaggggccgtatctgagatttaattcacctagcccaaaatcccgccctcagagaccgaaggtcatagagagggtgaaaggcactaaggtcaagtctatcaggactcagacagatttttacgccacaaaaccaaagaagatggactctaagatgaagcatagtgtgcctgtccttccccacggcgatcaacagtacttgttctcgccaagtagagagatgccgacattttccggtacgttggaaggccacttgattcctatggcaattctcctgggccaaacacagtcaaacagcgatacgatgccgccagctggcgtgatagttagtaagccacacccagtaaccgttacaacatctatccctccctcatcccgcaaggtagaaacaggcgttaaaaagcccaacatcgctattgttgaaatgaagtccgaaaaaaaagaccctcctcagctgaccgtacaagtcttaccttctgtagatattgacagcatctcaaactcaagcgcagacgtactgtcaccactctcctcgcctaaggaagccagcctcccaccggtgcaaacctggatcaagactccagagattatgaaagtggatgaggaggaagtaaaattcccaggaaccaattttgatgaaatcatcgatgttattcaggaggaggaaaagtgcgatgaaataccagacagcgagcccatcctcgagttcaatagatcagtcaaggcagactccactaagtacaatggcccccctttcccccctgtagccagtacttttcagcccactgccgacatcttggacaaggttattgagcgaaaagagaccctggaaaactcccttatccagtgggttgagcaggaaattatgagtcggattataagcggactttttcctgtccaacagcaaattgccccttcgatctctgtgtccgtgagtgagacctcagagcctctaactagcgacattgtggaaggaacgagtagcggagcacttcaattgtttgtggacgccggtgttccagtgaactctaacgttattaaacactttgtgaatgaggcgctggctgagaccatagctgttatgctgggggacagagaagccaagaagcagggcccagtggccactggtgtgtctggagatgcaagcacgaacgaaacctacctcccggcccgcgtctgcacaccactcccaacgccgcagccaactccaccatgcagtccttcttcacctgctaaggagtgcgtgctcgtaaaaactcctgacagcagcccctgcgattctgatcacgatatggcattccctgttaaagagatttgcgccgagaaaggcgatgacatgcctgcgattatgctggtcaatacgcccacagtgacaccaacaacaacgccgccaccagccgcagccgtatttaccccaacgctgtctgacatctcaatcgataaacttaaggtgtcttcacccgaacttcctaaaccatggggcgacggcgacttgcctcttgaggaagaaaatcctaactccccccaggaagagctccatcccagggccatcgtcatgtctgtggccaaggatgaggaaccagagtcaatggatttcccggctcagcctcctccacccgagcctgttccgtttatgccattccctgccggaacgaaagcacctagcccctctcagatgccaggttcagactcttctacgctggagagtactttatctgtgacagtcactgagacagaaacacttgacaaacccatatctgagggcgagatcttgttcagttgtggacaaaaactcgctccaaaaatcttagaagacatcgggctgtacctaacaaacctcaacgattcactgtcgtctacattgcatgatgccgttgagatggaagatgaccctccctctgagggacaggttattcggatgagtcacaaaaagtttcacgccgacgccatcttgagcttcgcaaagcagaaccaggagagcgccgtgtcgcaacaggctgtgtaccactctgaggatctggagaattctgtgggagagttaagcgaagggcaacggccacagctcaccgcagccgccgagaacattttaatggggcactcactgtatatgcaacctccagtaaccaacacacaaagcctggatcagcaatgcgaccctaaacctctgtcccggcagttcgataccgtatcaggcagcatttacgaagattcttgcgcatcccacggacctatgtcactgggggagctagaactggagccaaactccaaactggtcctcccaacaaccttgctaaccgcacaagagaatgatgtcaacctgcctgttgcagcagaagatttctcccagtaccaacttaagcaaaaccaggacgtgaagcaggtcgaacacaaacctagccagtcttaccttagagtcagaaataaatcggatatcgcaccttcccagcagcaggtttcgcccggggatatggatagaacacagatcgagttaaatccgtatctaacatgcgtcttctcggggggtaaagcggtgccgctgtccgcctcgcagatgccgccggcaaaaatgagtgtgatgctgccgagtgtcaacctggaagactgttctcagagcttatccctcagcacaatgcaagaggacatggagtctagcggagcggatacattctag

SEQ ID NO: 18145 - DNA, 2334 bp, synthetic construct
  source 1..2334: mol_type = other DNA; note = Synthetic coding sequence
atgtctgcccaaaccagccctgccgaaaaaggcctgaatccagggctgatgtgccaggaatcctacgcctgttcagggactgacgaggctatatttgaatgcgacgagtgttgttccctgcagtgcctcaggtgcgaagaggagctgcatagacaggagcggctgcgcaatcacgagaggattcggctgaagccaggacacgttccctattgtgacctgtgtaagggactgagcggtcatctgcctggtgtgcgccagcgcgcaattgtgcgctgtcagacctgtaaaatcaatctgtgtctggaatgtcagaagcgaacgcactccggcggaaacaagaggaggcatcccgttacggtgtacaacgtgtccaacttgcaggaatccttggaggcggaagagatggacgaagaaaccaagagaaaaaagatgacagaaaaagtcgtgtcctttctgctcgtggacgaaaatgaggagattcaggtcaccaacgaagaagattttatccgcaaactcgattgcaaaccggaccagcacctaaaagtagtctctatcttcgggaatactggagatggaaaaagtcatactctcaatcacacttttttctatggtcgagaggtgtttaaaacctctccgacacaagagagctgcacagtcggcgtttgggctgcgtatgaccccgtccacaaggtggctgtcatcgatacagagggcctcttaggggccaccgtcaacctgtcccagagaacacggctcctgctgaaggtgcttgctatcagcgatttagtcatttaccggacacacgctgaccgactccataatgacctattcaagtttctgggggatgctagcgaggcttacttgaaacactttacgaaagaattaaaggctacaaccgctaggtgcgggttagatgtccctctaagcactcttggtccagctgttatcatcttccacgaaacagttcatacccaattgttgggcagcgatcacccctctgaggtgcccgagaaattgatccaggaccgcttccgaaagctcggacggtttccagaggccttcagctcaattcactataaggggacccggacttataatccacctacggatttcagcggccttaggcgcgccctggagcagctgctggaaaataatactacacgatcacctcgccacccgggtgtcatctttaaggctttaaaggccctgtccgataggttctccggggaaattccagacgatcagatggctcattcatcctttttcccagacgaatacttcacgtgcagcagcctctgtctctcctgcggggtaggttgcaagaagagcatgaaccacggaaaagagggcgtccctcatgaggcgaaatctcgttgtagatactcccatcagtatgacaaccgtgtgtatacatgtaaagcatgttacgagcggggagaggaagtcagcgttgttccaaagaccagcgcatcaactgactccccttggatgggactggcaaaatacgcctggtccggttatgtcattgagtgtcccaattgtggggtggtctatagatcccggcagtactggttcggcaaccaggatccagtagacaccgtcgtgagaacagagatcgtgcatgtatggcccggtacagatggatttctcaaggataacaacaacgcagcccagcgcctcctcgacgggatgaattttatggcccagagtgtgagcgagctgtccctagggcccaccaaggcagtgacgtcctggctaacagaccagatcgcacccgcttactggcgaccgaatagccagatactcagttgcaacaagtgtgcgacttcatttaaggataacgatacaaagcatcactgccgcgcttgtggagaaggcttttgtgattcctgcagttcaaagactcggcccgtgcctgaacgaggttggggccccgcccccgttagagtgtgtgataattgctacgaagcccggaacgtgcagttggctgtgactgaggcacaggtagatgacgagggcggaaccctgatcgccagaaaggttggggaggcagttcaaaataccctgggggcagttgtgacggccatagacattccattagggttggtcaaagatgcggcacgcccagcctactgggtccccgatcatgagattctgcactgccacaattgtaggaaggagtttagcattaaactcagcaaacatcattgtcgggcctgtggccaggggttctgcgacgagtgctcccacgatcgacgagctgtgccttccagaggatgggatcatcccgtaagggtgtgtttcaattgtaacaaaaagccgggagacctctag

SEQ ID NO: 18146 - DNA, 867 bp, synthetic construct
  source 1..867: mol_type = other DNA; note = Synthetic coding sequence
atggagaaactctctgccctgcaggaacagaaaggggagctgcggaagcggctaagctacactacccataagttggagaagctggagaccgagttcgacagcacccgtcattacctggagatcgagctccggagagcacaagaagagttggagaaggtgacagaaaagctgaggagaatccagagcaactatatggccttacagcgcattaatcaggaacttgaagacaaactctatcgaatgggacagcattacgaggaagagaagagagctctgtctcatgagatcgtcgccctgaatagtcatctcctggaagcaaaggtgacaattgataaactctccgaggacaacgagctctaccgcaaagactgtaatctggccgcccaacttctccaatgttcccagacctatggacgggtacacaaggtgtcggagctgccgagcgactttcaggagcgggtcagcctccacatggaaaaacacggatgttccctgccttctccactctgccatcccgcctatgcagatagcgtgccaacgtgcgttatcgctaaagtgctggaaaaaccagaccccgctagcttgagctccagactgtcagacgcctctgcgagggacttagctttctgcgacggcgtggaaaaaccaggaccaaggcccccttacaaaggagatatctactgttcagacacagctctgtactgtcccgaggaacgccgtagggacagaaggccttcagtcgacgcgcctgtcactgatgtgggcttcctgcgcgcacagaactctaccgattccgctgccgaggaagaagaagaagctgaggctgccgcttttcctgctgggtttcagcatgaggctttcccatag

SEQ ID NO: 18147 - DNA, 1263 bp, synthetic construct
  source 1..1263: mol_type = other DNA; note = Synthetic coding sequence
tgaacccaagccatggctcttgagacccccacccccgggccccctcgggaagggcagtctcctgcctcccaggccggtacccaacatccccccgcacaagcaactgcacattctcagtcaagccccgagttcaagggctcacttgcgtccctgagcgacagcctaggcgtaagtgtcatggccacggaccaggactcctacagcacctcatcaactgaggaagagctggaacagttttcctctccttcagtgaaaaagaagccaagcatgattcttggcaaagctcggcataggctatccttcgcaagcttctcttctatgtttcatgcgttcctaagcaacaacaggaagttgtacaaaaaggtggtggagctcgcccaggacaaaggttcctattttggaagtctggtccaggattacaaggtgtattctcttgagatgatggccaggcagacctcatccacagagatgcttcaggaaattagaaccatgatgacccagctgaaatcttacctgctgcaaagcaccgaactgaaggccctagtggaccccgccctgcactccgaggaggagttagaggcaattgtggaatctgctctgtataagtgtgtgctcaagccactgaaagaggccatcaatagctgtctgcaccaaatccatagtaaagacggtagcttacaacagctcaaggaaaatcagctggtgattctggctaccacaaccaccgaccttggagtaaccacaagtgttcccgaggttcctatgatggaaaagatcctccagaagttcacttccatgcataaggcttacagccccgagaagaagatctctattctgctgaagacatgcaagcttatctatgattcgatggccctaggcaaccctgggaaaccctatggcgctgacgatttcttacccgttctgatgtacgtccttgcacggtcaaatcttaccgaaatgctcttaaacgtggagtacatgatggagcttatggatcctgcgctgcagctgggtgagggtagctactacttgaccactacgtacggagctctcgagcacattaagtcctacgacaaaatcactgtgaccaggcagttgagtgtggaggtgcaagattccattcataggtgggaacgacgtagaacgctcaacaaggcacgggccagtcggagttcagtgcaagtacggcccgaaagcggccgcgggcccgtcggaccctgtccccggcaccacccgtgctgcctgttggccaaggaaccttag

SEQ ID NO: 18148 - DNA, 2466 bp, synthetic construct
  source 1..2466: mol_type = other DNA; note = Synthetic coding sequence
atggctggtagtgacgccgagtgggttaccatcgcgaacaacttgctgttcaaatgccatatccaccttcgtattcatgagctccaagattgcgatgccaatgtcttcatcgctctgtaccagtccatcctaggggagaaagttcccgacctgattgtgatcccccgtagtcaggaggacgacgctcacaatgtgcaggccgtcatcgactcattagctctcgactatttgcaagtttccctgtcgcatataaccggagagaatatagtcaaaggagataaggagtccatcaaaaatttgttggagattttcgatggtctcttggaatatctgactgaaaggatctctgaaaccagccacgagaagtctgagactgagcagtattttaaggagagtgaccgcggcgaacgcctcgaagagccagagtcaacaaaagaaagcaaatcctcatggaaacgcgtctctttcggtcggtgtagcctgtcttctgaaatgctggggccatcatgggatggcgacgaggcagagagtactggcgagattattaggctaggcgacacagctcacactttttccctgagaagtaatggcgcccagtgtccgaatgagatgctttcaaagaaagcccttgcttccccaagcagcaagtcccacgaagatatgctctacccaccttcagtattgtcaaagagccgtacttcattcgtggaggacaccgagaccttgtccgtttctggcattcccaacgcgcgaaagctgggcgaaccaatccgagccgccattccacttcacccaccttaccatccctcagagcctcgcgccccatgccctataggcaaggaatatctgcactcttctcattgttcacctgcagtgaattcgaccggggagcatacagaattttccggggatctggacgatggactgtttctgattagtaaactgcctaaaggctcaaagtgggaggtttacccggcccaggtgcagggtccccggacccggaagccccccaagggcaaacggaacgagaatagggcaacagcctcttcatgcaattcaccttttccccaacgccccaggaaaaggctgacagaacaggagctccatgatgtgtctgaaaaattgtctcagcgactctcagaacttgactggatgttaaagtcggcactgggagatcgaattaaagaaaagacagaccacaaggaagaaaataccggcaatgaggaggtggaggatgggacggaagagacactgtcccagcactccgacggcatcgtcgaatatggtcctaagaaaagcaggccgggcctttctatgagaagaaagcccccctacagatctcattctcttagtccgtcacccgtcaacaagcacaaacagtttcacctagagcgcaaacgacagcgaaagccaagagaaaccgacgtgagacagtttcaggcgcaggccttcactgaggcgttcgagagagagctgcggcggcacaaggtgcaggaaaacataggaccccttcgaatccacgagaaggaggaggagacagagaaaatataccggggcgaggctgttcggaagggcaccccggagtgctctcagccctggaagatctatagtagaaagaccacgacacagagcctgcggggcgggctccccaagcctaacaaggcagtccccatgaaggtatccgaacactccctgcttccccttatgctggagcagttcccctttttgtacgtcagtgggcctacgctttcaaagatgtggaaacagcagatagcccaggtggaacaactcaaaaaggaggcttgtcgcgagaaccgatccaaaaaaaagctccaggatgagatcgaagaagccctccggcgacacgatctgctcaccacactcgttaagaaggagtacgaacacaataagaggctgcaggactttaaggactgcatcaggagacagcgcttgacacaatctaagattaaagaaaatcggcagcagattgtgagggccagaaagtactatgatgattaccgggttcaattgtgcgccaaaatgatgcgcatgcggactcgggaagagatgattttcaagaagctcttcgaagaaggcctgaatattcaaaaacaaagacttcgcgatttacgaaactatgctaaagagaaacgcgacgagcagcgcagacggcaccaggatgagctggactctatggaaaactattacaaagaccagttttccttattagccgaagctatctctcaggagcaccaggagttgaaagcaagggaaaaatcccaggcccagaccctgcataaggtcaaaagggaattgcgatcaaagatggagaaagaaatccaacaactgcaggacatgatcacccagaatgatgatgatgtcttttttagagaactggaggctgaacgctttcggtctcgcctacagttggcttcttttcagtactccaaaagcccttcgctgtag

SEQ ID NO: 18149 - DNA, 4560 bp, synthetic construct
  source 1..4560: mol_type = other DNA; note = Synthetic coding sequence
atgcgtatccccgaccaaaaatatgtgactttgaaactcaatgacgtcatcaggttcggatatgactcgaacatgtacgtgcttgagagggtgcagcaccgcgtacctgaggaggcgttgaagcatgagaagtatacatcccagctgcaagtaagtgtgaagggcctggctcctaagcgcagtgaggccttgcccgaacacaccccgtattgtgaagcctcaaatcctcgccccgaaaagggtgaccgaagaccgggaactgaggccgcttcttaccgtacccccttatacggccagccatcctggtggggagaggacgatggttcaaccctcccagatgcccagaggcaaggagaaccttacccagagaggcccaaaggacccgtgcagcaagatggggagctgcacggtttccgagctcctgccgagccgcaggggtgttcatttcgaagagaaccatcctatttcgaaattcctacaaaagaaacgccccagcctagccagccaccagaggtgcctgcccacgagatgcctactaaggacgcggaagccgggggggggggagctgctcctgtggtccagtctcacgccagtttcactatcgagtttgatgactgcagccccggcaaaatgaaaataaaagatcatattaccaagttctcacttcgccagcggcgcccccctggcaaagaggctacccccggagaaatggtctccgccgagaccaaagtcgcagattggcttgtgcagaatgatcctagtttacttcaccgcgtggggccgggcgatgaccgccattccaccaaatccgacctgcccgttcacacacgaacccttaagggacacaagcatgaggatgggactcagtccgacagcgaagaccctttggcgaaagccgcctcagccgccggagttccgctcgaagctagtggtgaacaagtccgccttcagagacagataaaaagggatccacaggaactcttgcacaaccaacaggctttcgttattgagtttttcgatgaggacaccccgaggaagaagagatcccaaagcttcacccactctcccagcggggatccaaaggccgataagcgtagaggcccgacacccgcagatagagatcggccttcagttcccgcccccgtgcaggcgggcggcagaagctcgggaccgcagagagcagggtcactgaagagagagaaaactgaggagagactgggatctccctcacccgcgtcgagaacgccagcccgcccctttggaagcgtcggcagaagaagcagactggcccaggacttcatggcccagtgtttgagagagtctagtccagcagcacggccgagccctgagaaggttcccccggtgctgcccgctccactcacaccgcacggcactagcccggtgggcccaccaacccctccccccgcgccaacagatccccagcttactaaggcaaggaaacaagaagaagatgatagtctaagtgatgcaggcacgtataccatcgagactgaagcacaagacaccgaagtagaggaggctcgtaaaatgattgatcaagtctttggtgttttagaatcaccggagctgtctcgtgctagtagcgccacgtttagaccagttattaggggagatagagatgaaagtgacgatggcggggtcgcacagagaatggcgttgctccaggagtttgcttcaagaccccttggggccgccccccaggccgagcaccaggggctgccggttccgggcagcccaggcggacagaagtgggtctcaaggtgggcctctctcgctgacagctattcggacccaggactgactgaggatggactgggccggaggggcggagaaccagagggaagtctgcctgtccgtatgagaaggcgccttccacagctgcctagcgagcgtgcagactcgcctgctggccctgagtcttcccgcaggtccggtccaggccccccggagctagattctgagcagccatcccgcttattcgggcaagaggagctggacccggatagcctcagtgatgcttctggctctgacggcgggcggggaccagagcccggagtagagccacaggacagtaggcggcgttcaccacaggagggccccacatggtccaggggacgtcggtctccgcgtgcacctggtgaaccaacaccagccagtttttttataggggaccagaacggtgatgctgtgctgtctaggaaacctttggctgctcccggcgatggggaaggcttagggcagactgcccaaccaagtcctccagctagagatggagtctatgtctccgccaacgggagaatggtaattcaactacgccctggcagatcacccgagcccgacggaccggctcctgcctttctgcgccaggaatcttttaccaaggaacccgcgtcaggaccgccagcaccaggcaaacccccacatatctcgagtcaccctttactgcaagatctggcagccacgcgtgccgctaggatggactttcattcccaggatacacacttaatactcaaagaaaccgaaaccgccttggccgcccttgaggcccgcttgctgagcaactctgtggacgccgagtgcgaaggcgggagtaccccccggccaccagaggacgccctgagcggcgactctgacgtagatactgcaagtactgtgagcctccgctccggaaaaagcggccctagccctaccacgccccaacccctgcgcgctcaaaaagagatgtcaccaagcccacccgccgcgcaggaccccggcgggaccgcacttgtgtcggcaagggagcagagttcggaacgacagcaccacccattgggccccactgacatggggcggggggagcccgtgaggagaagcgctatacgcaggggtcaccgacccagggggtccctggattggccatctgaggaacgcgggccagtgctagcacacctgcccagctccgatgttatggcttcgaaccatgagacacctgaggccacaggcgctggcaggttaggttcccggcggaaacccgccgcccctccgccctctcctgccgcaagggaagaacagtcccgctccagcgctagctctcagaaggggcctcaggccctcaccaggagtaactcactctcaacaccacgtccaacccgcgctagtcggctgaggagagcgagattgggagatgccagcgacacagaggccgccgacggcgaaagaggtagcttgggaaaccctgaacctgtaggaagacccgcagccgaacaagcaaagaaactgtcaaggctggacatattggccatgcccaggaagagggccggcagcttcaccggcacatctgatcccgaagcagcccccgctcgcacaagcttctcagggaggagtgttgagctgtgttgcgcaagccgtaaaccaacaatggcagaggctagagcagtcagcaggaaggcggccaacacagccacaacaacgggccccaggcagcctttcagtagggctcgctcaggatccgcccgatacacatccaacacccgccggaggcagcaaggatccgattacactagcacatctgaagaagagtacgggtccaggcatggttcacctaagcatacacgcagccacacttcaaccgccacgcagaccccacgggctggttcctcctcacgtgcgcggagccgcgctccagggccacgagacaccgatgatgacgaagaagaaccggatccctacggatttatcgtgcaaacggctgagattgcggaaattgcccgcttgtcccagacattggtaaaagatgtggccattttggctcaggagatccacgatgtggccggtgacggtgacactcttggctcatccgagcctgcccacagcgcttccctgtcaaatatgccctccacccccgcctccactatttccgcacgggaggagctggtgcagcgtatcccagaagcttcattgaattttcagaaagtgccaccgggatccctgaactcccgggacttcgaccaaaatatgaacgactcatgcgaagatgcgcttgcaaataagacgcggcctaggaaccgggaggaggtgatctttgacaacttgatgctgaacccagtgtcccagctgtcacaagcaatacgtgagaataccgaacacttggctgagaagatgaagattttgttccagaacaccggtcgagcttgggaggatttagaggcacggatcaatgcggaaaatgaagtacctatcctcaagacaagtaacaaagaaattagcagcattctgaaggaactgaggcgcgtgcagaaacagctagaggtcatcaacgctatcgttgacccttccgggtccctggacctcctcactggcaaccgaagcctggcgtcttctgcacagcctggactgggaaaggggagagtggccgcccagagcccacccagtcccgcatcagccgaagccctgttgcccgccctgccgctgcgcaactttccgcagcgagcatcgtgtgggccaccaagcctgcccgaccccaccttcctgccagacgctgagagattcctgatttag

SEQ ID NO: 18150 - DNA, 378 bp, synthetic construct
  source 1..378: mol_type = other DNA; note = Synthetic coding sequence
atgccctcagaaaaaaccttcaaacaacgtcgcacattcgagcaaagggtcgaagacgtgcgtctgataagggaacagcaccctacaaaaatacctgtcataatcgagaggtacaagggcgaaaaacaactgcccgtattggacaaaactaaatttctggtccccgaccacgtaaacatgtcagagctgatcaaaatcatccgccgacggctccaattgaacgcaaaccaggctttctttcttctggtgaatggccactccatggtgagcgtgagcaccccgatctctgaagtgtatgagagtgaaaaagacgaggatggtttcctgtatatggtgtgcgcatctcaggaaacttttggtatgaaactcagtgtatag

SEQ ID NO: 18151 - DNA, 3525 bp, synthetic construct
  source 1..3525: mol_type = other DNA; note = Synthetic coding sequence
atgccactcccattcggcctcaaactgaagcggactaggcgctataccgtgtcctccaagagctgcctagttgccagaatacagctcttgaacaatgaattcgttgaatttacactgtcagtggaaagcaccgggcaggagagcctggaggctgtggctcagagactggaactgagagaggtgacttacttttccttatggtactacaataaacaaaaccagaggcgctgggtcgacctcgagaagccactcaagaagcagctggacaagtacgcactggaacccaccgtgtattttggagtggtgttttatgtcccttctgtgagccagcttcagcaggaaattacccgctatcagtactacctgcagctgaaaaaggacatcctcgaagggagcattccatgtacgctcgagcaagcaatccagctggccggattagcagttcaggccgactttggtgattttgatcagtacgaatctcaagacttcctgcagaagtttgctttgttccccgtgggatggctacaggatgaaaaagtcctggaagaggcaacacagaaagtggccctgctccaccagaagtacaggggtctgacagctccagatgcagaaatgctgtacatgcaggaagtggagagaatggatggatacggcgaggaaagttaccccgccaaagacagccagggtagcgacatctccatcggcgcttgcttggagggcattttcgtaaagcacaagaacggaagacaccctgttgtcttcaggtggcacgatatcgccaatatgtcccacaataagagctttttcgcattggaactcgcaaataaagaagaaactatccagttccagaccgaggatatggaaactgccaaatacatctggagactgtgtgttgctaggcataaattctaccggctcaatcaatgtaaccttcagacgcagactgtgactgtcaatcctattaggcgacgctcctcttcccggatgtcacttcctaaacctcagccttatgtcatgccaccaccaccccagttgcattacaacgggcactatacagagccatatgcttctagccaggataaccttttcgtgccaaaccagaatgggtattactgtcactcccagacctccttggacagagcccagatagatctgaacgggcggatacggaatgggtcagtatattcagcccattcaaccaatagtttaaacaatcctcagccttatctgcaaccgagcccaatgtccagcaacccctccattacaggatccgacgttatgcgccccgactaccttccatctcataggcattcagccgtcatccccccaagctacagaccaactccagattatgagactgtgatgaagcagttgaatcgcggattggtccatgcggaacgacagagccatagtctccgcaatctgaacattggttccagctatgcttactctcgccccgctgcactggtgtacagtcagcctgaaattcgtgagcacgcccagctgccaagtcccgctgccgcacattgtcctttcagtctgagctattcctttcacagtccttcaccctacccttatcccgctgagaggcgccccgtggttggcgctgtttccgtacccgaattgaccaatgcccagcttcaggcccaggactaccctagccccaatattatgaggacacaagtttaccggcccccccctccatatcctccgccacgccccgccaattctacacctgatctgagccggcatctgtatatcagctcttccaaccccgatctgatcacaagacgtgtccaccatagtgttcagaccttccaggaggattcacttccggtggcccattcacttcaggaagtctcagaaccgctgactgccgctagacacgcccagctgcataagcgcaattccatagaggtggctggactgtcacacggattggagggcttgaggctaaaggaacgcaccctcagtgcctccgcggcggaggtggccccgcgcgcagtttctgtggggagtcaacccagtgtgttcactgaaaggacacagcgcgaagggcctgaggaagcagagggactgcgatatgggcataagaagtcactgtcagatgccaccatgttaatccactctagcgaagaagaagaggacgaagatttcgaggaggaatctggtgccagagccccaccagctcgagctcgcgagccaaggcctggactagcacaggacccacccggctgtcccagagtgctgctggcgggtccacttcatatccttgaacccaaggcccacgtgccagacgcggagaagcgcatgatggactcctcaccagtgcggactaccgcagaagcgcagcggccttggcgagacggcctgttgatgcctagcatgagcgaaagcgacctcaccacctctggacggtaccgcgcaagacgcgattccctcaagaaaagaccagtttcagacctgttaagcggtaaaaaaaacattgtagagggattacctccactgggtgggatgaagaagacccgggtggacgcaaagaaaattggccctctcaaactcgccgctttgaatggcctgtctttgtcacgagtgccgctccctgacgaggggaaggaggttgccacgcgggctaccaacgatgagaggtgtaagatcctggagcaacgactagaacagggaatggtgtttaccgaatatgagagaattttaaaaaagcggttagtggacggggagtgttcaactgcccgtttgccagagaatgccgaacggaatcggttccaagatgtgctcccatacgatgacgtgcgtgtggagctggtgccgacaaaggagaacaataccggttacataaacgctagccacataaaagtgtctgtcagcggtatagagtgggactatattgccacccagggaccgctccagaatacatgtcaggacttttggcagatggtttgggagcagggaattgccattattgcaatggtgactgcagaggaggagggggggagagaaaagagcttcaggtattggcctcgactgggtagcaggcacaataccgtcacatatgggagatttaagattaccactagattcagaaccgatagtggctgttatgccactacagggcttaagatgaagcacttgttaacgggacaggagagaaccgtttggcatctacagtataccgattggcccgagcacggatgccctgaggatcttaagggtttcttatcatatctagaagaaattcagtccgtccgtaggcacaccaatagtaccagcgacccacagtctcccaaccctcccctgcttgttcattgttccgccggagtgggtcggaccggcgttgtcatcctgtctgagattatgattgcgtgcctcgagcacaatgaggtgctcgatattcctagagtgctcgatatgctgaggcagcagcgcatgatgctagtgcagaccctctgccagtatacttttgtctaccgtgtgctaattcagtttctgaagtcttctcggctgatctag

SEQ ID NO: 18152 - DNA, 1245 bp, synthetic construct
  source 1..1245: mol_type = other DNA; note = Synthetic coding sequence
atgcaaactttcctgaaaggcaagcgggtgggatattggctgtccgagaagaaaatcaagaagttgaacttccaggctttcgcagaactgtgtagaaagcgcggaatggaggttgttcagctgaacctatctaggcccattgaggaacaaggacccttagatgttatcattcacaagctgacagacgtcatactggaagccgaccagaacgacagccagtccctcgaattggtccacaggtttcaagagtatattgacgcccaccccgagaccattgtgttggaccctttaccggccattaggacattgctggatcgctccaagtcttatgaactaatccgaaaaatagaggcgtacatggaggatgataggatctgctcccctccatttatggagctgacttctctttgcggcgatgacacaatgcgcctgttagagaaaaatggtctgacttttccatttatatgcaaaactcgggttgctcacggtacaaattctcacgagatggcaatcgtcttcaatcaggaggggctgaacgctattcagcctccctgcgtcgtgcagaatttcatcaaccacaatgcggtactgtacaaagttttcgtggtgggcgagtcatacacagttgtgcagaggccgagtctcaagaatttttcagcaggtacatctgatcgggaatccatcttctttaacagtcacaacgtctcgaagccggagtcaagtagcgtcctgacagagctggacaagatcgagggtgttttcgaacggccctcagacgaagtgatcagggagctcagccgggctctgcgccaggccctcggtgtgagcctgttcggaattgatattatcattaacaaccaaacaggacaacacgcagtgattgacattaacgccttccctgggtacgaaggggtttctgagttctttacagacctattaaatcacatcgccacagtgctccaaggccagagcaccgccatggcagctaccggcgacgtggcactgctgcgacattctaaactactggcggagccagcaggcggactggttggcgagagaacatgcagcgcttctcccggttgttgtggatctatgatgggacaggacgctccatggaaagccgaggccgacgctggcggaaccgccaagctaccccaccagagactgggctgtaatgctggtgtgagtcccagttttcagcagcactgtgtcgcatctctggccaccaaagcttctagccaatag

SEQ ID NO: 18153 - DNA, 2256 bp, synthetic construct
  source 1..2256: mol_type = other DNA; note = Synthetic coding sequence
atgtcagaagaggagctaaccaaagccatggagggactgggaatggacgaaggtgatggtgagggtaacattcttcccattatgcagtccatcatgcaaaatctgctgtctaaggacgttctttacccatcccttaaagaaattactgagaagtatccagaatggctgcaatcgcaccgcgagtccctgcccccagagcagtttgagaaataccaggaacagcattcagttatgtgtaaaatctgtgagcaattcgaggccgaaacaccgaccgacagtgagaccacacagaaggctcggttcgagatggtattggatctcatgcagcaattacaggatctggggcaccctcccaaggagttggcaggagagatgctcacatggctgtttttctgcggctcacagtgggtgtatggtccttggttaacatacgttggctggctgcagcagaccagcttcaagatgagttccaaagggagttctaccgacggaaggacggacctggccaatggctcactgtccagctcccccgaagagatgagcggagcagaggagggccgagaaacctcgtccggtatagaggtcgaggcctctgacctgagcctaagccttactggggacgacggtgggccaaatcgaacctcaaccgagtcccgcggcacagacacggagtcctcgggagaggataaagactctgacagtatggaggacactggacactattccatcaatgacgagaatagggtgcacgaccgctccgaggaagaggaggaggaggaagaggaggaagaggaggagcagcctagaagaagggtccaacgcaagcgcgctaatcgggaccaggactcgagcgatgacgagagggcattagaggattgggtgtccagtgagacctccgctttgccgagaccacgctggcaggcactccccgccctgcgagagagggagttagggagttctgctcggtttgtgtacgaggcctgtggcgcacgcgtgtttgtccagaggttccgtctgcagcacgggttggagggtcataccggctgcgtgaacaccctgcattttaatcagcgggggacatggctcgcatccggctctgacgatctgaaagtggttgtttgggactgggtccgtcgtcagcccgtgctggacttcgaatcaggtcacaagtctaacgtgttccaggccaagttcctgccaaatagtggggattccacgctcgccatgtgtgcaagggacggccaggttcgcgtagctgaactgtccgcaacccaatgctgcaagaatacaaagagggtggcacagcacaagggggcctctcataaactggccctggagcccgactccccttgtaccttcctgagcgccggtgaggatgccgtggtgttcacaattgatctcagacaggatcgacccgcatccaagctggtagtgacaaaggaaaaggagaagaaggtaggtttgtacaccatctatgtgaatcctgccaatactcatcagtttgctgtgggcggccgagatcaattcgtcaggatctacgaccaacggaagatcgacgagaatgagaacaacggtgtgctcaaaaagttctgcccccatcacttggtcaacagtgagagcaaggccaatattacgtgtctggtgtactcccacgatgggaccgaactcctggcttcctacaacgatgaggacatttacctgttcaatagttcccacagcgacggagcccaatatgtgaaaaggtacaagggccacaggaataatgccaccgtcaaaggagtaaatttctacggacccaagtccgaattcgtcgtgagcggctccgactgcgggcacatctttctgtgggagaagtcttcttgtcagattatccagtttatggagggggacaaaggtggtgtcgtcaactgtctagaacctcacccacatttgccagttctggccacatcggggttggatcacgacgttaagatatgggcgcctacggcagaggctagtaccgaactaacaggcctgaaggacgtgattaagaagaacaagagggagcgagacgaggactccctacatcaaacagacctgttcgattctcatatgctctggtttcttatgcatcatctacggcagcgaaggcatcataggcgttggagagagccgggcgtaggagcaactgacgctgattctgacgaaagtccttctagctctgatacttccgacgaagaggaaggccctgaccgcgtccaatgcatgcctagttag

SEQ ID NO: 18154 - DNA, 1056 bp, synthetic construct
  source 1..1056: mol_type = other DNA; note = Synthetic coding sequence
atgaccctgcgactcctcgaagattggtgtagaggaatggatatgaaccccagaaaagcactactaatcgccggtatcagccagtcttgtagtgtcgccgaaatcgaagaagctctgcaggccggattggctcctctgggggagtataggctcctgggccggatgtttaggcgggatgagaatcggaaagtggccctggtcggactaacagccgagacaagtcacgccctggttcctaaggaaattcccgggaagggcgggatttggcgcgtgatatttaaaccacctgacccggataacacattcctgagccggttaaacgaatttcttgccggagaggggatgacagtcggagaattaagcagagcccttggtcatgaaaatggatccctggacccagagcaaggcatgatccctgaaatgtgggcacccatgctcgctcaggcgctggaagcactgcagccggccctgcaatgcctgaaatataaaaagcttcgtgtgttttctggccgcgagagcccagaaccaggcgaagaagaattcggaaggtggatgtttcatactacacagatgatcaaagcctggcaggtgcccgatgtcgagaaaagaagacggctgctggaatctctgcggggtcctgccttggatgtgatccgggtgctaaaaatcaataatcccctgataaccgtggacgaatgcctgcaggcattagaagaggtgttcggcgtcactgacaaccctcgggaactacaggttaaatatttaacaacttaccaaaaggatgaggagaagctgagtgcttatgtactgcgtctggaacccctcctgcagaaactggtacaaaggggagccattgagcgggacgctgtgaatcaggctaggctcgatcaggtgatcgcgggggcagtgcataagaccatccgacgggaacttaacctgcccgaagatggccctgcacccgggttccttcaacttttggttcttattaaggactacgaggcagcagaagaagaagaggcattacttcaagccatactagaggggaacttcacatag

SEQ ID NO: 18155 - DNA, 2394 bp, synthetic construct
  source 1..2394: mol_type = other DNA; note = Synthetic coding sequence
atggctgtgcagggaagccaacgcaggctcttgggctccctaaacagtacaccaaccgcgattcctcaacttggactggcggccaatcagaccggcgcacggtgcttggaggtgagcattagcgatggtctgtttctcagtctgggcctggtgagtctggtcgaaaacgctctggtggtggctactatcgctaagaacagaaatctgcatagcccaatgtattgcttcatctgctgtctggccctgtccgatctcttggtgtcagggtctaacgttctggagaccgctgtgattctgctgctggaggctggcgccctggtcgccagggcagccgtcttgcagcagttagataatgtgatcgatgttattacatgctcaagtatgttgagctcattgtgcttcctgggagccatcgccgtcgatcgctacattagcatattttacgccctgagataccatagtatcgttaccttgcccagagcaagacgagcagtggctgccatttgggtggcatctgttgtgtttagtaccttattcatcgcttattacgaccacgtggccgtgctgctttgcctggttgtttttttcctagccatgctggtcctgatggcagtcttgtacgtgcacatgctagcacgcgcttgccagcacgcccagggtattgcccggcttcacaagaggcagcgacctgtacatcaagggttcggattgaaaggagccgtgaccttgaccatactccttggcatcttcttcctctgttggggtccattctttttgcacctgaccctgatcgttctgtgcccagaacatcccacttgtggatgcatctttaaaaatttcaacttatttctcgctctgatcatctgcaatgctatcattgacccactgatatatgcatttcattctcaggagctgcggcgcaccctgaaagaggtgcttacttgctcctgcagccaagacagggccctggttagttgggacgttaaaagcttgggaggctcagtgtgtcaggagctgttgccacagcagccacaggagaagggactgtgtgaccagaaggcgtcctctacggccttacagaggctacttcagaaggaattttgggaggtgatctctgacgagcacgggatagatccttcaggaaattatgtgggcgactcggatcttcagctggagcgcatctccgtgtattacaatgaagcaagctcacacaagtacgtgcctagggcgatcctggtggacctagagccaggaacaatggacagtgtgcggagtggtgctttcgggcacctcttccgaccagataatttcatctttgggcagagcggagctggaaataattgggcaaagggccattacacagagggggctgagctggtggactccgtcctggacgtcgtcagaaaggagtgtgagaactgcgattgtctgcagggttttcagttgactcactccttggggggcggaactggcagtggaatgggaactctgctcatcagtaaggtgagggaggaatatccagatcggatcatgaacacgtttagtgtggtcccaagccccaaagtgtctgacacagttgtggagccctacaacgccaccctgtctatccaccagctcgtggaaaacactgacgaaacctattgcatcgataacgaggccctctacgacatatgttttcgaacactaaagctggccaccccaacctatggcgacctcaatcatctggtaagcgccaccatgtccggagtcacgaccagcctgaggtttcctgggcagcttaacgccgatctaaggaagctcgcagtcaatatggtgccattcccacggttacatttctttatgcccggatttgcccctctcaccgcccgcggttcacagcagtatcgcgccttgaccgtgccagagctgacccaacagatgttcgacgccaaaaacatgatggccgcatgtgacccccggcacggaagatatctgacggtcgccaccgtattcaggggccggatgtccatgaaggaagtggatgagcagatgctggctattcaaagcaaaaattccagctactttgtcgaatggataccaaataacgtgaaggtcgccgtgtgcgatattccacccagaggactgaaaatgagctcaacatttattggcaatagcaccgcgatccaggaactgttcaagcgaattagcgaacagtttacagccatgttccggaggaaggcattcctgcactggtacactggggaaggcatggatgaaatggagttcacagaagccgaaagcaatatgaatgacctggtctcagagtatcagcaatatcaggacgcaacagcagaggaggaaggagagatgtacgaggatgacgaagaggaaagcgaggcccagggaccaaaatag

SEQ ID NO: 18156 - DNA, 99 bp, synthetic construct
  source 1..99: mol_type = other DNA; note = Synthetic coding sequence
atggccgagtcctcctccgaatcagatcatttcaggtgccgagaccgtctttccccatgggctgcccgaagcacacataggggaactcggtctctgtag

SEQ ID NO: 18157 - DNA, 453 bp, synthetic construct
  source 1..453: mol_type = other DNA; note = Synthetic coding sequence
atgacagacaccagacgaagggtaaaagtgtacactctgaatgaggaccgccaatgggacgaccggggcaccggccacgttagctcaggttatgtcgaacgtctgaagggcatgtccctcttggtgagggccgaatccgacggatccctgctattagaatccaagatcaaccccaataccgcttaccagaagcagcaggacactttgattgtctggagcgaggccgaaaactacgacctggccctgtcctttcaagagaaggccggctgtgacgaaatctgggagaagatttgtcaggtacagggtaaggatccaagcgtggatattacccaggatttggttgacgagtctgaggaggaacgcttcgacgacatgtcttcaccaggtctggagctccctagctgtgaactgagccgactggaggagatcgctgagctcgtggcctccagctag

SEQ ID NO: 18158 - DNA, 504 bp, synthetic construct
  source 1..504: mol_type = other DNA; note = Synthetic coding sequence
atggactggaaggaagtgctcaggcgccgactggccacacctaacacctgccccaacaaaaagaagagcgagcaggaattaaaagatgaggaaatggacctgtttactaaatattactcagagtggaagggaggtcggaaaaatactaatgagttttataaaaccataccccgcttttattatcgcttaccagccgaagacgaggttctcttacagaagctaagagaggagagtcgggccgtgttcctgcagagaaagtcccgggaacttctggacaatgaggagcttcaaaatctatggttcttgctcgacaaacatcagaccccgcccatgatcggtgaggaggccatgatcaactatgaaaactttctgaaagtgggagagaaagctggggctaagtgtaaacaattcttcaccgccaaagtgtttgcaaaactgctccatacggattcctatgggcgcattagcataatgcagttctttaactatgtgatgcgaaagtag

SEQ ID NO: 18159 - DNA, 507 bp, synthetic construct
  source 1..507: mol_type = other DNA; note = Synthetic coding sequence
atgcagacctttcttaagggtaaacgtgtgggctattggctgagcgagaagaaaatcaaaaagctgaacttccaggctttcgcggaattgtgtaggaaacgaggaatggaagtagtacagctgaatctgtcccggcccatcgaggagcagggaccactggacgtaattattcataaacttaccgatgtaattttagaagccgatcagaatgactctcagtcactcgaactcgtacacaggttccaggagtatatcgatgcccacccagagaccatcgtacttgacccgttgccggcgatcagaactctgcttgacaggtcaaagagctacgagctgatacgcaaaatcgaggcgtatatggaggatgatagaatctgctctccacccttcatggagctcacctcgctatgcggtgatgatactatgagacttctagagaaaaacggacttaccttcccattcatatgcaaaactagggtggcccacggtaccaactcccacgagtag

SEQ ID NO: 18160 - DNA, 822 bp, synthetic construct
  source 1..822: mol_type = other DNA; note = Synthetic coding sequence
atgccggggctctcttgccgtttctatcaacacaagttcccagaggttgaagacgtggtgatggtgaacgtgaggtccattgctgaaatgggggcatacgtgagcctgctggaatataacaacatcgaaggtatgatacttctgagcgagcttagcaggagacgcatacggtcaatcaataaattaatccgcattggcaggaatgaatgtgtagttgtgatccgggtggacaaagaaaaagggtacatcgatctgtcaaagcgcagagtaagtccggaggaggctataaagtgtgaggataagttcactaaatcaaagactgtatactctatcctcaggcacgttgctgaggtgttggaatataccaaggacgaacaactggagagtctctttcagcgcacagcttgggtgtttgacgataagtacaagaggcccggctacggggcttatgacgccttcaaacacgctgtatcagatcctagcatccttgacagcctagaccttaacgaagacgagcgagaagtcctcataaataacattaacagacgtctgacccctcaagcagtgaagatccgggccgacattgaggtagcctgctacggctacgaaggaatcgacgcagtcaaagaagcgctaagagccggcctaaattgttctacagaaaacatgcccataaagatcaatcttattgctcctccaagatatgtgatgaccacaacaactctagaacgaaccgaggggctgtcagttttgtcacaggccatggctgtgatcaaggaaaaaatagaagagaagagaggagtttttaatgttcaaatgtag

SEQ ID NO: 18161 - DNA, 2757 bp, synthetic construct
  source 1..2757: mol_type = other DNA; note = Synthetic coding sequence
tgacggactaattccagatttgtcaaggtggttctcatgagcgcaaccatcagttgcaaagagtttgcggattattttgctgttccagtccagaataagatgaacccagcctatatattcgaagtggagggaaaaccgcacagtgtggaggagtactatctgaacgacctggagcacattcaccactccaagctgagcccccatctgctggaggaacctgtaattaccaaggatatctatgaggtggccgtcagcttaatccagatgttcgacgatctggatatgaaggagtcaggaaacaaggcctggtcaggtgcacaattcgtactggagagaagttccgtgcttgtgtttctcccgggcctgggggagataaattatatgcacgagctcctgacctcacttgtgcacaagcgccttcaggtctaccccctccactctagcgtcgccctagaggaacagaataacgtgtttctgtcccccgtccctggttatagaaaaattatcctgagcacgaatattgcagaatcttccgttaccgttccagatgttaaatacgtgatagatttttgtctcacaaggacgcttgtatgcgacgaggacacaaactatcaaagcttacgactgagttgggcatctaagacgtcatgtaatcagaggaaaggcagggccggacgcgttagccgcggttactgttaccgattggtccacaaggatttctgggacaatagtatccctgaccatgttgtcccagaaatgctgaggtgcccgctcggtagcactatcttgaaggtgaaactcctggacatgggggaacctcgggcccttctcgccacagccctatctccacccggtttatctgatatagaaagaactatactactcctgaaggaagttggtgctctggctgtctccgggcagcgtgaggacgaaaacccacacgacggcgagcttacattcctcggaagagtgctggctcagctccccgtgaatcaacagttaggaaaactgatagttttgggccatgtttttggatgcttggatgaatgccttatcatcgctgcggccctctccctgaaaaacttctttgccatgcccttccgccagcacctcgatggataccgaaataaggtgaacttctctgggtctagcaaaagtgattgtatcgccctggtggaggcatttaagacatggaaggcgtgcaggcagaccggagagctgagataccccaaggacgaactgaattggggcagactcaactacatccagatcaaaaggattcgagaagtggcagagttatatgaggagctgaagactagaatttctcagtttaacatgcacgtggatagtcgacgcccagtgatggatcaggagtatatttacaagcaacgcttcatcttgcaggtggtgttagcaggcgccttctacccaaattactttacgtttggccaacccgacgaagaaatggccgtgcgcgaattagctggcaaggacccgaaaaccaccgtcgtactgaaacatatccccccatatggattcttatattataaacagctgcagagtctgttcagacagtgtggccaggttaagagcatcgtctttgacggggctaaagccttcgtggaatttagccgcaacccaactgagcgctttaagactctgccagcagtctacatggccatcaagatgtcacagctgaaagtctccctggagttgtctgtacactcagcggaggaaattgaggggaaggtgcagggcatgaacgtgtctaaactgcgaaatacccgagtgaatgtcgatttccagaaacaaactgttgatcccatgcaggtgtcatttaacacctccgaccgctcccagaccgtaacggaccttctgctcaccatagacgtgaccgaggtggtagaggtggggcacttttggggttacagaatcgatgagaacaacagcgagattctgaaaaaacttaccgcagaaatcaaccagctcacgctcgtgcctttacccacacaccctcaccctgacctcgtctgtctggccccctttgcagattttgacaaacagcggtacttccgagcgcaggtgctctatgtctcaggtaatagtgccgaagtgtttttcgtggactacggcaacaaatcccacgtggacttgcacctgttgatggagattccttgccaattcctggagctgccatttcaggcactggagttcaagatctgtaaaatgagaccttctgccaagtccctggtctgcggtaaacattggagtgacggtgcgtcccagtggttcgcttccctggtcagtggatgcacattgctggtcaaagtgtttagtgtggtacatagcgtcttacatgtcgatgtttaccagtatagtggtgtccaggacgcaattaatataagggacgttttgatccaacagggatacgcagagctcacagaagaatcttacgaaagcaaagtaaatatacttcgagcagcaataaacaagctggtgtgcgacgggccgaatgggtgtaaatgtctggggccagagcgagtggcgcagctgcaagacatcgcccgacagaagctactgggcctgttttgtcagagtaaacctcgggagaagatcgtccccaaatggcacgaaaaaccatacgaatggaaccaagtggatcctaaactcgttatggagcaggctgatagagaatcttcccgggggaagaacacctttctttaccaactgcacaaactggttgtattaggaacatag

SEQ ID NO: 18162 - DNA, 507 bp, synthetic construct
  source 1..507: mol_type = other DNA; note = Synthetic coding sequence
atggaaaagttgtctgcgctccaagaacaaaagggagagcttcgtaagaggttgagttacactactcataagctggagaaactggaaaccgaattcgatagcacaagacattatctggagatcgagctgcgtagggcacaagaagagcttgagaaggtcacagagaagctgcgccggatccagtcgaattacatggccctccaacgtattaaccaggaactcgaagacaagttgtacaggatgggacagcactacgaggaggaaaaacgcgccctctcccacgaaatcgttgccttgaattcccacctgcttgaagccaaggtaaccatcgacaagttgtcagaagacaatgagctgtataggaaggactgcaacctagccgcgcagctgttgcagtgttctcaaacctatggccgagttcacaaggtttcagaactgccgagcgacttccaagaaagggtgtcactgcacatggagaagcacggttgttctctccccagcccctag

SEQ ID NO: 18163 - DNA, 636 bp, synthetic construct
  source 1..636: mol_type = other DNA; note = Synthetic coding sequence
atggacatgggcaatcaacatccctctatttcacggcttcaggaaattcaaaaagaggtcaagagcgtcgagcagcaggttattggcttctccggcctgtccgacgataaaaactacaagaagctggagcggattctgacaaagcagttgttcgagatcgattccgtagatacagagggcaagggcgatattcagcaggccaggaaacgagcagcacaggagacggagcgcttgctgaaggaactggaacagaatgccaaccatccccatcgaattgaaatccagaacattttcgaggaagcccagtccctggtacgagagaagatcgttcccttctacaacggaggcaactgtgttactgatgagttcgaggaaggaatacaagacatcattctcagattgactcacgttaagactggaggcaagatttcactgaggaaggcaagatatcatacactcaccaaaatctgcgctgtccaggagataatcgaggactgtatgaagaaacagccgagcctcccactcagcgaagatgcgcatccaagcgttgccaagattaacttcgttatgtgtgaggttaacaaggcaaggggagtgctgatcgcgctgctgatgggagttaataataacgaatag

SEQ ID NO: 18164 - DNA, 2985 bp, synthetic construct
  source 1..2985: mol_type = other DNA; note = Synthetic coding sequence
atgtcccagtggacccccgaatacaacgagctctacacattaaaggttgacatgaagtctgagatcccctcagatgctcccaagacacaggaatctttgaaaggtattctgttgcatcccgaacccattggggcagcgaaatcctttccagcaggagtggaaatgattaattccaaagtcggaaatgaattcagtcacctgtgcgacgatagtcagaaacaggagaaggaaatgaatgggaaccagcaggaacaggagaagtcattggttgtgagaaagaagaggaaatcccagcaggcagggcccagttacgtacagaattgcgtcaaagaaaaccaggggattctgggcctgcggcagcatctgggcactccaagtgatgaggacaatgatagttccttctctgactgcctatccagcccgagctccagtttgcattttggagactccgacactgtcacctccgatgaggacaaggaggtaagtgtgagacattcccagacaatccttaatgcgaaaagtagatcccatagtgcacggagtcataaatggccacgcaccgaaacggagagcgtgtcaggactgctgatgaaaagaccttgcctgcacggctcctcactgaggaggctgccatgtcgaaagcgtttcgtgaagaacaacagtagtcagcgcacccagaagcagaaggaacgaattctgatgcagcgcaaaaagcgggaagtgctggcccgccgtaaatatgccctcttacccagctcttcctcatcaagcgagaacgatctgagtagtgaatcttcctcgagcagcagcaccgaaggtgaagaagacctctttgtatctgctagcgaaaaccaccagaacaacccggcagttccgagtggatcgatcgatgaggacgtggtggtgatcgaggcttcctctactccacaagtgacggctaacgaggagattaatgtgacctctacagactctgaggttgaaattgtaactgtgggagagtcctaccggtcgagatccaccttaggtcatagccgcagccactggtcccagggctcctcctctcatgcatcacggccacaggagccacggaataggagccgaatctcaacggtgatacaacccttacggcagaatgccgccgaagtggtggatctgaccgtggatgaggacgagcccaccgtcgtgcctaccacctccgcaaggatggaatcccaagccacaagcgccagcattaataatagtaacccgtctacatcagaacaggcctccgataccgcgtccgcagtcacctcttctcagccgagtactgtcagtgaaacgagcgctacactcacatcaaattctaccactggtacatcaataggtgatgacagcaggcgaacaacgtcatctgccgtcaccgaaacagggccaccggccatgccaaggctgcctagttgttgccctcagcattcgccctgtggcggctctagccagaaccatcacgctcttggccacccccacacatcatgtttccagcagcacggtcatcactttcagcaccaccaccaccaccaccatacaccacatcctgccgtgccagtgtccccgtcttttagcgaccccgcgtgtccagtcgagaggcctccccaggtacaggccccgtgtggagccaatagttccagtgggacgagctaccatgagcagcaagccttgcctgtagacctttcaaactcaggtatccgttcccacggctcagggagcttccatggagcctccgccttcgatccctgttgcccagttagttcaagcagggcagcgatattcggacaccaggctgccgcagcagccccaagccagccactgtcgagtatcgatggctatggtagctctatggtggcacaaccccagccccagccacccccgcagcccagtttgagctcctgtaggcattacatgcccccaccttatgccagtctgactcggcccctccaccaccaagcctccgcctgccctcattcacacggcaacccacccccccaaacacagcctcctccacaagtggattacgtgattccgcatccagtccatgccttccatagccagatatccagtcatgccacttctcatcctgtggcaccccctcccccaacacacctagcttcgacagcagcacctatcccccagcatctgccgcctacccatcagccgatttctcatcacattccagccacagccccccccgctcagcgtctccatccccacgaagttatgcagagaatggaggtacagcggcgccgtatgatgcagcatcccacccgtgctcatgagcgccctcctcctcacccgcaccgcatgcaccctaactacggacacggccatcacattcacgtgccccagaccatgtcctcccatccacggcaggcacccgaacgatctgcctgggaactgggcattgaggcgggtgtgactgctgctacctacactcctggagccctccacccccacctggcacactatcacgccccacctcgactgcatcatctccagctgggcgcgctgccacttatggtgccagatatggcaggctacccgcatataagatacatttcatctggcttagacgggacctcatttaggggacctttccgtgggaacttcgaagaactaattcacctggaagagaggctgggcaacgtgaaccggggagcgtcccaggggaccatcgagaggtgcacctatccacataagtacaaaaaggttacgacagattggttttcacagagaaaactccactgcaagcaagatggagaggagggcaccgaggaagacacagaggaaaagtgtaccatttgcctgagcatcctggaggaaggggaggatgtccggcggctgccctgcatgcatctttttcatcaagtctgtgtggatcagtggctgattaccaacaaaaaatgccctatttgccgggtggacatcgaggcccaactcccaagtgagagctag

SEQ ID NO: 18165 - DNA, 1158 bp, synthetic construct
  source 1..1158: mol_type = other DNA; note = Synthetic coding sequence
atggcattgccccacgacagcaatgaaacatcatatttactgccgcccaataacgaggattggggaagacagaccatcccagactttgtctatgggcagaaggatctgatggctgaagggatacagtggccaagaaatgctccaggaatacctgacgctctgccacagagcccttttgatgctgcactgtgtagtgcatggaaacagcgcgttgagttagggctgtttcgctaccggctgcgcgaacttcagactcagatacttcccggtgccgtcggattcgttgcacagctaaatgtcgagcggggggttcagaggcggcccccacaaactatcaagtccgtgcggcaagcttttgaccctgtgcagttcaattttaacaagatacgccctggggaagtgctctttaggcttcacagagaacccgatctccccgggactctccttcaggaggacatactggtggttatcaatgtcagccctttagagtggggccatgtgttattagttccagagcctgcgagacagcttccccagcggctgttgcctggggccttgcgagcgggaattgaagccgtcctgctgagtttgcatccaggctttagagtaggctttaattctctcggcgggctggccagcgtgaaccacctgcatctccatggctactacctagcacaccgccttccagtggagcaggctccttccgaaccactggatcccggcggacatcttcacctgctgcaggacctcccggctcctggcttccttttctacacgcggggtcccgggccagatttggaatcattgataagtcgggtctgcagggcaacagactatctgaccgatcacgaaattgcacataacctgttcgttaccagaggcgcaccgcctggtaaaacgtcaccgagcagcgcattgacaggggtgagggtgattctgtgggccaggaagtcctcctttggaatcaaggacggcgaggcctttaacgtggcactgtgtgagctcgccgggcacttaccagtgaaaacttcacaggacttcagctctctgaccgaggccgctgcagtggccttgatccaggactgccgcctgccacccagccaggcagaggacgtccaggcagcactggtggctcttatgagtcaagaggaacagtag

SEQ ID NO: 18166 - DNA, 7464 bp, synthetic construct
  source 1..7464: mol_type = other DNA; note = Synthetic coding sequence
taagaggaggaggaagacgacgatgatgaagaggaggaagtttccgaagtcgaaagctttatattagaccaggatgatttggagaatcctatgcttgaaacagcctctaagttattattgtctggcactgcagacggcgcagacttgaggaccgttgatcctgaaacccaagcccggttggaggcactgttggaggcagctggaatcggaaaactctcaaccgccgatggcaaggcattcgccgatcccgaagtgctacgaaggctcaccagctccgtttcgtgtgctctagacgaagccgctgcagcattaacgaggatgagagcagagagtaccgccaacgccgggcagagcgacaatcggtccctggccgaagcctgcagcgaaggagatgtcaacgccgtccgtaagctgctcatagaaggcaggagcgttaatgagcataccgaagagggagagtcattgctctgcctggcatgtagcgccggatactatgagctggctcaggttcttcttgctatgcatgcaaacgtagaagatcgtggcatcaaaggcgacatcacaccactgatggccgccgcaaatggtggccacgtcaaaattgtcaagctgttactcgcgcataaggccgacgtgaacgcccagagcagtacgggcaataccgccttaacttacgcctgtgcggggggatacgtggatgtggttaaggttctgctggaaagcggagcttccatagaagaccacaacgaaaacggccacactcctctcatggaagccggatccgcgggccacgtggaggtggcgcgcctgctgctagagaacggagcaggaatcaacactcactccaatgagttcaaggaatccgcattaaccttggcctgctataagggacacctagaaatggtgagatttctacttgaggccggcgctgatcaggaacacaagacggacgaaatgcatactgctctgatggaagcttgtatggacgggcatgtggaggtggctcgcctccttctcgatagcggcgctcaggtcaatatgccagcggactctttcgaatcccccttgaccttagcagcttgcgggggccatgttgagctggctgcgttgttgatcgaacgaggcgcaagcctcgaggaggtgaacgatgaaggttatacacctctgatggaggcagcccgcgaaggacatgaggaaatggtggctctgctgctcgggcagggtgctaatattaatgcgcagactgaggaaacccaagaaaccgcactcacactcgcttgttgtggaggctttttggaggtggcagactttttaatcaaggctggcgctgacatcgagctaggctgttctactcccctgatggaggccgcccaggagggacacctggaactggttaagtaccttctcgcagcgggcgctaatgtgcacgcaacaaccgcgaccggggataccgccctgacatacgcatgcgaaaatgggcacaccgacgtggctgatgttctgcttcaagcaggcgctgacctggagcacgaaagcgaaggaggacgcactcctcttatgaaggcagctcgtgcgggtcatgtctgtacagtacagttcctgatatctaagggggcgaatgtgaatagaactactgccaacaacgaccacactgtgctgagtcttgcgtgcgccggggggcatttggcggtcgtggagctccttctggcacacggcgctgaccccacccacagactcaaggatggttccaccatgctgatcgaggctgcaaagggcggccacactagtgtggtatgctacttattggactaccctaacaatctattgagtgcaccccctccagacgttacgcagctaacccccccgtcacatgacttgaaccgcgccccaagagttccagtgcaggctttgccaatggtggttccaccccaagaaccagacaagccccccgctaacgtagccacgaccttgcctatccgcaataaagccgcttcaaagcagaagtccagcagccacctgccagcaaactcacaggatgtgcagggatatatcacaaatcagagcccagaatctatagttgaagaagcccaaggtaaactgactgaattggaacagcgaatcaaggaagcgattgagaagaatgcacagctccagtcccttgagctggcacatgccgaccagttaacaaaggaaaaaatagaagagctcaataaaactcgagaagaacagattcagaagaagcaaaagattctggaggagctgcaaaaggtcgaacgcgagctacaattgaagacgcagcaacagttgaagaagcaatatttagaggtcaaggcgcagagaattcagttgcagcagcagcagcagcagtcctgtcagcacctggggttgctgacacccgtcggggttggcgagcaactgagcgagggggactacgcacggttgcagcaagtggatcctgtactgttaaaggacgagcctcaacagaccgccgctcagatggggtttgcacccatacagccactcgccatgccacaagcgctgcccctggccgctggaccactgcctcctggatccatagccaatctcactgaactccaaggcgttatagtaggccaacctgtgctgggacaggcccagctggctggcctgggacaagggattttgacagagactcagcaggggctgatggtagcatcgccagcccagaccctgaatgataccctcgacgatatcatggcggtaagcggccgtgcctctgccatgtcaaatacgcccacccactcaatcgccgctagtatttctcagcctcagaccccgacccctagccctattatttcccccagcgccatgctccctatttatccagccatcgacatagatgcacagactgagagtaaccacgacaccgcactgaccctggcctgcgccggaggccacgaggaactcgtccagacactgcttgagaggggtgctagcatcgagcacagagataagaagggcttcacccctttaatccttgctgcgaccgcaggtcacgtgggcgtggtcgagattctgctagataatggggcggatattgaagcccaaagcgagcgcacaaaggatacacccctctccctcgcatgctccgggggtcgccaggaggtggtggagctcctcctcgcacgcggagcaaacaaggagcacaggaatgtgtcggactataccccactgtccttggccgcatctggcggatatgttaatatcattaagattcttctcaatgccggcgcagagatcaattctcggacggggtcaaagctagggattagccccttgatgctggcagctatgaatgggcacacagccgcggtgaaacttctgctcgacatgggctccgacattaacgctcagattgagactaatcggaacaccgccctgaccctggcatgcttccaaggtcgaacagaggtagtgtcgctgcttttggacaggaaggccaacgtggagcatagagctaagacggggctgacgcccttaatggaagccgctagtggggggtatgccgaggtggggcgggttctgctcgataagggtgccgacgtcaatgccccaccggttccgtctagtcgcgacacggcactgaccatcgccgccgataagggtcactacaaattctgtgaactgctaatcggaagaggtgcccatattgatgtacggaataaaaaggggaacacaccactgtggctggcagccaatggtggccacctcgatgtggtgcagctgttggtccaagccggcgctgacgttgatgctgcagacaatagaaaaatcactcccctgatggcagcttttcggaagggccacgttaaggttgtgcgctacctcgtcaaagaagtaaatcagtttccctcagacagtgaatgcatgaggtacattgcgaccatcaccgataaggaaatgcttaagaaatgccatttgtgtatggagagtatcgtccaagccaaggacagacaggccgctgaggccaacaaaaacgcctcaattttgctggaggagctagacctcgagaagcttagggaggaatccagaagactggctctggcggccaagcgtgagaagcggaaggaaaagcgaaggaaaaagaaggaagaacaacggcgaaagctggaagaaatagaagccaaaaacaaggaaaacttcgaactacaggccgcacaggagaaggaaaagctcaaggtcgaggatgagcctgaagtgctcaccgagccccccagcgctactacaacaacaacgatcggtatatcggccacgtggactaccctggccggctcacatggaaagaggaacaatacgattaccacgactagttcaaaacggaagaatcgaaagaacaagataacacctgagaatgtccagatcatctttgacgaccctctgcccataagctacagtcagcccgagaaggtcaacggcgaaagtaagtcaagctctacttccgagtccggcgactccgacaacatgcgaatctcaagctgttccgacgagagtagcaattctaactcgagcagaaaatccgacaaccattctcctgccgtagtaaccactactgtatcatcgaaaaaacagccgtccgttctagtgaccttcccaaaagaggaacgcaaaagtgtttctggcaaggcctctataaagcttagcgagacaatatccgagggcacttcaaacagcctcagtacttgcacaaaatcgggaccttcccccctttcctcacccaatggtaagctcaccgtcgcatccccaaagcggggtcagaagcgggaagaaggctggaaggaggttgttcggagaagtaagaaggtcagtgtgccctccaccgtgatttcgcgcgtgatcggccgcggcggatgcaatatcaacgccatcagggaatttactggagcccacattgacattgacaaacagaaggataagaccggtgatcgtattatcactattcgtggcggcaccgagtccactagacaggctacccaactcatcaacgcgctgattaaagaccccgataaggaaatcgatgagctgattcccaagaacaggctgaaaagcagtagtgccaactctaagatcggcagcagcgctcctacgacaactgctgcgaatacatctttgatgggaattaagatgacaaccgtagctctgtcctcaacttcccaaactgccacagccctcaccgttcctgccatctcctcagcctccacacacaagacaattaagaatccagtgaacaatgtaaggcccggcttcccagtgagcctgccattggcctaccctcctccccaatttgcgcatgcgctcctcgctgcccagacatttcagcagattagaccccctagattacctatgactcatttcgggggaacttttccccccgcccagtcaacatggggacccttccccgtcaggccactgtctcccgctagggcaaccaacagcccaaagcctcacatggtgcccaggcatagcaatcaaaacagttccggcagccaggtgaatagtgctggaagcttaacatcctctccaacaactaccacttcatccagcgcctccactgttcccgggacgagcacaaacggatccccctctagccccagtgttcgcagacagctgttcgtgacagtcgtgaagacgtccaatgccacaacaacaactgtgactaccacagcatctaataataatacggctccgacgaacgctacgtatcctatgcctaccgccaaggagcattatccagtttcgtctccgagtagccctagtccgccggcacagcccggtggagtctcaaggaatagccccttggactgtggttctgcttcccctaataaggttgcaagctcttccgaacaagaagcaggatctcctccagtggttgagaccactaacacccggccccccaatagctcttcaagtagcggcagttcctccgctcacagcaaccagcagcagccacctggcagcgtttcccaggagcctcgcccgcccttacagcagagtcaagtgcccccgcctgaagtccggatgaccgtgcctccattggccacttccagcgcccctgtggccgtgccctcaacagcccccgtcacgtacccgatgccccagacaccgatgggttgtccccagcctactcccaagatggagactcccgcaataagaccacccccccacggcacaacagccccacataagaactctgccagcgtacagaattcatctgtagccgtgctatcagtgaatcacatcaaaagaccacattcagtcccctcctccgtgcaactcccatcaaccctttcaacacagtccgcttgtcaaaatagcgtgcacccagccaataaacctatcgccccgaactttagtgctcctctaccctttggccctttctctaccctcttcgagaattcccccacttcagcacatgccttctggggcggctccgtggtctcctcccagtcaacccctgaaagcatgctgtcgggaaagtcctcatatctgcccaattcagacccgctccaccagagtgatacaagtaaagcccccggttttcgcccacctctccagcgccctgctccaagcccttctggaattgttaatatggactcaccctatggaagtgtgactccaagtagtacccatctggggaactttgcaagcaacatcagtggggggcaaatgtatggccccggtgctcccctcggaggagccccagctgcagctaatttcaaccggcagcacttctcacccctgagcctgttaactccctgttctagtgccagtaatgactctagtgctcagagcgtctctagtggggtgcgcgcccccagccccgcaccatcaagcgttccccttggcagtgaaaagccatcgaatgtctcgcaggacagaaaagtgcctgtccccatcggaactgagagaagtgcccgaatacgacagacaggtaccagcgcccctagcgtgatcggttccaatctgtcaacaagcgttggccattcaggtatctggtccttcgagggcattggaggcaaccaagataaggtcgattggtgtaatccagggatggggaatcccatgattcaccgaccgatgagcgatccaggagtgttttcccagcaccaggccatggaaagggactccaccggtatcgtgacaccatcaggaacatttcaccagcacgttccagctgggtatatggatttcccaaaggtgggcggcatgcccttcagcgtttacggtaacgcgatgattcctccggttgcccctatccccgacggcgccggcggtccgatcttcaacggcccacacgccgccgatcccagctggaatagcctaatcaagatggtgagctcaagtaccgagaacaacggtccccagacggtgtggactggaccatgggcccctcatatgaacagtgtccacatgaatcagctgggatag

SEQ ID NO: 18167 - DNA, 33 bp, synthetic construct
  source 1..33: mol_type = other DNA; note = Synthetic coding sequence
atggctctaccccatgactcaaatgagacttag

SEQ ID NO: 18168 - DNA, 462 bp, synthetic construct
  source 1..462: mol_type = other DNA; note = Synthetic coding sequence
atggctacgatgattccccccgtcaagttgaagtggctcgagcatctgaattcctcctggatcactgaggacagcgaaagtattgctacgcgggagggcgtggcagttctatactccaaactagtaagtaacaaggaggtggtccctttaccccagcaagtcctgtgcttaaagggtcctcagctacctgatttcgagagagagtcactgtcatccgatgaacaagaccattatttagatgcactcctctctagtcagctagctctggctaagatggtgtgctctgacagccccttcgccggggctcttaggaagagactcctggtcttgcagcgggtgttttacgccttgagtaacaagtaccatgataagggtaaagtcaagcagcagcaacattcacctgagtcgtcctccgggtctgctgacgtgcattctgtttctgaacgaccccgctctagttag

SEQ ID NO: 18169 - DNA, 111 bp, synthetic construct
  source 1..111: mol_type = other DNA; note = Synthetic coding sequence
atgctcccaccgaaacatctcagcgctacaaagccaaagaagtcctgggcaccaaacctctatgagctggacagtgatctcaccaaggaacccgacgtgattattggctag

SEQ ID NO: 18170 - DNA, 315 bp, synthetic construct
  source 1..315: mol_type = other DNA; note = Synthetic coding sequence
atggcccagagcggtggcgaggccaggcctggaccaaagactgcagtgcagatcagggtggccattcaagaggccgaagatgtcgatgaactggaagatgaggaggagggagccgagactagaggtgctggagatccagctaggtacctatcacccggatggggatcagcaagtgaggaggaaccttcccggggacaccgcaccgcgcagttgccttggttagagagtcagcaggtctttagcctcaagccttttctcctgccgactggaatcgagctgacccctgagaacccctggggctcttcagtttcctag

SEQ ID NO: 18171 - DNA, 645 bp, synthetic construct
  source 1..645: mol_type = other DNA; note = Synthetic coding sequence
atggcgcttcctcacgattccaacgagacatcttacttgttgccacctaataatgaggattggggccggcagaccatccccgatttcgtgtatggccagaaagacctcatggctgagggcattcagtggccccgaaacgcccctggcattcccgacgcactgccacagtcaccatttgacgcagccctatgcagcgcctggaagcagagagtggagctcggcctatttcggtacaggttgcgcgagctgcagacccaaattttgcccggggcagtcggcttcgtagcgcagctgaatgtggagcggggcgtgcagcgacgccctccccagaccattaaaagcgtcaggcaagctttcgatcccgtgcagtttaacttcaataagatccgacctggcgaagtcttatttcgcttacaccgggagcccgatctccccggaaccttgttacaggaggatattcttgtagtcataaatgtgtccccactggagtggggtcacgttctgctcgtgccagaacctgcccggcagctgcctcagcggttactgcccggcgccttacgagccggaatagaggcagttcttttaagtctccatcccggctttcgtgttggattcaattccttaggcggcctagctagcgtatag

SEQ ID NO: 18172 - DNA, 2988 bp, synthetic construct
  source 1..2988: mol_type = other DNA; note = Synthetic coding sequence
atgtcacagtggacgccagagtataacgagttgtataccctgaaggtggatatgaaaagtgaaatccccagcgatgccccgaagacacaggagtcgttgaagggcattcttctgcatccagagcccattggcgccgctaagtctttccctgcgggcgtggaaatgatcaactccaaggtgggcaatgagtttagccatctctgtgacgactcgcagaagcaggagaaggagatgaatggcaatcagcaagagcaggagaaatctcttgtagtgcgaaaaaagcggaagagccagcaggctgggccttcctatgtgcagaactgtgtcaaagaaaaccaggggatcctgggacttcgtcagcatcttgggacccctagcgacgaagacaatgatagttccttcagcgactgcctgtcaagcccctccagctccctgcacttcggtgatagtgataccgtcacaagcgacgaagacaaagaggtcagtgtcagacactcgcagaccatactaaacgcaaagtcccgctctcattccgccaggtcgcataaatggccacgcaccgaaactgagtctgttagcggactgcttatgaaacggccctgccttcacgggtccagcttgcgtagactgccttgcagaaagcgcttcgtcaagaacaacagtagtcagaggacccagaaacagaaggaacggatactgatgcagagaaaaaaacgggaggttctggcccgcaggaaatacgccctcctgccaagctcctctagctcctcggaaaatgatttatcttcggagtccagttcctcatcatccacagagggcgaagaagacttgtttgtgtcagcatccgagaaccaccaaaacaaccccgctgtcccgtccggttcaatcgacgaagatgtggtggttatcgaggccagttctaccccgcaggtgaccgcgaatgaggaaattaacgtgacgtcaacagattccgaagtagaaatcgtgaccgttggagaaagttaccggtcacgctcaacactgggccacagtcgctcccattggagtcaggggtcgtcctcccatgctagtaggccacaggaaccacgcaacagaagcaggataagcaccgtgattcagccacttagacaaaacgcagccgaggtggttgatctgacagtcgatgaggacgaacccaccgtcgtccccacgaccagcgcacggatggagagtcaggccacctcagcctccatcaacaacagtaacccctccactagcgaacaggcctctgatactgcgtccgccgtgacttcgtcacagcccagtactgtcagtgaaacgtcagcgacgctgacgtctaacagcacaactgggacgagcattggcgacgacagcagacgcacaaccagcagcgcagttaccgagactgggcccccagcaatgcccaggcttccatcctgctgtccacagcacagcccttgtgggggaagcagccaaaaccatcacgcattgggacacccccatacctcctgcttccagcagcacgggcaccattttcagcatcaccatcaccaccaccacaccccccaccccgcagtgcccgtgtcgccatccttctccgatcccgcgtgccctgttgagcgccccccccaggttcaagcgccctgcggtgctaattcatcatccggcactagctatcacgaacaacaggccttgcccgtcgatctctcaaactctggcatacgcagccacggttccggcagttttcatggagcctcagctttcgatccctgctgtcctgtttcgtcttccagagctgcaatcttcggacaccaggccgctgcggcagcgccgagccagccgctgagttcaatagatggatacgggtcctccatggtggcccagccccagccccagccacctccccagcctagtctgtcaagctgtcgtcactacatgcctcctccctatgctagcctgactaggcctttgcaccaccaggcctccgcctgcccccactctcatggcaaccccccccctcagactcagcctccgcctcaagtagattatgtgatacctcatcccgttcacgcgtttcacagccagatcagtagccatgccacgtctcaccctgtggcgcctcccccgccaacccatctggcctctaccgcagctcccattccccaacatttaccaccaactcatcaacctatcagccaccatattcccgcaactgctccccccgcacaacgcctgcatcctcatgaggttatgcagcgaatggaagtgcaacgcagacggatgatgcaacaccctaccggactatttgttttctgcgtgtcccgcagggcccacgagcgccctcctcctcaccctcacaggatgcaccctaactatgggcacggccaccacatccatgttccacagactatgagttcacatcccaggcaggctcccgagagatctgcttgggaactaggtatagaagccggtgtcaccgccgctacttacaccccaggggctctccaccctcacctggctcactaccatgcccctccccgattacaccacctccaactgggggccctacctttgatggtgcctgatatggccggatacccacacatccgatacatttcaagcggactggatggaacatcctttcgggggccgtttcggggtaactttgaagaattaattcaccttgaggagagactaggtaatgtcaacaggggcgccagccagggaactatcgagcggtgcacttacccgcataagtataagaagcggaagctgcactgtaagcaggacggggaagaggggacagaggaagataccgaggagaagtgcaccatttgtttatcgatattggaagagggggaggacgtgcgaagactaccttgtatgcatctgtttcaccaagtatgtgttgatcaatggcttatcactaataaaaaatgtcccatctgtagagtggatatcgaggcccagttgcccagtgagagctag

SEQ ID NO: 18173 - DNA, 1851 bp, synthetic construct
  source 1..1851: mol_type = other DNA; note = Synthetic coding sequence
atggcgggtggtagaggcgcacctggacgcgggcgtgatgagccgccggagtcttatccacagcggcaggatcacgagctgcaggccttagaagccatatatggtgccgatttccaggaccttaggcctgatgcatgtgggcctgtgaaagagcctcccgaaataaatctagttctctacccacagggtctcaccggggaagaggtctatgtgaaggtcgacttaagggtgaaatgccctcccacttaccccgatgtcgtaccggaaatcgaattaaagaatgctaaaggactctccaatgaaagcgtaaatctactcaaatcccgcctggaggaactggctaagaaacactgcggcgaggtgatgatctttgaattagcataccatgtacagtcctttttgtcggaacataataaaccgccccccaagagctttcacgaggaaatgctggagcgaagagcacaggaagagcagcaaaggcttttagaagcaaagagaaaagaagagcaggaacagcgtgaaatcctccacgaaattcagcgacggaaggaggaaatcaaggaagagaaaaagcgaaaagagatggctaagcaggagcgattagagatagcctccttgtctaatcaggaccacacttccaagaaggatcccggcggccaccgtaccgcagccattctgcacggagggtcccctgacttcgtgggaaacggcaaacatagggctaattcttccggaaggagcagacgggagcgacaatactccgtgtgcaactcagaggattcacccggtagttgcgagatactgtacttcaatatgggctcccctgaccagctgatggttcataagggtaaatgtataggatctgacgagcaactcggcaaactggtgtacaatgccttagaaacagcgaccggggggtttgttttgttgtacgagtgggtgctccaatggcagaagaaaatgggcccctttcttaccagtcaagaaaaggagaaaatcgacaagtgcaagaagcaaattcaggggaccgagacagagttcaatagcctcgtcaagctttcccatccaaacgttgtgagatatctagccatgaatcttaaggaacaagatgactccatcgtcgttgatattctggtcgagcacatcagcggtgtgagcctggctgcacatcttagccacagtggccctatacctgttcatcagctacgccgctataccgcacagctcctgagcggtctggattacctccatagtaacagtgttgtacataaagtgctgtcagcatccaatgttctggttgacgcggagggcaccgtaaagatcactgactattccataagcaaacgcctcgctgatatttgcaaggaggacgttttcgaacagactagagtcagattctccgacaacgccctgccatataagactggcaagaagggagacgtctggcgactgggactcctgctcctgagtctgtcccagggacaggagtgcggagaataccccgtcacaattccttccgacttgcccgcagacttccaggattttttaaagaagtgtgtctgcctcgacgacaaagaaagatggagtccacagcagctcctaaaacattctttcattaatcctcagccgaaaatgcctctcgttgagcagtcacctgaggatagcgagggacaagactatgtggagaccgttatcccaagcaaccggctcccatcagctgcctttttttccgaaacccagagacagtttagtaggtactttatcgaatttgaggagctgcagcttttagggaagggtgcgttcggggctgtgatcaaggtgtggtaccgggttatcccatcaccactttag

SEQ ID NO: 18174 - DNA, 396 bp, synthetic construct
  source 1..396: mol_type = other DNA; note = Synthetic coding sequence
atgtctcaatggactccggagtacaatgaattatacaccctgaaagtcgatatgaaatctgaaattccctcagatgccccgaaaacacaggagagcctaaaggggatacttctccatcctgagcccatcggagccgctaaatcgttccctgcgggtgtggagatgattaacagtaaagttggtaacgagttcagccacctctgcgatgacagccagaagcaggagaaggaaatgaatgggaaccagcaggagcaggagaaatcactcgtggtcaggaagaagagaaaatctcagcaagccggaccaagctatgttcaaaactgtgtcaaagaaaaccaggggatcctaggcctgagacagcacctcggcaccccttctgacgaggacaacgattag

SEQ ID NO: 18175 - DNA, 1863 bp, synthetic construct
  source 1..1863: mol_type = other DNA; note = Synthetic coding sequence
atggctccagactctgacccattcccagagggccctcttctgaagctcctcccactcgacgctcgtgaccgtggaacccaaaggtgtagacttggaccagccgccctgcacgcgctcggcgccaggctgggaagcgcggtaaaaattagcctgcccgacggtggcagctgtttgtgtacggcttggccccgtcgcgacggcgccgacggattcgtgcagcttgatcccctctgcgcctctccaggcgccgcggtgggagcgtcacgctcacgaagatcactgtccttaaatcgattgcttctggttccctgccctcccctgcggcgcgttgcagtctggccggtgctgagagagagggccggagccccaggcgctaggaacacggctgccgtactagaggccgcgcaggaactactgaggaaccggcctatctctctgggacacgtggtagtggccccaccaggtgcccccggcctcgtcgccgcactgcatatagtaggcggaacacccagcccggaccccgctgggctggtgactccaagaactagggtgtcactcgggggagaaccaccaagtgaggcccagcctcaaccagaggtccctcttggcggtctgtcagaggctgcagattcactccgggagcttctgaggcttcctctaagatatccacgggccctgactgctctgggcctggccgtacctcgcggtgtgctactcgccgggcctcccggcgttgggaagacgcagctggtacgggctgtcgctcgagaggctggagccgagctgctcgcagtgagcgctcccgccttgcaggggagcagaccaggagagaccgaggagaacgtgaggcgagtgttccaaagggcaagagaactggcttcacggggaccctctctactctttctcgacgagatggacgcactctgccctcagcgtggctctagggccccagagagtagggtggtcgcccaggtactgactctgctggatggcgcctcaggtgatagagaagtcgtggttgtcggcgctacaaaccgccccgatgcactggaccccgcactccgcaggccaggacgctttgatagagaagtggttatcgggactccgactcttaagcagcgcaaggaaatactgcaggtcattacgtcaaagatgccaatttcgtcacatgttgatctgggtctcctggcggagatgacggttggctatgtgggagcagatctgactgctttatgtcgggaagctgcaatgcatgcccttctgcactccgaaaagaatcaagacaatccagttattgacgagatcgactttcttgaggcgttcaaaaatatccagcccagttcctttcggagcgtgattggcctcatggacattaaaccggtggactgggaggagatcggaggccttgaagatgtgaaattgaagctaaagcagagcattgagtggccgctgaagtttccttgggagtttgtgagaatgggtctgactcagccaaaaggcgtgcttctgtacggcccacctggttgcgccaaaacaaccctggtcagagccctagcaacctcttgccactgtagcttcgtcagcgtgtctggcgctgatttattttcaccttttgtcggcgatagtgaaaaggtgctatcacagatatttcgacaggcgagggcgtccactcccgccattctctttctagatgagatcgattctatcttgggcgcaagaagcgccagcaaaacgggatgtgacgtgcaagaacgggtcctgtcggtcctccttaacgaactggatggagttggcttgaaaacgatcgagcggagaggcagtaagagctcccagcaaggtaagtacaaagaacttaaaaaatag

SEQ ID NO: 18176 - DNA, 4767 bp, synthetic construct
  source 1..4767: mol_type = other DNA; note = Synthetic coding sequence
atgctgccaccaaaacacctcagtgccaccaaacccaagaagtcgtgggcaccgaacctatacgaactggattctgaccttacgaaagagccagatgtgatcatcggagagggacctaccgacagcgaatttttccaccagcgatttaggaacctcatctacgtcgaatttgtaggcccccggaaaaccctcatcaagttgcggaatctgtgtcttgattggctgcagcccgagacacggactaaagaagagatcattgaactgctcgtgttagagcagtacctgactataattccagagaaacttaagccctgggttagggccaagaagcccgagaattgtgaaaaactggtcacgctcttggaaaattacaaggagatgtaccagccggaggacgataataatagcgatgtgacaagcgacgatgatatgacacggaatcgccgggagagctcgccaccacattctgtccactcttttagtgatcgggactgggacaggcgcggacgatcccgtgacatggaaccacgggataggtggtcacacactagaaaccctaggagcagaatgcccccccgcgacctgtcacttcctgtggtcgcgaagacttcattcgaaatggatcgtgaagatgatagggactcgcgggcttacgagtccagatcccaggacgctgagagctaccagaacgtcgtcgatttagcggaggatcgaaagccccacaatactatccaggacaatatggaaaactatcggaaactgctgtcattagttcagctcgcggaggacgacgggcactcacacatgacccaaggtcactcttcacgaagcaagcggtccgcctatcccagcacctcacgcggcctgaaaacaatgcccgaagctaagaaatcaacacataggaggggaatttgtgaggatgaatctagtcacggcgtcataatggagaagtttattaaagacgtttctagatcttctaagtctgggagggctcgggagtcatcagataggtcccaacggttccccaggatgtcagatgacaattggaaggacatatcactgaataaacgagaatctgtgatccagcagcgggtctacgagggtaatgctttccgcggtggtttccgttttaattccacccttgtttccagaaagagagtgctagagagaaaaagacggtatcattttgacacagacggtaagggatctattcacgatcagaaaggctgcccacgcaaaaagcctttcgaatgtggcagtgaaatgcgcaaggccatgtcagtaagcagtctttcctccctgtcatccccctcctttacggagtcccaacccattgacttcggagccatgccctacgtatgcgatgaatgcggcaggtctttctctgtgattagtgagtttgtggagcatcagattatgcatacgcgggagaacctttacgagtacggggaaagcttcatacactcagtagcagtttccgaggtgcagaagagccaagtgggaggtaagaggttcgaatgtaaagactgtggcgaaactttcaacaaatccgccgccctcgcggagcaccggaaaattcacgctaggggctaccttgttgaatgtaaaaatcaggagtgcgaggaagcctttatgccctcgcctaccttcagcgaactgcagaagatctacgggaaagacaaattctatgaatgcagggtgtgtaaggaaacatttcttcactcctctgcacttatagaacatcaaaagattcatttcggcgacgacaaagacaacgaaagagagcacgagagagagagagagcgcgaaagaggcgagacctttcgcccttccccagccctgaacgaatttcagaagatgtacggtaaggagaaaatgtacgaatgtaaagtgtgcggcgaaaccttccttcacagcagtagcctgaaagaacatcagaagattcacacccgcggcaaccccttcgaaaacaaaggcaaagtctgcgaggagacattcattccaggtcagagtctgaagcggcgccagaaaacatacaacaaagagaagctctgcgatttcacggacggtcgggacgcctttatgcaaagctcagagctttcagagcatcagaagatacactcaaggaaaaatcttttcgaaggaagagggtacgaaaagtctgtcatccatagtggtcccttcactgagagccaaaagtcccatacaatcaccagaccactggaaagtgatgaagatgaaaaagcatttacaatctcttctaatccctatgaaaaccagaagatcccaactaaggagaatgtgtacgaggccaagtcatatgagcgtagcgttatccactccctcgcttcagtagaagctcagaaatcacactccgttgccgggccctcaaagccgaaggtcatggccgaaagtacgatccagagtttcgacgccatcaatcatcagcgcgtgagagctgggggcaatacatccgagggaagagagtactcccggtcagtgatccattctcttgtggcttcaaaaccacccaggagccataatggcaatgagctcgtggagagtaacgaaaagggagagtcttctatttacatctccgacctcaatgacaaacgacagaagattccggctcgcgagaacccctgcgagggcgggtcaaagaatagaaattatgaggactctgtcatccagtcagtcttcagggcaaaaccacagaaatctgtaccgggcgaagggtctggagagttcaagaaagatggtgaattttccgtacctagtagtaatgtgagggagtaccagaaagctcgagcgaagaagaagtacattgaacacaggtctaacgagacaagtgtgatccactctctcccattcggagagcagacgttcagaccgcggggcatgctctacgaatgccaggaatgtggggagtgtttcgcgcattcctctgacctgactgagcaccaaaagattcacgaccgcgagaagcctagcggttctcgaaactacgaatggtccgtaattcgctcactggctcccactgacccccagacaagctacgctcaagaacagtatgctaaggagcaggcaaggaacaagtgtaaggactttagacaattttttgccactagcgaagacctgaatacaaatcaaaagatatacgaccaggagaaaagtcatggggaggagtctcagggagagaatacggacggtgaggagacacattccgaggaaacgcatggtcaagagacaatagaggacccggtgattcagggcagcgatatggaggacccacagaaggacgaccccgatgataagatctacgagtgtgaggattgtggtctcgggtttgtggacctgacagacctgaccgatcatcagaaggtgcactcccggaaatgcctggttgattcgagagagtacactcactctgtgattcatacacactccatcagtgagtatcagcgtgattacacaggtgaacagttgtacgaatgcccaaaatgtggcgaatcatttatccattcgtcctttcttttcgaacatcagcggattcatgagcaagaccaactgtacagcatgaaaggctgtgacgatggctttatcgctttgctgccaatgaagccaagaaggaaccgcgcggctgaacggaatcccgccttggcaggaagcgcaattcgttgtttgctctgtggacaaggcttcattcactcgtcagcgctcaatgagcacatgagactccatcgcgaagacgatcttcttgaacagagccagatggccgaagaggcgatcattcccggacttgccttaacagagtttcagagatcccagactgaagaacgcctatttgaatgtgccgtgtgcggggagtccttcgtgaaccctgcagagctcgccgaccacgtgactgtacataaaaacgaaccctatgagtatggtagcagttatacacatacctcattcctgaccgagcccttgaagggagctattccattttacgagtgcaaagactgcggaaaaagtttcatccattccactgtgctgacaaaacacaaggaactgcacctggaggaggaagaggaggacgaggcggccgctgcggctgctgcagctgcccaagaggtggaagctaatgtccatgtccctcaggttgtactgcgtattcagggattgaatgtcgaggcagcagaaccggaagtggaggcagctgagccggaggttgaagcggcagaaccagaggtagaagcagcagaacctaatggtgaggcggagggcccagacggtgaggcagcagaacctatcggtgaggccggacaacccaacggggaggccgagcagccaaacggagacgccgatgagcctgacggcgccggcattgaggaccccgaagaacgcgccgaggagcccgaaggcaaagctgaagaacctgaaggggacgctgacgagcctgatggtgtgggaattgaggaccccgaagaaggagaggaccaggaaatacaagtggaggaaccctattacgactgtcatgagtgcaccgaaacttttacctcaagcacggcgttctctgagcatttaaaaactcacgcttcaatgatcattttcgagcccgcaaacgcatttggggagtgctctggatacatagagcgggcatctacctccacggggggcgctaatcaggccgacgagaaatactttaagtgcgacgtgtgcgggcagctgttcaacgaccggttgagcttggcccggcaccagaatactcacacgggctag

SEQ ID NO: 18177 - DNA, 63 bp, synthetic construct
  source 1..63: mol_type = other DNA; note = Synthetic coding sequence
atggcgacaatgatccctcccgtgaaactgaaatggctcgagcatctgaattccagttggtag

SEQ ID NO: 18178 - DNA, 4389 bp, synthetic construct
  source 1..4389: mol_type = other DNA; note = Synthetic coding sequence
atgtatcagccggaagacgacaacaactccgacgtcacaagcgacgacgacatgaccagaaatcggagagagagctccccgccccattccgtccacagcttcagcgatcgtgattgggaccgtcgcgggagatctcgggatatggaaccccgagatcggtggtcccatacacggaaccccagatctcgaatgcccccaagagatctgtcattgcccgtggtggcaaaaaccagtttcgaaatggatcgggaggatgaccgggactcacgggcatacgagagtaggtcacaggacgcagaatcttatcagaacgtcgtggatttggcggaggatcgaaagccacacaataccattcaggacaacatggaaaactacaggaagttgttatcattggtacagcttgctgaggatgatggtcatagccacatgacccaaggccactcttcacgctctaaacggtccgcgtacccaagcacttcacggggcctaaagactatgcccgaagcaaaaaaaagcacacaccgccgggggatctgtgaggacgagagctcccacggtgtgatcatggagaaattcattaaggacgtgtccaggagctctaagtcagggagggcccgggagtcgtctgaccgctcccagaggtttccacggatgtcagacgacaactggaaagacatatctctcaataaaagagaaagtgtgattcagcaaagagtctacgaggggaatgcattccgagggggcttccgttttaactccactctcgtcagccggaaaagggtcctagaacggaagcgcagataccatttcgacacggatggaaaaggctccattcatgatcagaaagggtgtccccgtaaaaagcctttcgagtgtggttccgaaatgcgaaaggccatgtcagtttcatccctatctagtctgagcagcccgagttttaccgaatcccaacctattgattttggtgcaatgccctatgtgtgcgacgaatgtggccgttctttctctgtgattagtgaatttgttgagcaccaaatcatgcataccagggagaacctgtatgagtatggtgaaagctttatccatagcgtcgccgttagtgaggtacagaaatcccaggtggggggcaaaagattcgagtgcaaagactgtggagaaaccttcaataaatctgctgctctggccgagcaccgaaagatacatgcacggggttatctggtggaatgcaagaatcaggaatgtgaagaagcgttcatgccatctccaaccttctctgagctgcaaaaaatatacggaaaggacaaattttacgagtgcagagtctgtaaggagactttcttacacagcagcgcactgatcgagcaccaaaaaatccactttggcgacgacaaggacaacgaacgcgagcacgagcgggagagagagcgagagcggggggaaacattccggccttctcctgctctcaatgagttccagaagatgtatggaaaggaaaagatgtacgagtgcaaagtgtgcggtgaaaccttccttcattctagcagccttaaggagcatcaaaagatccatacccggggcaatcccttcgagaataaaggcaaagtctgtgaggaaacatttattcctggacaatctctcaaacgcaggcagaaaacttataacaaggagaagctttgtgactttaccgacggccgcgatgcttttatgcagtccagcgaactgagcgagcaccagaagattcacagtagaaagaacttattcgagggacgggggtacgagaagagcgtcatacacagcgggccattcaccgagtcacagaagagtcacactattactagaccactggaaagcgatgaggatgaaaaggcattcacgatttcgtccaatccttatgagaatcagaagatccctaccaaagaaaacgtgtacgaggcaaaatcttacgaaaggagcgtcatccacagtctggcctctgtggaagctcagaaaagtcatagtgttgcaggtccctccaagcccaaagttatggcggagagcaccattcaaagctttgacgctatcaaccatcaacgcgttcgggccgggggcaatacatcggagggcagggaatactcacggtcagttatacactctctggtggcgagcaagcccccacgctctcataatggcaacgagttggtcgaatccaacgaaaaaggggagagttccatctacatttcagatctcaacgacaagagacagaagatcccagctagagaaaatccctgtgagggcgggagcaaaaatcgcaattacgaggactcagtgatccagagtgtcttccgcgctaagcctcagaagtccgttcctggggaaggaagcggtgagttcaagaaggatggcgaattttcggtgcctagtagtaacgtccgggagtaccagaaggcacgcgccaagaagaagtatatcgaacatagatcaaatgagactagcgtgatacactccctcccattcggggaacaaacattccgaccaaggggtatgctgtatgagtgccaggagtgcggcgagtgctttgcccattctagcgatcttactgaacaccagaagattcacgatagagaaaagccgtccgggtccaggaactatgagtggagtgtcattcgctccctggcaccaacagatccacaaactagctacgcccaggagcagtacgccaaggagcaggcgcggaacaaatgtaaagacttccgacaattcttcgccacctccgaggacctgaatactaaccaaaagatctatgatcaagagaagagccacggagaagagagtcagggtgaaaatacagacggggaggagacccattcagaggaaactcatgggcaggaaaccatagaagaccctgtcattcaaggctctgacatggaggacccccaaaaagatgaccccgatgacaaaatatatgagtgtgaggattgcggactggggttcgtggacctgaccgatcttactgatcaccagaaagtgcattctaggaaatgcctcgtggactcaagggaatacactcacagtgtcattcatactcactccatttccgagtaccagcgtgactatacgggcgaacaattgtacgaatgtcctaaatgtggcgagagtttcattcactctagcttccttttcgaacaccagagaattcacgaacaggaccaactgtactctatgaagggttgcgacgatggtttcattgctctcctcccaatgaaaccccggcgcaacagagcggctgaaagaaaccccgctctcgcaggttcggccatcaggtgtcttctgtgcggacaggggtttatccattcttcagccctgaatgaacacatgaggctgcaccgagaggatgacctcctggagcagtcacagatggccgaggaagccattatacccggtctggctctgactgagttccagaggtctcagacggaggaacgactgttcgaatgcgctgtatgcggagagtcctttgtgaacccagctgagctcgctgaccatgtgactgtccataagaacgagccatacgaatacggcagctcatatacccatacttcgttcctgaccgagcccctaaaaggcgcaatccctttttatgaatgtaaagactgtggtaagtcgtttatccacagcacggttcttaccaaacataaagagctccatttggaagaagaggaggaggatgaggccgcggccgccgccgccgccgcagcccaggaggtggaggctaatgtccacgtgccgcaggttgttctgcggatccaggggttaaatgttgaagcagcagaacctgaggttgaagctgcggaaccagaggttgaggccgccgagcccgaggtcgaggctgctgaaccaaatggggaagcagagggcccagatggagaagctgctgagccaatcggcgaggctggacagcctaacggagaggcggagcaaccaaatggggacgcagatgaaccagacggggctgggattgaagaccccgaggaacgagcagaagagcctgagggcaaggcagaagaacctgagggcgatgcggatgagcctgatggggtcggcattgaggatcccgaagaaggcgaggatcaggaaatacaggttgaagagccatattatgattgccacgagtgcacagagacttttacgagctctacggctttttctgagcatctgaaaacgcacgcctctatgatcatttttgaaccagccaacgcctttggcgagtgcagcgggtatatagagcgggctagcacgtccacaggaggagccaatcaagcagatgagaagtatttcaaatgtgacgtgtgtggtcaactattcaatgatcgcttatctctggctcgccatcaaaacacgcacacggggtag

SEQ ID NO: 18179 - DNA, 438 bp, synthetic construct
  source 1..438: mol_type = other DNA; note = Synthetic coding sequence
atggcaactatgatcccacctgtcaagcttaaatggctcgagcatctcaatagcagttggattaccgaggattccgagtctattgccacgagggagggcgttgctgtgttgtattccaaactcgtgtccaacaaagaagtggtacctctcccacaacaggtcctgtgcctgaaaggcccccaactgcccgacttcgagagagaatctctttcatccgacgaacaagatcactatctggatgcactcttgtcgtcccagctggccctggccaagatggtgtgttccgattccccctttgcaggcgcactgagaaagcggctcctggtcctgcagcgcgtgttctatgctctgtccaataaataccacgacaagggtaaagtgaagcaacagcaacattctccagaatccagctctggttcagctgatgtgcattcttag

SEQ ID NO: 18180 - DNA, 4284 bp, synthetic construct
  source 1..4284: mol_type = other DNA; note = Synthetic coding sequence
taagcaaagcaggagcgtcttgaaatagcttctctaagtaatcaggatcacacaagtaaaaaagaccctggcggccacaggaccgctgccattttgcacggtggcagcccagacttcgtgggtaacggcaaacatagagccaactccagcggacgaagcaggagggagcggcaatactcagtgtgtaacagcgaggacagcccaggctcttgtgaaattctctatttcaatatgggtagtccagaccagttgatggtgcataaggggaaatgcattgggtcggatgagcagctcggtaaactggtgtataacgctctggagacagccactgggggattcgttttgctgtacgagtgggtattacagtggcagaaaaagatgggtccctttctcacctcccaggagaaggagaaaatagataagtgtaaaaaacagatccagggaaccgagacagagtttaacagtctcgtgaagctaagccatcctaacgtagtccgttacctggcaatgaatcttaaggagcaagatgactctatcgtggtcgatatcctcgtagaacatatttcgggcgtttcactggcagctcacctaagccatagcggacccatccccgtacatcagttaagacgttatacagctcagctgctctcaggcctcgactatttgcatagcaatagcgtcgttcataaagtgctcagcgcgtctaatgtgctggtggacgcagaggggacagtgaaaattactgactattcaatttctaagaggctcgccgacatttgtaaggaagatgtattcgagcagactcgggtgcgctttagtgataatgcgttgccctacaaaacaggcaagaaaggagatgtgtggcgattggggttgctactgctgagcctctctcagggccaggaatgtggcgagtatcctgtcacaattcctagcgacttacccgcagattttcaagattttcttaagaagtgtgtatgcctggatgacaaagaacggtggagtcctcagcagcttcttaagcatagcttcataaacccacagcccaagatgcccctcgtggagcagtcacctgaggactccgaaggccaagattatgttgagaccgtgatccccagcaatcgcctccctagtgcggctttttttagtgagacgcagcggcagttcagtagatactttatcgagttcgaggaactacagctgctgggcaaaggggccttcggcgccgtgatcaaggtacagaataaactggacggatgctgctacgccgtcaaacggattcctattaacccagcctctaggcagttcagacggattaaaggcgaagtgacccttctgtcacgactccatcacgagaacatcgtgcgatattacaatgcttggatcgagcggcacgaaaggcccgcaggccctggcactccccctcccgacagcgggccactggcaaaagatgaccgcgccgctagagggcagcccgcatctgatactgacggcctcgattccgttgaagcagcagccccgcccccgattctgtccagttctgtggaatggagtactagtggggaacggagcgcgagtgcaaggttccccgcgactggccccggaagttctgatgatgaggatgatgacgaagacgaacacggtggcgtgttttctcagagctttctgccagcttccgattcggaaagtgacatcatctttgacaacgaggatgaaaatagcaagagccagaatcaaatggagtattgcgagaaatctaccctcagagatacgatcgaccagggcctgtatcgggatacagtccgcctctggaggctgttcagggaaattctggatggcttagcctacattcatgagaaaggcatgatacatagggatctcaagcccgtgaacattttccttgattcggatgaccacgtgaaaatcggggactttgggctcgcgaccgatcacttggcctttagtgccgattcaaaacaggacgaccagaccggcgatttgatcaaatccgacccgtccgggcacctgaccggtatggttgggaccgcactgtacgtgtccccggaggtgcaggggtctaccaagtctgcctacaaccagaaggtagatctattttctcttggtatcattttcttcgagatgtcctatcatccaatggtgaccgcgagcgaaaggatctttgtcctcaatcagctgagagaccccacaagcccaaagtttcccgaggactttgatgacggggaacatgctaaacagaaaagtgtgatcagctggttgctcaaccacgacccggcaaaacgtcccacggccacggagctgctgaaaagcgagttgctgcctccacctcaaatggaggagtcagagcttcatgaagtcctgcatcatacactgaccaacgttgatggaaaggcataccgcaccatgatggctcagatctttagccaacgcatctctccagccattgattatacttacgattccgacattctgaaaggcaacttctctatccgaacagcaaagatgcagcagcacgtgtgcgagaccattattcgcatattcaaaaggcacggcgccgttcagctttgcaccccgctgctgctaccgcggaaccgccagatatatgaacacaatgaagccgccctctttatggatcacagcgggatgctcgtgatgctgccattcgacctgaggatcccctttgccaggtacgtggcacgtaacaacatcctgaacctgaaacggtactgcattgagcgggtatttagaccgaggaagctggatcggtttcacccgaaagaactcttagaatgcgcattcgacatagtgacgagcacaacaaactctttcctccccaccgccgagataatctataccatttatgagattattcaagaatttcctgccctgcaggaaaggaattattccatttacctgaatcacacaatgctacttaaagctatccttctgcattgtggcattcctgaggataagctgtctcaagtgtacatcatcctgtacgacgctgtgacagaaaagctgacgcgccgagaagtagaagcaaagttctgcaatcttagcctctcaagtaacagcctttgtcggttgtacaaattcattgaacagaaaggcgatctccaggacctcatgccaacaataaacagtctaatcaagcagaagacaggaatcgctcagctggtcaagtacggattgaaggacttggaggaggttgtgggactgctcaagaaacttggcatcaaactgcaggttcttatcaacttggggctggtatataaggtccagcaacacaacgggattattttccaatttgtggcatttatcaagagacggcagcgggccgtcccagagatccttgctgcagggggtcggtacgatttgcttatcccccagttccgcgggccacaagcattaggtcccgtaccgaccgccattggcgtctcgatagccatagataaaatctccgcggctgtgctgaacatggaagagtcagtcactatctcctcctgcgacctgctagtcgtttccgtgggccaaatgtccatgagtcgagccataaacttaacgcagaagctttggacagctggaataacggcagaaataatgtatgactggagccagtcccaagaggagcttcaagagtattgcaggcatcatgagattacttatgtggccctggtgtcagacaaggaaggctctcacgtgaaggtgaaatcctttgagaaagaacggcagacagagaagagagtgcttgaaacggaactagtggatcacgtgctccagaagttgaggaccaaggtgaccgacgaacggaacggccgggaggcctcggataatttggccgttcagaacctcaaggggagttttagtaacgcttctgggcttttcgagatccatggagccaccgtggttcctatcgtcagtgtattagctccggagaaactgagcgctagcacccgaagaagatacgagacacaagtgcagaccagactgcagacatcgctcgctaacctacatcaaaaaagtagtgagatcgagattctggctgtggatctgcccaaggagactatattgcagttcttgagtttagaatgggacgcagatgaacaggcattcaacacaactgtaaaacagctactttctcggctgccaaagcagagatacctcaagctggtgtgcgacgagatatataacatcaaggtggagaagaaggtgtcagtacttttcttgtactcttaccgcgacgattactatagaatactattctag

SEQ ID NO: 18181 - DNA, 4767 bp, synthetic construct
  source 1..4767: mol_type = other DNA; note = Synthetic coding sequence
atgctaccgcccaagcatttgtccgctacaaagcccaagaaaagctgggcacctaacctctacgaactggatagcgacctcactaaggagccagatgtgatcataggcgaaggacctacagatagtgagttttttcatcagcggtttagaaacttgatatacgtcgagttcgtgggtccgcgcaagacgctcattaagctgagaaacctctgcctagactggctgcagcccgagacccgaaccaaagaggagatcatcgagctgttggtattggaacagtacctcaccataatacctgaaaaactgaaaccttgggtgcgtgcaaagaagcccgagaattgcgagaagcttgtcacactgctagagaattataaagaaatgtatcagccggaggatgataataatagtgacgtcacttcggatgatgatatgactcgcaacaggcgcgagtctagtccgccacactccgtccactccttttcagacagagactgggatcggaggggtcggagtagagacatggaaccacgggacagatggagccatactagaaatccacgtagccggatgccaccaagagacctaagcctgcccgtggtggctaagacgtcattcgagatggatcgggaagatgaccgagattctcgggcgtatgaaagcaggagtcaggacgccgagtcctatcagaatgtcgttgacctggccgaggaccgaaaaccacacaatacaattcaggacaatatggagaactacagaaaattgctgtccctcgtgcagcttgccgaggacgatggacattctcatatgactcagggacacagcagtcgctctaaacgctccgcctacccctcgacttccagaggcctgaagaccatgccagaggcaaagaaaagcacgcaccggaggggcatctgtgaagacgagtcaagtcacggggtaatcatggagaagttcataaaagacgttagccggtcaagcaaatcaggacgggcaagggagtcttctgatcggtcccagaggttcccacgcatgtcagatgacaactggaaagacataagcttaaacaagagagaaagtgttatccagcagagggtttacgaagggaatgccttcagagggggattcaggttcaacagtaccctagtaagccgaaagagggtgcttgaacgcaagagaaggtatcattttgacaccgatggcaagggcagtattcatgaccaaaagggctgcccacgtaaaaagccattcgagtgtggatcagagatgcgtaaagccatgtctgtgtcgagtctaagctctctcagtagtccttctttcaccgagagccagcccatcgatttcggggccatgccgtatgtgtgtgacgagtgcggacggagcttcagtgtgattagcgagttcgtggagcatcagatcatgcacaccagagaaaacctttacgagtatggtgagtcattcatccactcagtggccgtgtcggaggtgcagaagtctcaggttggtggcaaacggtttgagtgtaaggattgtggggagacattcaataaaagtgccgccctcgcagagcacagaaagatacatgccagaggctacctcgtcgaatgcaagaaccaggaatgtgaggaggcctttatgcccagtcctacttttagcgagctgcagaagatttatggaaaggacaagttctatgaatgccgcgtctgcaaagaaactttcctccatagcagcgccttaattgaacaccaaaaaatccactttggggacgacaaggataacgagcgggagcacgagcgcgaacgagagagagagcggggggaaacgttccggccttcgccagctcttaacgaatttcagaagatgtacggtaaagagaagatgtacgaatgtaaggtttgcggcgagacatttctacattcctcgagcctgaaggagcatcagaaaatccacacaaggggaaaccctttcgagaacaaggggaaggtttgcgaggagacatttatacccgggcaatctttaaagcgcagacaaaagacgtacaataaagaaaaactctgtgatttcacagatggccgggatgccttcatgcagagctcagaactgtctgagcaccagaaaatccatagtcggaaaaacctattcgaagggcgcggctacgaaaagagcgtgatccacagcggaccttttacagaatctcagaagtcccatacgatcacacggccactggagagcgacgaagacgagaaggccttcactatatcttcaaacccttacgagaaccagaaaataccaactaaagagaatgtgtacgaggctaaatcatacgagcggtctgtgattcacagcctggccagtgtagaggctcagaaaagccattctgtggctggcccttcaaagcctaaagtgatggcagagtcaacaattcagtcctttgacgccattaatcaccagcgcgtcagagcaggtggcaatacctctgaaggacgagaatattcaaggtcagtgatccactcattggtggcatctaagcctccaagatctcacaacggtaatgaacttgtagagtcaaatgagaaaggagagtcaagcatctacatcagcgatctaaatgacaagcgccagaagatcccggcgcgtgaaaatccgtgcgagggcggatctaagaatcgcaactatgaggattccgttattcaaagcgtgtttagagccaagccacaaaaatcagtgcctggagaaggcagcggagaatttaagaaagacggggagtttagcgtgccgtcctccaacgtgcgagagtatcaaaaggctagggcgaagaaaaaatatatagagcatagaagtaacgagaccagcgtcatccacagcctgccttttggcgagcagacttttcgcccaaggggcatgctctatgagtgtcaggagtgtggggagtgttttgcacactcttccgacctcactgaacaccagaagatccatgatcgcgaaaagccctcgggcagcagaaactatgaatggagcgttattaggtcactagctcccactgatccacagacaagctacgctcaagaacaatacgctaaggagcaggcccgtaataagtgtaaagacttcagacagtttttcgctacatctgaggacctgaacaccaatcagaagatttatgatcaagaaaaatcgcacggcgaggaatcacagggggaaaatacggacggcgaggaaacacactctgaggaaacacatggacaggagacaatcgaagatcctgtgatccagggtagcgacatggaagatccacagaaagacgacccggacgataaaatctatgaatgtgaagactgcgggctcgggttcgtggatctaactgacttgactgatcatcagaaggtgcacagtcgtaagtgtctggtggattccagggaatacactcatagcgtcatacacacacactccatctctgagtatcagcgggactatactggtgaacagttatacgaatgtcctaagtgcggagagtcattcatccacagctcctttttgttcgaacaccaacgaatccacgagcaggatcagctatacagtatgaagggctgtgacgatgggtttattgctttgctccctatgaagcccaggcgcaacagggcagcagagagaaatccagcgctggccggctcagccattcgctgcttattatgtggccagggctttatccattctagtgctctgaacgaacacatgagattgcacagggaagacgatctgctggagcagtctcagatggccgaagaagccattattccagggctggcgttaacagagtttcaaaggtcgcaaactgaggagcgtctgtttgagtgtgccgtctgtggtgagtcttttgtaaacccggcagaactggctgaccatgtgacggttcacaagaacgaaccttatgaatatggatcttcttacacccatacatccttcttaacagaaccactgaaaggcgctatccccttttatgaatgcaaggattgcggcaaaagcttcattcactccactgtgctgaccaaacacaaagaactgcacttggaggaggaggaagaagacgaggcagccgccgcggccgctgcagccgcccaggaagttgaggccaacgttcacgttcctcaggtggttttaagaatacagggtttaaacgtggaggctgccgaacccgaggtagaagctgcggagcctgaagttgaggccgctgaacccgaggtcgaagcagccgaacccaacggcgaggctgaagggccggatggggaggccgccgagccaatcggtgaagccggacagcccaatggggaggcagagcagcctaatggcgacgccgatgaaccagacggagcgggaatcgaggacccagaggagcgcgccgaggagcctgaaggcaaggctgaggagcccgagggcgacgctgacgagccggatggggtgggaattgaggacccagaagaaggggaagatcaggagatacaagttgaggaaccgtattacgactgccatgaatgtacagagactttcacctccagcacagccttctccgagcacctgaaaacgcacgcatctatgataatttttgaacccgcaaacgccttcggagagtgttctggatatattgagcgagccagtaccagtaccgggggcgctaaccaggcagacgagaagtactttaagtgtgatgtatgtgggcagctgtttaacgaccgcctgtccctggcaagacaccaaaatacccatacagggtag

SEQ ID NO: 18182 - DNA, 3012 bp, synthetic construct
  source 1..3012: mol_type = other DNA; note = Synthetic coding sequence
atgtcgcagtggacgcccgagtacaatgagctgtacaccctcaaggtggatatgaaaagcgaaatcccctccgatgcccccaagacgcaagagagtttaaaaggcattttactacatcctgaacctatcggcgctgcgaaatccttccccgccggcgtggaaatgataaattccaaggttggcaatgagttctcccacttgtgcgatgactcccagaaacaagaaaaggagatgaacggcaaccaacaggaacaggagaagtcactcgtggtgcgcaagaagaggaagagccagcaagctggaccgagttatgtacaaaattgcgtcaaggagaaccaggggatcctgggacttcggcaacacctggggaccccaagcgatgaggataacgacagttccttttctgactgtttatcatcccccagttccagtctgcattttggcgattctgataccgtcactagcgatgaggacaaggaggtgagtgtacggcactcccaaaccattttgaacgctaagtcaaggtctcacagcgccaggtcacacaagtggccccgcaccgaaactgagtcagtatctggcctactgatgaaaaggccgtgcctgcacggatcttcactccggcggctaccttgccgaaagcggtttgtgaaaaacaattccagccagagaacacaaaagcagaaggagcgtattttaatgcaaaggaaaaaaagagaagtgctcgcacgacgcaagtacgcactgctgccatcctcttcatcttccagcgagaacgacctgtccagtgagtcctctagttcaagctcgaccgagggtgaggaggatctgtttgtgagcgccagcgaaaaccaccaaaacaatcctgccgtcccttcaggttcgatcgacgaagacgtggtcgtcatagaggccagcagcactccgcaagtcacggctaacgaagagattaacgtgacctcaacagactctgaagtcgagatcgtcacggtgggcgagtcctatcgaagtcgttctacactcggtcactctcgaagccactggtcacaagggtcttcttcacacgcatctcggccccaggaaccccgtaatagatcccgcatatcaacggtgatccagccactgcgacagaatgcggccgaggtggttgatctcacagtcgatgaggacgagcccaccgtagtaccgacaacttccgcccggatggagagccaggcaacctcggcctccataaacaacagtaacccgtctacttccgaacaggcaagcgacaccgcatccgccgtgactagtagccagccttccacagtaagcgaaacttcagcaacactaacgtctaattctacaacaggcacatcaatcggtgacgacagtagacgcacaaccagcagcgcagtaaccgaaactggccctcctgccatgccccggctgccttcttgctgcccccagcattccccctgcggaggaagtagtcaaaatcatcacgcactgggccatccccacaccagctgctttcaacagcatgggcaccacttccaacatcatcaccatcatcatcacacaccacaccctgcagtccctgtgagcccgtccttcagcgaccccgcatgcccggtagaacgcccaccccaggtacaggcaccttgtggagccaatagctcatccgggacttcataccacgagcagcaggcactcccagtggatctaagcaactctggcatccgatctcatgggagcgggagcttccatggagcatctgccttcgatccttgctgtccagttagttcctccagggctgctattttcgggcaccaggcagccgctgccgcgccaagtcagccgttgtcttctattgatggatacggatctagcatggtggcacaacctcagccccagcccccaccgcagccttccctgagttcctgcagacactatatgcctcccccgtatgccagcttgacaaggcccttgcaccaccaggcctccgcctgcccacattcacatggaaaccctcctccacaaacacagccccctccgcaggtcgattacgtgatcccccacccagtccatgcattccactcacagattagctctcacgccaccagtcacccggttgcgcctcctcctcctacccacctggcgtccacagcggccccgattccccagcacctgccaccaacccaccagccaatttctcatcatatcccagccaccgcacctccagctcagagacttcatccacacgaggttatgcaaagaatggaggtccagcgcagacggatgatgcagcaccccacaggactcttcgttttttgcgtatctcgacgggcccatgaaagacccccgcctcacccacacaggatgcaccctaattatgggcatggacaccatatacacgttccccagaccatgagctcacaccctagacaggcccccgaacgtagtgcttgggagcttgggatcgaggccggcgtgaccgcagctacatacactcccggagcgctgcatcctcatctggcgcactaccacgcacccccaagactccaccatctgcaacttggagcgttgccactcatggttccggacatggcagggtacccccacattcgctatatttctagcgggctggatggcacctctttccgcggcccttttaggggtaattttgaggaattgattcaccttgaggagcgtctcggcaatgtgaatcgtggggcatcccaaggaaccattgagaggtgtacttacccccacaaatacaagaaggtcaccaccgactggttctctcaaaggaagctgcattgcaagcaggatggtgaagagggtactgaggaggacaccgaagagaaatgcacaatttgtttgagcatcttggaggaaggcgaggacgtgaggcggttaccatgcatgcacctgtttcaccaggtgtgcgtggatcaatggctgattacgaacaagaaatgtcccatctgtagggtcgacatcgaggcccagctaccaagtgagtcctag

SEQ ID NO: 18183 - DNA, 150 bp, synthetic construct
  source 1..150: mol_type = other DNA; note = Synthetic coding sequence
atggctctgcctcatgattccaacgaaactagttacttgctgcctcccaataacgaggattgggggagacaaaccatccccgactttgtgtacggacagaaagacctcatggccgaaggcattcaatggccccgcaatgcacctggctag

SEQ ID NO: 18184 - DNA, 375 bp, synthetic construct
  source 1..375: mol_type = other DNA; note = Synthetic coding sequence
atgagagcgtctccatgcatcagccaacccgccgcttcatggcacccaagaccaagcgcactccggccaaccgccggctccggtccagatacaaggacaccaggcacagtcgaggatgggtctgctccctgcccagcatttcggagcccagcagtcagtccatgcggcgaggaaccgtgttgtttccagattagccccgctgaggaaacattagagctgggtaggctggtaagccccgggaattgtgatacgctctccccccgtgcggcaggcttttatgcctgccacgtgagaagcctgattccctgccgcagtactaaagggagatggcccctgacagccagcgctgctggcctgagttcgttctctggctag

SEQ ID NO: 18185 - DNA, 93 bp, synthetic construct
  source 1..93: mol_type = other DNA; note = Synthetic coding sequence
atggctaccgacagctgggcactagccgttgacgagcaggaagcagccgctgagtcgagaaccgaactcccatcaccatattctacctcttag

SEQ ID NO: 18186 - DNA, 804 bp, synthetic construct
  source 1..804: mol_type = other DNA; note = Synthetic coding sequence
atgtgggaccagcggttggtgaagttagctctacttcagcacctgagagcattttatggcattaaggtgaagggtgtgcgtggacagtgtgatcggaggaggcatgaaaccgcggccacagagataggtggtaagatctttggtgtgccgttcaatgctcttccacattcggccgttccagagtacggacatatcccgtcctttctagtagacgcttgtaccagccttgaagaacatattcataccgagggcctgttcagaaagtccggaagcgtgattagactgaaagccctaaaaaataaagtggatcatggagagggatgcctcagcagcgcccctccttgcgacatagctggcttactcaagcagttctttagagaactgcctgagcctattctccctgcagacctgcacgaagctctcttgaaggcccagcagctaggcacagaagagaagaacaaagcgatcttgcttctgagctgcctgctcgccgaccatacagttcacgtgctgcggtacttcttcaatttcctacgaaatgtgtctctacgctccagcgaaaacaaaatggattcatccaacctggctgttatatttgcccccaacctgttgcaaaccagtgaaggccatgagaagatgtcctcaaatgctgaaaaaaaaggagtttatcaaacactgagctggaagcgttaccaaccttgctgggtgctgatggtgagcgtgttactgcaccactggaaggcccttaagaaggtgaatatgaagcttctggtgaacatccgcgagcgggaagacaatgtttag

SEQ ID NO: 18187 - DNA, 1113 bp, synthetic construct
  source 1..1113: mol_type = other DNA; note = Synthetic coding sequence
atggggtttaacaggccctccaaaattcaggaaaacgccctgccactgatgctcgccgagcccccgcagaatctcatcgcgcagagccagagtgggaccgggaaaactgcagccttcgttctggccatgctgtcccaggtagagcccgcgaacaaatatccacagtgtctgtgtctgtcccctacgtatgagctggccctgcagacaggtaaagtcatagagcagatggggaagttttacccggagctcaagctcgcctatgcagtgagaggcaataagctggaaagggggcaaaaaatcagtgagcagattgtcatcggcacaccggggactgtacttgactggtgctctaaactcaaatttatcgatcccaagaagatcaaagtgttcgtgctcgatgaggccgatgtcatgatagctacgcagggacatcaggaccaatctatacgcatccagagaatgctcccgcgcaattgccagatgctgctcttctctgctacgtttgaggattctgtctggaaatttgcccaaaaggtcgtgcccgatcccaacgtgatcaagttgaagcgcgaagaagaaactctggacaccataaaacagtattacgtgctgtgttccagcagggatgaaaaattccaggctttgtgcaatctttacggagccatcaccatcgctcaggccatgattttctgccataccagaaagactgcttcgtggctcgccgcagagctaagcaaagagggccaccaggttgccctactcagtggcgagatgatggtagagcagcgcgctgccgtcattgaaaggttccgggagggcaaagaaaaagtgctcgtaacgacaaacgtctgtgctagaggcatcgatgtcgagcaggtatctgtggtcatcaacttcgacctgccagtggacaaagatggtaacccagataacgaaacgtacctgcacagaatcgggcgtaccgggcgtttcgggaaacgaggcttggctgtcaatatggtcgatagtaaacactctatgaatatcctgaacagaatacaggaacattttaacaaaaagatcgaaaggctggacactgatgacctggacgagattgaaaagatcgctaactag

SEQ ID NO: 18188 - DNA, 2712 bp, synthetic construct
  source 1..2712: mol_type = other DNA; note = Synthetic coding sequence
atggcaactagcgcagacagccccagcagtccgctcggagcggaagatctgctttcagactcatccgagcctcccggtctgaaccaggtgagttccgaagtgacatcccagttgtacgccagcctcaggctgtcaaggcaggccgaggctacagcacgcgcccaactttacttgccctccacttcaccgcctcatgagggactcgatgggtttgcgcaagaactgagtagaagtttgagcgtgggattggagaagaacctgaaaaaaaaggatggatccaagcatatcttcgaaatggagagtgtaagaggccaactgcaaaccatgctgcagacttctcgcgacactgcttacagagatcccttgatccccggggccggttcagaaaggcgggaagaagattccttcgacagtgattccacggcaaccctgctcaacactaggcctttgcaggatttgagcccttcgtcctcagcacaagcgctcgaggaactgtttcccagatatacctctctgcggcccggacctcctctgaaccctcccgactttcaggggctccgggatgccctcgacagtgaacacacacggcgtaaacattgcgaaagacacatacagtcccttcagacccgggtcctcgagcttcagcagcagctcgcagtggcagtcgcagcggaccgaaaaaaggacacaatgatagagcaactcgacaagacactcgcacgggtcgtggaaggctggaacaggcacgaggctgaacgcacggaagtgctacgcggcctccaagaagagcatcaagctgctgaactgaccagatctaagcaacaggaaacggtaacgagactagaacaaagtctgtccgaggccatggaggccttgaaccgtgagcaggagtcagcgagactccaacagcgagagagagaaacacttgaggaagaacggcaggccctcacccttcgtttagaggcagagcagcagcgatgctgtgtgctgcaggaagagcgtgacgctgcgagggctgggcagctgtccgagcaccgagaactggaaaccttacgggctgcattggaggaagagcggcagacttgggctcagcaggagcaccagctgaaagagcattatcaagccctccaagaagagtcacaggctcaactggaacgcgagaaagaaaaaagccagagagaggcgcaggccgcatgggagactcagcaccagctggccctcgtgcagtctgaggtccgtaggttggaaggagaattggacaccgcccgccgagaaagagatgctttgcagttagagatgtcactggtgcaggcacgttacgagagtcagagaatccagctcgagtctgaactagcagtgcagttggaacagcgggtgacagagcggctggcccaggcacaggaatcatcgctaaggcaagctgcgtccttaagagagcatcaccgaaagcagcttcaggatctgtccgggcagcatcagcaggagctggctagccaactggctcagttcaaagttgaaatggccgagagggaagagcgccagcagcaggttgcagaggattatgaactgcgtctcgcccgggagcaggcgcgagtatgtgagcttcagtcaggtaatcaacagctggaggagcagcgggttgagttggtggagagacttcaggcaatgctccaggcccattgggatgaagccaaccagctgctgagtacaaccctgcctccccccaatccaccagcccctcctgctggcccctccagccctggccctcaagaaccagaaaaggaagagcgacgagtgtggacaatgcctccgatggctgtagctcttaaaccagttctgcagcaatcacgcgaagcccgggacgagctgcctggagctccaccagttctctgctccagctcgagtgacttgtctctgctgctgggcccctcctttcagagccagcattcattccagccgcttgaacctaagcccgacctgacaagcagcaccgctggggccttcagcgctctcggtgcctttcaccccgaccatagagccgaacgcccttttcctgaggaggacccaggaccggatggagagggcctgctgaaacaggggctccctcccgcacaactggaaggcttaaagaatttcttacaccagctgctggagacagtgccccagaataacgagaacccctcagtggacctactgccccccaaatccggcccactcacagtaccatcatgggaagaggccccgcaggtcccccggattcccccaccagtacacaaaactaaggtgcccctagcaatggccagttcattgttccgcgtacccgaaccaccgagctcccacagccaggggtccggcccgagctccggtagcccagagcggggaggggacggacttactttccctaggcagctaatggaagtgtcgcagctcctgaggctgtatcaagcgagagggtggggtgcactcccggcggaggacctactgttgtatctgaagaggttggaacatagtggaaccgatggcagaggggataatgtgccaaggcgtaacaccgattcaaggcttggtgagattccacggaaggagataccgagccaggcagtgccaaggcgcttagccactgcccctaagaccgaaaaacctcctgcaaggaaaaagagtggacatccggccccttcgtctatgcgaagcagagggggtgtatggcgatag

SEQ ID NO: 18189 - DNA, 138 bp, synthetic construct
  source 1..138: mol_type = other DNA; note = Synthetic coding sequence
atgcccctgctggtagaaggacggcgtgtgcgcctgccccaaagcgctggtgatctcgtgcgcgcccaccctccgcttgaggctccttcccctttctgggtgctcatgatgcccctgctggttaccctgtggtcctag

SEQ ID NO: 18190 - DNA, 1083 bp, synthetic construct
  source 1..1083: mol_type = other DNA; note = Synthetic coding sequence
atggaggaacttagtcaagccctggcctctagtttttctgttagccaggatttaaactctacagctgctcctcatcctagactatcgcagtataaatccaagtactcctctctggaacagtctgaaagaaggagacgactgctggagttgcagaaatcgaagagacttgactacgttaatcacgctagacggctggctgaggacgactggactgggatggagagcgaagaggaaaataaaaaagatgacgaggagatggacatcgacactgtgaaaaaactgcccaaacactatgccaaccagcttatgttgagtgagtggttaattgatgtgccatcagacctgggccaagagtggatcgttgtggtctgccccgttgggaagcgtgcactcatcgtggcctctaggggatcaactagcgcgtacaccaagagtggatactgtgtgaaccgcttttcaagcctgctgcccgggggaaatcgtcgtaattctactgcaaaggattacactattctggattgtatctacaacgaagtaaaccaaacttattacgtgttggatgtgatgtgctggaggggccacccgttttatgactgccagactgattttcggttctattggatgcatagcaagttacctgaggaggaaggccttggagagaaaaccaaacttaaccctttcaagttcgtgggcctcaagaacttcccctgcacacctgagagcctatgtgacgttctcagtatggattttcctttcgaggtggatggtcttctgttctatcataaacaaacacactactcccctggcagtacaccactagtgggatggcttagaccatacatggtgagtgacgtgctgggcgtggccgttcccgctggtccgttgacaacaaagcctgactatgcaggacaccagctccagcagatcatggaacataagaagagccaaaaggagggcatgaaggaaaaactgacccacaaagccagtgagaatggacattatgagctggagcacctaagtacacctaagttgaaaggatcctcccactccccagatcacccaggctgcctgatggaaaactag

SEQ ID NO: 18191 - DNA, 1353 bp, synthetic construct
  source 1..1353: mol_type = other DNA; note = Synthetic coding sequence
atggtgccacttgtggccgtggtctcgggtccaagagctcagttgtttgcttgtttactgaggctgggcacgcagcaagtggggccactgcaacttcacaccggcgcctctcacgcggcacgaaatcattatgaagtgctagtcctcggaggcgggtccggtggtataacaatggccgctcggatgaaaaggaaggttggtgctgaaaacgttgccattgtggaacctagtgagaggcatttctaccagccaatatggacacttgttggcgccggagccaagcagctgagctcttcagggcgacctacagcaagtgtgataccaagtggcgttgagtggattaaggctcgtgtgaccgaactcaatcccgacaaaaattgtattcacaccgacgacgacgagaaaatcagctaccgctacttgatcatagcccttgggatccaactggactacgaaaagatcaaaggattgcccgagggcttcgcgcatcccaagataggcagcaattatagcgtcaaaaccgttgaaaaaacctggaaggccctgcaggatttcaaagaggggaacgccatttttacttttcccaatacccctgtgaaatgtgccggcgctccccaaaaaataatgtatctgagtgaggcttactttaggaaaacagggaaacgtagtaaagctaatatcatcttcaacacctccctgggcgcaatatttggagtgaagaaatatgccgatgctctgcaggagattatccaggaacggaatttaactgtcaactataaaaagaacctcatcgaagtgagggctgataagcaggaggctgtgttcgaaaaccttgataaacccggtgagactcaggtaatttcttacgaaatgctgcatgttaccccccctatgtccccacccgacgtcctcaaaacatctcctgtcgccgatgcggctggatgggtcgacgtcgacaaggaaactctccagcatagacgctaccccaacgttttcgggatcggcgattgcactaacttgcctacaagtaagacagccgcagccgtcgcagcgcagtcgggcatcttagatcggacaatttctgtgattatgaaaaatcaaaccccgacaaaaaaatacgatggttatacttcgtgtcccttggtcactggctacaaccgggtgattttggccgagtttgactacaaggctgaacccctcgagacatttccgttcgaccagtcaaaggagcgcctgagcatgtatctgatgaaagctgatcttatgccattcctgtactggaatatgatgctacgtggatactgggggggtcccgcgttccttaggaagctgttccaccttggcatgtcttag

SEQ ID NO: 18192 - DNA, 1113 bp, synthetic construct
  source 1..1113: mol_type = other DNA; note = Synthetic coding sequence
atgggattcaatcggccatctaagattcaggagaatgcacttccactcatgctggccgaaccccctcagaacctgatcgcacaaagccaatccggtactggcaaaacggcagccttcgttctagctatgttatcacaggtggaacccgctaataaatacccccagtgtctttgcctgagcccaacttacgagctcgcgctccaaaccgggaaagtcattgaacagatgggcaaattctatcccgagcttaagctcgcgtacgctgtccgaggaaataaactggaacgtggccagaaaattagcgagcagatagtaattgggactccagggaccgtgctggattggtgctctaagctcaagtttatcgaccctaagaagattaaggtattcgtcctggacgaggccgacgtcatgatcgcaacacaaggtcaccaggatcaatctatccgcattcaaaggatgttacctagaaactgtcagatgctgctgttttctgcaacttttgaggattctgtgtggaagttcgcacagaaggtggtccctgacccaaacgttattaagctgaaaagagaagaggaaactctggatactatcaaacaatactatgtgctgtgttcatcccgagacgagaaatttcaagctctctgtaatctgtatggggcaatcactatagcgcaggctatgatattttgccatactcgcaaaacggctagttggttagccgccgaattgagcaaagaaggtcatcaggtcgccctgctttcaggggaaatgatggtggagcagagagcagctgtaatagagaggtttagagaagggaaggagaaagtccttgttacgactaatgtctgcgcccgtgggattgatgtcgaacaggtgagtgtagtgattaactttgacctacctgttgataaagatgggaaccccgataatgaaacgtacctgcaccgcattgggcggaccggaagattcggtaaacgtggcttggcagtgaatatggttgactccaagcacagcatgaacattctgaatcgaatccaagaacattttaacaagaagattgagcgactggacaccgacgatttggacgagatcgaaaagattgccaattag

SEQ ID NO: 18193 - DNA, 738 bp, synthetic construct
  source 1..738: mol_type = other DNA; note = Synthetic coding sequence
atgggtggtggctatgatctgaatctgtttgctagcccgccagacagcaattttgtttgcagtgtctgtcacggcgtgctgaagagaccagcgcgccttccctgctctcatatcttctgcaagaaatgcattctgcgctggctggccaggcaaaaaacttgtccgtgttgccgaaaggaggttaaacgtaaaaaggtggtacatatgaacaagctacgcaagaccattgggagactcgaagtaaaatgcaagaacgccgacgctggctgcattgttacttgtcccctggcgcacagaaagggacatcaggactcttgcccttttgagttaactgcctgcccaaatgagggctgcacatcacaagtgccaaggggtacgctggcggaacatcgccaacattgccagcaggggtctcagcagagatgtcctctgggatgtggtgccaccctagatcccgcagagagagcccggcataattgttacagagaactccacaatgcatggagcgtcaggcaggagcgcaggaggccgctccttctgtctctccttcggagagtgcggtggcttgaccaagcgacaagcgttgtgcgacgggaactcgccgaacttagcaatttcttagaagaggacacagcccttctggaaggcgctcctcaggaggaagctgaggccgcaccagagggtaacgtcggagcagaggtggtcggcgagccccgagctaacataccgtgtaagtag

SEQ ID NO: 18194 - DNA, 309 bp, synthetic construct
  source 1..309: mol_type = other DNA; note = Synthetic coding sequence
atgcgcgcatctccatgcattagtcagcccgctgcatcttggcacccccgcccatcagccctgcgccccacggctggctctgggcccgatactcggacacccggtacagtcgaggatggcagcgcgccttgcccggccttcagatctcccgccgtctccccatgcggcgaagagccttgttgctttcagattagcccagccgaggaaactctggaactgggtagattagtctctcctgggtgccacaagtcaagtgccccgcaggagcggaggctggacccgcgggcccgttgtgttgtgcatatctag

SEQ ID NO: 18195 - DNA, 1473 bp, synthetic construct
  source 1..1473: mol_type = other DNA; note = Synthetic coding sequence
atggaggactccgcatcggcttcactgagctctgcagccgcgaccggtacttctacctcgactccagcggctcctacggcacgtaagcagttagacaaggaacaggtgcgtaaggccgtggacgctctgctcacacattgcaaaagccgcaagaacaattacggactattgttgaacgagaatgagtcgttattcctgatggttgtgctctggaagataccctctaaggagctaagggtgcggctgacccttccccacagtattcgctctgactctgaagacatttgtctttttaccaaagatgagccaaacagtactccagaaaagaccgaacagttctacagaaaactcctcaacaagcatggtatcaagaccgtctcccagattatcagtctccagacgttaaaaaaagagtataagagttacgaagctaaattacgtctgctatctagctttgactttttcttgactgacgcccgcatacgccggctgctgccctctctcatcggcagacatttttatcagagaaagaaggtgcccgtttctgttaacctcttgagcaagaatctaagtcgcgaaattaacgactgcattggtggaacggtgctgaacatcagcaaaagcggatcttgtagcgccatccggattggacacgtgggtatgcaaatagagcacatcatcgagaatattgtggctgtgaccaagggcctgagcgagaagctgcccgaaaagtgggaaagtgtaaagctgttattcgtaaaaactgagaaaagtgcagccctgccaatctttagtagttttgtgtcaaactgggatgaggctactaagcgatccctgcttaacaagaagaagaaagaggcgcgaaggaaaagacgcgagaggaatttcgaaaagcagaaggaacggaagaagaaacggcaacaagcgaggaaaacggcatctgttctttctaaggacgacgtggccccagagagcggcgatacaactgtgaagaagcccgagtccaagaaggagcaaaccccggagcatggcaaaaagaaacgaggacgcggcaaagctcaagtgaaggctaccaacgagtctgaggatgagattccgcaacttgtcccaatcggtaagaagacacccgccaacgagaaggtggagatccaaaaacacgcgaccgggaaaaaaagccctgccaaatctcccaatcctagtacacctcggggaaagaagaggaaagccctgcctgccagcgagacccctaaagccgccgagagcgaaacaccaggtaagagcccggagaagaagcccaagattaaggaggaggcggtgaaggagaaatcccccagccttggcaaaaaagatgcgaggcagacccccaagaagcctgaggccaagttctttacgactccatccaagtccgtccggaaagcctctcacacgcctaagaagtggccaaagaagcccaaagtcccacagagcacctag

SEQ ID NO: 18196 - DNA, 1809 bp, synthetic construct
  source 1..1809: mol_type = other DNA; note = Synthetic coding sequence
atggctgagtttcgggtgcgagtttccacgggagaagccttcggagccggaacgtgggataaagtgtctgtctcgattgtggggactcggggagaaagtcccccattaccactggacaacctgggcaaggagttcacagctggggcagaggaagactttcaggttacactaccggaggacgttggccgggtgttgctcttgcgcgttcataaggcgcctccggtgctgccactcttgggtcctctggctccagatgcatggttttgtcgctggttccagctcacaccccccagaggtgggcacctgctgttcccatgctaccagtggctggaaggagctggcactttagtcctgcaggagggaaccgcaaaggtgtcgtgggccgatcaccatcctgtcttacagcagcagagacaggaagaactccaggcccgccaagaaatgtaccagtggaaggcctacaaccccggctggccccattgcctggacgaaaagacagtcgaagatttggaacttaacattaagtactccactgccaagaatgccaatttttacctgcaggcagggagtgctttcgcagagatgaaaatcaaagggttacttgaccgaaagggtctctggcgctctctcaacgagatgaagcggatattcaattttcgcagaacccctgcggccgagcatgcattcgaacattggcaggaagatgcgttttttgcatctcagttcctgaacggactgaatcccgtgctcattcgtcggtgccactacttgcctaaaaactttccggttactgacgcaatggtggctagcgtcctaggacccggtacgtccctgcaggctgagcttgagaagggctctctgttcctggtagaccatggtatcttgagcggtatacaaacaaatgtgatcaacggcaagcctcagttttccgctgccccgatgaccttactatatcagtctcccgggtgtgggcctctgctgcctttagcaatccagctgtctcagacacctggccctaatagtccgatctttctacctacagacgataaatgggactggttgcttgctaaaacctgggttcgtaacgcagagttctcattccacgaagcactgacccatttattacatagccatcttctccccgaggtgtttacgctggccacgttacgtcagctcccgcactgccatcccctgttcaagtccaccggcatcggaatcgagggcttcagcgaactgattcaacgtaacatgaagcagctgaactacagtcttctgtgtttgcctgaagacatcaggacaaggggcgtcgaggatataccagggtactattatcgagatgatggtatgcagatctgggggatcccttccagcctcgaaactagggaagcgcttgtacagtatgtgacaatggtaattttcacatgttcagcaaaacacgcagccgtctctgctggccaatttgattcctgtgcctggatgcctaacctacccccctcgatgcaattgcctccaccaacatccaagggtttggcaacatgcgagggttttatcgcaaccctgccccccgtgaatgccacatgtgacgtgattctggcattgtggctccttagcaaagaaccaggcgaccagcgccctctgggcacttaccctgatgagcactttacggaggaggcaccaaggaggagcatcgcgactttccagtcgcggctggctcagatttcacgcggtattcaggagaggaatcaaggcctcgtcttgccatacacctacctggacccgcccttaatcgaaaactctgtctccatatag

SEQ ID NO: 18197 - DNA, 618 bp, synthetic construct
  source 1..618: mol_type = other DNA; note = Synthetic coding sequence
atgagcgtagaccccatgacctacgaagctcagtttttcggcttcacgccccagacgtgcatgttacgaatttatattgcttttcaggactatttgttcgaggttatgcaagccgtcgagcaggtaatccttaagaaactagatggcatacctgattgcgatatctcccccgtccagattaggaaatgtacagagaaattcctgtgttttatgaagggccacttcgacaatctgtttagtaagatggagcagctttttttgcaattaatcctccggattcccagcaacattttgcttccagaggataaatgcaaggaaaccccctactctgaggaggattttcagcatctgcaaaaggagatcgagcaactgcaggagaagtataaaaccgagctttgcactaagcaagcgctgctagccgagttggaggagcaaaagatcgttcaggccaaactgaaacagactctgactttttttgatgagctccacaacgtgggaagagaccacggcaccagtgatttccgggagagtcttgtcagcctggtgcagaactccagaaagctgcaaaacataagagacaatgttgaaaaagagagcaaaagacttaagatatcttag

SEQ ID NO: 18198 - DNA, 360 bp, synthetic construct
  source 1..360: mol_type = other DNA; note = Synthetic coding sequence
atgatcctgcagcagccactgcagcgcggtcctcagggaggggcacagcggcttcccagggctgccctgggcgtgacatggggactcgatgcgagggagcctctgaggaagcagttcctgagtgaagagaatatggccacacattttagtcaactgagtctccacaatgatcacccttattgttcgccccccatgacattcagccccgcgctcccaccgctgcgctccccatgcagcgagctgctgctgtggaggtaccccggatccctgattcctgaggctcttcgcttgctccgattaggagacacgcctagccctccttacccggccacaccagccggtgatattatggaactttag

SEQ ID NO: 18199 - DNA, 1473 bp, synthetic construct
  source 1..1473: mol_type = other DNA; note = Synthetic coding sequence
atgcccatgccaacagagggcacaccaccgcccctgtccggcactcctatccccgttcccgcatactttaggcatgccgaacctggatttagcctgaagcgccctaggggtttgtcccgctccctaccacccccgccccctgcaaaggggtcaattccaatcagtagactcttcccgccgagaacgccaggatggcatcaattgcaacccaggcgtgtaagcttcagaggagaggccagtgagaccctgcagtcccctggttacgacccgtccaggccagagtctttcttccagcagagcttccagcgcctgagccgtttaggccacggttcctatggggaggtcttcaaggtgcgatctaaggaggatggcagactttatgcggtgaaaaggagcatgagtccattccgcggtccaaaggatagagcccgcaagctcgccgaagtcggcagtcacgagaaagtaggtcagcatccctgctgtgtaaggctcgaacaggcctgggaagaggggggcattttatatctgcagaccgaactgtgtggccctagccttcagcagcattgtgaagcctggggcgcctcacttcccgaagcacaggtttgggggtacctgcgcgacactcttttagcactagcgcatttgcattctcagggcctcgtgcatctcgacgtgaagccagctaatatcttcttgggccccagggggcgttgcaagctcggagacttcggtctgctggttgagcttgggacggcaggtgcgggggaggtacaggaaggtgaccctaggtacatggcaccagaattgttgcagggatcatatggcactgccgccgatgtgttttcactaggcctaactattctcgaggtggcctgcaacatggaactgccccacgggggggagggatggcaacagctccgccaggggtacctacctcccgaattcaccgctggacttagctccgaactcaggtctgtcctggttatgatgttggagccggatccaaagctccgcgcaactgcagaagccttactcgctctacctgtcctgcgacagccgcgcgcgtggggagttctgtggtgcatggcggccgaagctcttagccgcgggtgggcgctgtggcaagcactcctggcacttctgtgctggctttggcacggcttggcccaccccgcatcctggctgcaaccattgggtccacctgccaccccaccgggctctccaccttgttctttactactcgatagttccctctcgagtaactgggacgacgactcactaggtccttccttgtcaccagaggccgtgctggccaggactgtgggatccacatctacacccaggagcaggtgtaccccaagagacgctctcgacctgtccgacatcaatagcgaacccccaaggggctcttttccaagcttcgagcctcggaacctcttatcgctcttcgaagacaccctggaccccacgtag

SEQ ID NO: 18200 - DNA, 1293 bp, synthetic construct
  source 1..1293: mol_type = other DNA; note = Synthetic coding sequence
atgctggagcgatggcatcagctgcagcctcggcgggtgagttttcgaggagaagcgtctgagaccctccagagccctggatatgatccgtcccggccagagtccttctttcagcaatccttccaacggctgagtagactcgggcatggatcatacggggaggttttcaaggtcaggtctaaggaggacgggcgcttgtacgcagttaagcgctctatgagccctttcagaggaccaaaagatcgtgctaggaagcttgctgaggttggctcccacgagaaagtgggccagcatccgtgctgtgtgaggcttgagcaagcttgggaggagggtgggatcctgtatcttcagaccgagctgtgcgggccaagcctgcagcagcactgtgaggcgtggggtgccagcctgccagaagcccaggtatggggatacttgcgcgacacgctgctcgcgctagcccacctgcacagccagggtctggtgcatctggacgtaaagccagcgaacatatttctggggccacggggtcgatgcaagctgggcgacttcggattgcttgtggagctagggactgctggcgctggagaagttcaggaaggagaccctcgctacatggcgcctgagctgcttcagggttcctacggcacagcggccgatgtcttctccctgggacttactattttggaagtggcttgcaacatggagctgccgcatggaggcgaagggtggcagcaactccgacagggctacctccctcccgagttcacggccggattgtcttcagaactgcgatcagtgctcgtgatgatgcttgagccggaccctaagctcagagcgacagccgaggcgctgctagcgctcccagttcttaggcagccacgagcctggggtgtgctttggtgcatggctgcagaagcacttagtcgaggctgggcactctggcaagccctgcttgcgcttctgtgttggttatggcatggcttagcacaccctgcttcctggctgcaaccactgggaccaccagccactcctcccggatcacctccctgtagcctgttattagattccagcctttcctcaaattgggatgatgatagtctcgggcccagcctgtcccccgaggctgtgttagcgaggaccgtcgggtctacatcaacaccgcggtcacgctgcacacccagggacgccttggatttgtccgacatcaactcagaacctcctcgagggtcgttcccatctttcgaacctcgaaaccttttgagtctcttcgaggatactctggaccccacctag

SEQ ID NO: 18201 - DNA, 666 bp, synthetic construct
  source 1..666: mol_type = other DNA; note = Synthetic coding sequence
atgcaggtccaggatgatggtgtgaatctgatcccattcgctaagtgttctagagtggtaagtcggtccccgccacccagactcccctcccaaagtctgcgacccatgcctcagagatacggggacgtgttctggaaaaacttaaaccagcggcccacacctacttggctggaggagcagcatattccccctatgctcttgcctccccccgagatgctctggagaaggaagaagaggcgtccatgccttgaaggcatgcagcaacaagggctcggcggcgtgccagcaagagtgcgagcagtgacctaccatttagaagatcttagaaggcgccagagcattatcaatgaactcaagaaagctcaatggggatcgagtggtgcggcttctgaacctgtagtgctcggtgaagaggggtgcggctttcctagcaccaatgagtatcccgatctggaagaagagcgcgccacctaccctcaagaggaagaccggtttctaaccccagggcgcgcccagctattgtggagcccctggtctcccctagaccaggaagaggcctgcgccagccgccagctacactcactcgcctctttttccactgtgacagcccgacggaaccctttacacaatccttgggggatggagctggccgcctccgaggagtag

SEQ ID NO: 18202 - DNA, 2232 bp, synthetic construct
  source 1..2232: mol_type = other DNA; note = Synthetic coding sequence
atggaagctgctgcggttactgtgacgcggtctgccactcgcagacggcggcgccagctgcagggcttagctgccccagaagctggaacacaagaggaacaggaggatcaagagccgcgtccgcgccggcgccgaccagggcgaagtattaaggatgaagaagaggaaacagtcttcagagaggtggtctctttttcaccggatccactgcccgtgcgatattacgacaaggacaccactaagcctatatctttttatctctcctccttagaggaactgctcgcttggaagccacggcttgaggacggctttaatgtggccctcgagcccctggcctgcaggcagcctccattatctagtcagcgacctcgcactcttctgtgccatgatatgatgggtgggtaccttgacgataggtttatacagggcagtgtcgtgcagacgccctacgctttctatcattggcagtgtatagatgtgtttgtgtacttcagtcaccatactgtaaccatcccacctgtgggatggaccaataccgcccacagacatggagtgtgcgtcctgggaaccttcatcacggaatggaacgagggcgggagactatgtgaggccttcctcgcaggcgacgagagatcttaccaggcggtggctgataggctcgtgcagatcactcaattcttccgatttgatggttggttaattaacatcgaaaattcactgtccctggctgcagttggcaatatgccccccttcctgcgctacctgaccactcagctacatcgtcaggtccccgggggactcgtgctctggtatgattccgtggtgcagtcgggtcaacttaagtggcaggacgagctgaaccagcacaaccgtgtgttcttcgactcttgcgatggatttttcacgaactacaactggcgcgaggaacatcttgagcgcatgctgggccaggccggagaacggcgggctgacgtgtacgtcggcgtggatgtgtttgccagaggcaatgtggtgggggggaggttcgataccgataagtcactggagttgattagaaaacatggttttagcgttgccctgttcgctcccggatgggtgtacgaatgcctcgagaaaaaagattttttccagaaccaggataaattctggggcaggctcgaacgttacttgcccacgcactccatttgctccctgccattcgtgactagcttttgtctgggaatgggggctagaagagtatgctatggtcaggaggaagccgtcgggccctggtatcatctgagcgcccaagaaattcagccattgtttggtgaacaccgcctgggcggtgacggccgcggctgggtccgtacccactgctgcttggaagacgcctggcacggaggctctagcctcctggtgcgcggcgtgattccacctgaagtaggcaatgtggcagttagattgttcagcctccaagccccagtccctcctaagatttacctgtcaatggtgtacaagctggaaggacctacagacgtcaccgtggcactggagttaacaactggggatgccggaagctgccatatagggggtatttccgtcctgaacgctgaaacttcaagtcgccacagcctgcgacctctgcgtgtgcctcccacaaaactggccaggtgggtgggccggtgcgggcgccagctaagtgggggttgggtccagcattgttatgaggtttcgcttagaggctgtctgcttttggatctgctggtgtgcttcagcagacctcccggctctagagaggaggagtcattcacatgtcggcttggcgagatccaagtcgtcgacgctgcaagtctcctcgctcctctgcctcaggtccaggctgttaccatatctcacattcggtggcagccctctgccagtgaaagggaagggcctcccgctctgctgcagctgagctgcaccctacattggtccttccttctgagccaggtgagatgttttcgaatccactgttggggtggaatgtcagacgattcacctggtcgcgaactcccacggccagagatgcctatgtttctggggctggcctttgcgacacagtacagaatcgttgacctgctcgtggaagccgctgggccgggccaggaccggagaatggagtttttggtcgagcctgtcccgaaggaaggcttcagggtaccacaggctgagtgggggcgggcagttcttttgtactctgcccccgcttag

SEQ ID NO: 18203 - DNA, 579 bp, synthetic construct
  source 1..579: mol_type = other DNA; note = Synthetic coding sequence
atgtcaaccgccgctgtgccagagctgaaacaaattagcagagtggaggctatgaggctggggccaggctggtcacactcatgccacgccatgttatacgcagcaaatcccggacagctgtttgggagaattccaatgagattctctgtgcttatgcaaatgcgcttcgacgggctgctggggttccctggaggtttcgtggataggcgattctggtctcttgaggacggactaaaccgtgttcttgggctggggctcggctgcctgagactgactgaagcggattatctaagctcccacctgacagaaggcccccatcgggtcgtggcccacctgtatgcccgtcagctgactcttgagcaactccacgccgtagagatctccgctgtacactcccgggatcacggcctcgaggtggggcccccacccggcccccggccgcctccaagagggctggcgttggccccatggaaagcgcccatgggtgccggcccccgggccggcccagccgtccatcctgaggggccctctagaagattaccgcagcttccagagcagcgactacgggagcatgggtag

SEQ ID NO: 18204 - DNA, 2553 bp, synthetic construct
  source 1..2553: mol_type = other DNA; note = Synthetic coding sequence
atgctcgagcgtcgggcacttttatggcaaagggaggcaggcccgggctggggtgaccgggccagggccggcactggaggtgctgggggcggatgtggcggggcaatggctgaaagaggtcccgccttttgtggtctctatgacacttctagccttctgagatactgtaacgacgataacttatccggtactagtggcatggaagtggacgatagggtgtcagcgctcgagcagcgtctgcaactgcaggaggacgagttggccgtgctgaaagcagcactggctgatgccctacgacggctgcgagcgtgtgaggaacagggcgcagcccttcgcgccagaggcactcccaaaggcagagcaccccccaggttgggaactacggcttccgtgtgccaacttcttaaaggtcttccaacccgcactcccctcaatggcagtggaccacccaggcgagtcggcggctacgctacatcgccatcttcacctaaaaaggaggctacttctggcagatcttcggtgcgccggtacctttctcctgagagactcgcatccgtgagacgcgaagacccccgctcccggacaacctcttcttcctctaattgttccgctaaaaaagaagggaagaccaaagaggttattttctcagttgaagatggctcagtgaaaatgttcctgagaggacgacctgtccctatgatgatccctgatgagctggccccaacatacagtcttgatacgaggtctgaactgcccagctgtagattgaaactggagtgggtttacggatatcggggccgcgactgtcgggccaacctctatttgctgcccaccggtgaaatagtgtacttcgtagcctcagtagcagtgttatacagcgtcgaagaacagcgacagcgacactatttaggacacaacgatgacatcaaatgcctggccatccacccagatatggttacaattgccacaggacaggtggctggcactaccaaggaagggaaaccattgccgccacacgtgcggatatgggatagcgtcagcctttctacactccatgtgctcggactgggcgtatttgaccgagcagtgtgttgtgtgggcttttcaaaatctaatggcgggaatctcctgtgcgccgtcgacgagtccaacgaccacatgttaagcgtctgggactgggcaaaagaaacaaaggtggtggacgtcaagtgcagcaacgaggctgtcttggttgcgacctttcatcccacagatccaaccgtgctgatcacttgcggcaagagccacatttacttttggacactggagggcggatctctgagcaaacgtcagggtctcttcgaaaaacatgagaagcccaagtacgtgttatgcgtgacttttctggaaggaggcgatgtggtcactggagactccggaggcaatctgtatgtgtgggggaaaggcggaaacagaatcactcaggccgttttaggcgcccatgacggcggagtgttcgggttgtgcgccctccgcgatggaacattggtcagcgggggggggagggatcggagggtggtgctgtggggctcagattactcaaagctccaagaggtggaggttcctgaagatttcggtcccgttcgtaccgtcgctgagggccacggagataccctatacgtcgggacgactaggaactcaatcctacaaggctctgtgcacaccgggttctccttgttggtgcagggacacgttgaagagctgtgggggctcgctacgcacccttctagggctcagttcgtaacatgtggtcaggacaaacttgttcatttgtggagctccgacagccaccaaccactgtggagcagaataatcgaggatcccgcccgctcagctggcttccatccatccgggtccgtcctggccgtcgggacagtcacaggccgctggctcctgcttgataccgagacacacgacctcgtggccatacatactgatggcaatgaacagatcagcgtggtgtcttttagccccgacggcgcatatctggcagtggggtcccacgacaatttggtatatgtgtacacagtagaccaggggggaaggaaggttagcaggctgggaaaatgcagcggacacagtagtttcataacacatctggactgggctcaggactcctcatgtttcgtaacaaactccggagattatgagatcctgtactgggaccctgctacatgcaaacaaattacaagtgccgacgctgtgcggaacatggagtgggccacagctacttgcgtgctcgggtttggagtgtttgggatttggtccgagggggcggatgggacagacattaatgctgtggctcgatcccatgacggtaagctgctggccagtgctgatgacttcgggaaggtgcacctgtttagctacccgtgttgccaaccgagggccttatcccacaagtatggcgggcacagttcccacgttacgaatgtggcatttttgtgggatgattccatggctctgactacgggaggcaaagatacttctgtgcttcagtggcgagtggtatag

SEQ ID NO: 18205 - DNA, 2502 bp, synthetic construct
  source 1..2502: mol_type = other DNA; note = Synthetic coding sequence
atggccgtggaggattctactctacaggtggtggtgagagttcgtcctcccacgccacgagaacttgactcccagagaagacctgtcgtccaagtcgttgatgagcgagtcctggtgttcaaccccgaagaacccgacggtgggttccccggactgaagtggggagggacccatgatgggcctaagaaaaagggaaaggatttgaccttcgtatttgatcgcgtgtttggggaagctgccacacagcaggatgtttttcaacacacgacccactccgttctagatagttttttgcagggatataattgtagcgttttcgcctacggtgctaccggggctggtaagacgcacaccatgctcggtagggagggggaccccggaataatgtatctgactaccgtggaactatataggaggctggaggctcgccagcaagagaagcactttgaggtccttatttcttatcaggaggtatacaacgaacaaatccacgacctcctggagccaaaaggtccattagccatccgagaagacccagataaaggcgttgtggtgcaagggctgtcgtttcatcaacccgctagtgccgagcaactcctggaaatactgacccgcgggaatcgaaacagaacccagcatccaaccgatgctaacgcaactagttccaggagtcacgctatctttcagatcttcgttaaacaacaggaccgcgtgccgggtctcacacaggccgtgcaggtggcaaaaatgagcctcattgacttagccggatcagagcgagcatcatctactcatgccaaaggcgagcgcctgcgggaaggagcgaacatcaatcgatcccttcttgcactcattaatgtgctgaatgcactagccgacgcaaaaggtcgcaagacccatgtgccatacagggattccaagcttacccggctactaaaggactcccttggtggaaattgcaggactgtaatgattgccgcgatttccccctcatctttaacatatgaagacacctacaacaccctgaagtatgctgaccgggccaaagagattcgactgtcacttaagtctaacgtgactagtctggattgccacatcagccagtacgctaccatctgccagcagttgcaagctgaagtcgccgctttgaggaagaaactccaggtatacgaaggcggaggccagcctccaccacaagatctgcctggcagcccaaaaagcggccctcctcccgaacatctgccttcctcacccctgccccctcacccaccttctcagccttgtaccccagaactgcccgccggacctcgcgcgctgcaggaagaaagcctgggtatggaagcccaggtggaacgagccatggagggcaacagtagcgatcaagagcagagcccagaggacgaagacgagggacccgcggaggaggtgccaacccagatgcctgagcagaaccctacccacgcccttccggaatcaccgcggttaactttacagccaaagcccgtggtcgggcatttctccgcccgggaactagacggcgatcgctccaagcagctggcactgaaagtcctgtgcgtcgcacaacgtcagtacagtctccttcaagccgcgaacttgctgacccccgacatgattactgagtttgaaacgctccagcagcttgtgcaggaggaaaaaattgaacccggcgctgaggcactgcgcacaagtggtttggcccgtggtgctcctctagcccaggagctgtgctcggagtctatcccagttccgagccctctctgtcccgagcctcccggttatacgggacctgtgactagaacaatggccagacggctgtctgggcccctccacaccctcgggatccccccaggccccaattgtacccctgcccaaggatcccgatggcccatggaaaagaaaagacggcgtccctctgctctcgaggcagatagccctatggcgcctaaacggggcaccaagcggcagcgacagagtttcttgccttgcctgcggcggggttccttgcctgatacgcaacctagtcagggcccctccactccaaaaggcgaacgcgcaagctctccatgtcacagcccccgggtctgcccagcaacagtgataaagtctcgagtccctcttggtccatccgccatgcaaaattgttccaccccactcgccctgcctacgcgggacttaaatgctactttcgatctgtcagaagagccccccagcaagccaagctttcacgaatgcattggctgggataagattcctcaggagctgtcccggctggaccagcccttcataccacgcgcgccagtgcccctctttaccatgaagggacctaagcctactagctctctcccaggtacaagtgcctgcaaaaaaaaaagggtagcatccagcagcgtatcacacgggcggagccgaatcgcccgactgccaagctctaccttaaagcggcctgctggcccgctagttttgccgggcgattggcattag

SEQ ID NO: 18206 - DNA, 3351 bp, synthetic construct
  source 1..3351: mol_type = other DNA; note = Synthetic coding sequence
atgtatggcagtgccaggagcgtcgggaaggttgagcccagcagccagtccccggggcgcagccctaggctcccaagatccccacggctgggacataggagaacaaactctaccggcggaagctctggtagctccgtgggcggcggctccgggaaaaccttgagcatggagaatatccagtccctgaacgccgcctacgcgacttccggtcccatgtatctcagcgaccacgagaatgtgggaagcgaaacgccgaagtctactatgacccttggaagatctggtggcaggcttccttacggggtgcggatgaccgctatgggcagcagccccaacatcgcttcttcaggggtggccagcgatacaatcgctttcggcgagcaccatctcccccccgtttccatggcttcgaccgtgccccattccttgaggcaagcacgcgataatacaatcatggatctgcaaacacagttgaaggaggtgctcagagaaaatgacctattgcggaaggacgtagaggtgaaggagtcaaagctctctagctccatgaattccataaagacgttctggtcacctgaacttaaaaaagaacgggctctgcgaaaggacgaggcttctaagataactatttggaaagagcagtaccgtgttgtgcaggaggagaatcagcacatgcaaatgacgatccaagctttgcaggatgagctgcgcattcagcgcgatctcaatcagctcttccagcaggacagctctagccgcacaggggaaccttgtgttgcagagctgacggaagaaaacttccagcgcctccacgcagaacacgaaagacaggcaaaagagctcttcctcttgcgtaaaaccctcgaggagatggagttgcggatcgagactcagaagcagaccttaaacgcccgcgacgaatcaattaaaaagctgctggaaatgcttcagtctaaaggactcagcgctaaggccactgaagaggatcatgaacgcacacgaagactggccgaagctgaaatgcacgtacatcatctagaatcattgctcgaacagaaggagaaagaaaactccatgctgagagaggagatgcatcgccgattcgaaaacgctccggactctgccaaaaccaaggcgctccagaccgtcatcgaaatgaaagattccaagatatcgtccatggaaaggggtctgcgcgatctggaggaggagatccaaatgctgaaaagtaacggggctctgtcaacagaggaacgcgaagaagagatgaagcagatggaagtttaccgctcacattctaaattcatgaaaaacaaagttgaacagctgaaggaagagttatcttcaaaggaagcacaatgggaggaactgaaaaagaaagcagctggtctgcaggctgagatcgggcaggttaaacaagagctcagtaggaaagacacagagcttttagccctccagactaagctagagactctgaccaatcagtttagtgactcaaaacagcatatcgaggtgctcaaagagtccctgacagccaaggagcagcgcgctgccatcctccagacggaggtggatgcactgaggctaagactcgaagagaaagaaactatgctgaacaagaagactaaacagatacaggatatggctgaggaaaaggggacgcaggcaggtgaaattcatgacctgaaagatatgttagacgttaaggagcgcaaggtgaacgttctgcagaaaaagattgaaaatctgcaggagcagttacgcgataaagaaaaacaaatgtcatcactcaaagagagggtaaaatctctgcaggcagataccacaaacacagataccgccctgacaaccttagaggaagcactggctgaaaaggagcgaaccattgaacggcttaaggaacaaagagaccgcgatgaacgggaaaaacaggaggaaattgacaattacaaaaaagacttgaaagatctgaaagagaaagtgtcactgctgcagggggatctctccgagaaggaggcaagcctgttagatttgaaagaacacgcaagctcgctagcgtcaagcggcctgaaaaaggactcgagattaaaaactctggagattgccctcgaacagaagaaggaggaatgcctgaaaatggagtctcaattgaagaaagcccacgaggcagccctcgaagcacgcgctagcccagagatgtcagatcgaattcagcatctcgaaagagagattacgaggtataaggacgagtccagtaaggcccaggcagaagttgataggctgctagagatcctgaaagaggtggagaatgagaaaaatgataaagataaaaagattgcagagctggagcgccaggtgaaagatcaaaacaagaaggtggcaaatttgaaacacaaggaacaagttgaaaaaaagaagtccgcccagatgcttgaggaggcaagacgcagggaggacaatctgaacgatagcagccaacaactgcaagacagcttaagaaagaaagatgatcgcatagaggagctggaggaagctctgagagaatcagtgcagataaccgccgagagagagatggtgctggcccaggaggagtctgcaaggacgaacgccgaaaagcaggtggaggagttactcatggccatggagaaagttaagcaagaattggagtctatgaaagctaagctctcttctacacaacaaagtctcgccgagaaagagactcatcttactaatctgagagcagagcggagaaaacatttggaagaggttttggaaatgaaacaggaagcattgctcgcggcaatatccgaaaaggacgccaacattgccctcttagagttatccagttctaagaaaaagacccaggaggaggttgccgcccttaagagggaaaaggacagactggtccagcagcttaagcagcaaacgcagaataggatgaagctgatggccgataattacgaagacgaccactttaagagctcccatagcaaccagaccaaccataagccgtcccccgatcaaataatccagcctctcctggagctggatcagaaccggtcaaaattaaaattatatatcgggcacctgaccacactgtgccatgatcgagaccctctgatactgcgtgggctcaccccacccgcatcatataatctggatgacgatcaggcagcctgggaaaatgagctccaaaagatgactcgcgggcagttgcaagacgagctcgaaaagggtgaaagagacaacgctgaattacaggaatttgcaaatgccatactccagcagatcgccgatcattgcccagatattctcgagcaggtggtaaatgcactcgaggagagctcttag

SEQ ID NO: 18207 - DNA, 2055 bp, synthetic construct
  source 1..2055: mol_type = other DNA; note = Synthetic coding sequence
atgatccccccacaggaggcctctgctcgcaggcgggaaatcgaggacaagcttaagcaagaggaggaaacgttgtcttttatccgggactcccttgagaagtcagatcaactgaccaagaatatggtaagtattctatccagcttcgagtcgcgtctgatgaaactggagaactcgatcattcccgttcacaagcagacagaaaacctgcagaggctccaagagaatgtggaaaaaaccctgagttgtcttgatcacgtcatttcttactatcacgtcgcttccgacactgagaagattatcagagagggccctacaggaaggcttgaagagtatctggggagcatggccaagatacagaaagctgtggaatactttcaggacaacagtcccgatagccccgagctgaataaggtgaagctgctctttgagagagggaaagaagccttggagtccgaatttcgatcattgatgacccggcattccaaggtagtcagtcccgtgttaattttggacttgatcagcggtgatgatgatctcgaggcccaggaggatgtcacactggagcacctccccgagtctgtactccaagacgttatccgaatttcccgttggttagtggaatatggccgcaatcaggatttcatgaacgtatattaccagatccggtcctcacagttggaccggtccatcaaggggctgaaagaacacttccacaagagcagctcttcctctggggttccttacagccccgccatccccaacaagcgcaaagacacaccaactaagaagccagtgaaacgtcccggtacgatcagaaaagcacagaaccttctgaagcagtactcccagcatggcttagatggaaagaaggggggctcaaacctgatccctttagaggggagggatgatatgttggatgtcgagaccgacgcctacatccactgtgtctccgcctttgtcaagttggcgcagtcagaataccagctgctggcagatattatcccagaacatcatcaaaaaaaaaccttcgatagcctgatccaagatgctctggatggcctgatgttagaaggcgaaaatatcgtctctgccgctcggaaagccatcgtgaggcatgatttctcaacagtgctaactgtgttccccatcctgaggcatcttaagcagactaagccggagttcgatcaggtgttacaagggaccgctgcgagcaccaaaaacaaactgcccggactgatcacgtctatggagaccattggagcaaaggctttagaagattttgctgataatattaagaatgatcctgataaggagtacaatatgccaaaggatggaacggtgcacgaactcacaagcaacgctatcctttttctgcagcagctcttggactttcaggaaacggcgggagccatgcttgcgtcccaggagacctcttccagtgctacttcctactcctccgagttttccaaacggcttcttagcacgtatatttgcaaagtccttggcaacttacagttgaatctcttgagtaagagcaaggtctacgaggacccggccttatcagccatttttttgcataacaattataactacatcctcaaaagcctcgaaaagagcgaattgatccagcttgtcgccgtgacccaaaaaacagccgagcggagttatcgggagcatatagagcagcaaatacagacctaccagagatcatggctcaaagtgaccgattacatcgcggagaaaaacctgcccgttttccaacctggtgtaaagctgcgcgacaaggagagacagattataaaagagaggtttaaaggttttaacgacggactggaggaactgtgtaaaattcaaaaagcttgggccatccctgacacggagcagcgtgatcgcatcaggcaggcccaaaagacgatagtgaaagagacttatggcgcctttctgcaaaagtttggcagcgtgccattcaccaagaacccggagaagtacattaagtacggggttgaacaggtaggagatatgatcgaccggctgtttgacacttccgcctag

SEQ ID NO: 18208 - DNA, 378 bp, synthetic construct
  source 1..378: mol_type = other DNA; note = Synthetic coding sequence
atggcagacgaggagctggaggccctcaggagacaaagactagctgagctgcaggccaaacacggcgatcccggtgacgccgctcaacaggaggccaaacatagagaggctgagatgcgcaacagcatcctcgctcaagtgctcgatcaatctgcacgcgctcgtctgagcaacttggctctcgttaagccagagaagacaaaggcagtggagaactatctgattcagatggcacgctatggccaattatctgagaaagtctcagaacaggggttaatcgaaatcctcaaaaaagtgtctcaacagacagagaagactacgaccgttaagtttaaccgtcgtaaggttatggatagtgacgaggacgacgactactag

SEQ ID NO: 18209 - DNA, 3327 bp, synthetic construct
  source 1..3327: mol_type = other DNA; note = Synthetic coding sequence
atggctctaagacctggggccggaagcgggggcggcggcgcagcgggtgcgggcgccggatctgcaggaggcgggggtttcatgttcccagtggctggaggaattcggcccccacaggccggtttgatgccaatgcagcagcagggattccctatggtctccgtcatgcaaccaaatatgcagggaataatgggcatgaattactctagtcaaatgtctcagggccctattgcgatgcaggccgggatcccaatggggccgatgccagcggcgggcatgccttatttggggcaggcgccttttctgggcatgcgacctcctggcccacagtacacaccggacatgcaaaaacagtttgcagaggaacagcagaaaaggtttgagcagcagcagaaacttctggaagaggagaggaagagaaggcagttcgaggagcagaaacaaaagctgaggctgctttcctccgtgaaaccaaagactggggagaaaagccgggacgacgccctcgaggctatcaaaggcaacctagacgggttttctcgggatgcgaagatgcaccctaccccagccagtcaccctaagaaacccggagtgggcgtgttcccctcccaggatccggcccagccacggatgccgccttggatctacaacgaatctctcgtgcccgacgcgtacaagaagattcttgaaacaactatgacaccgaccgggatcgataccgccaaactgtaccccattctcatgagttccggactcccccgggagacgttaggacagatttgggccctggccaataggaccacacccggaaagcttactaaggaagagttgtacaccgtattggctatgattgcagtcacccaggtcgtaaagcccgaagaagatgattttcaagactttcaggacgcctcgaagagtgggagcctggatgattcattttcagactttcaggaactgcccgcctctagtaaaacatctaacagccagcatggcaattccgcacctagtctgctcatgcccctgcctgggaccaaagccctacctagcatggacaagtatgccgtcttcaaaggtatcgccgctgataaaagttctgagaacactgtgccacccggagaccccggagataaatattcggccttccgcgaactggagcagaccgcagaaaataagccactcggtgagtctttcgccgagttccgaagcgccgggaccgacgacggatttaccgacttcaagactgctgattccgttagcccactagagcctcctactaaagacaagacattccccccaagcttccctagtggaacaatacagcagaaacaacagacgcaggttaaaaatcccttaaacctggctgacttggatatgttttcttcggtgaactgctcgagcgaaaagcctctttccttttcagcagtgttctcaacttctaaatctgttagcacaccacagtccaccggatctgcagccaccatgactgccctggctgctacaaagacgagtagcctggccgacgactttggtgaattctccttatttggggagtactcaggcttagctcccgtgggagaacaggacgactttgccgactttatggccttttcgaatagctctatctcctcagaacaaaaacccgacgataagtatgatgctctgaaggaggaggcttctcctgtgccacttaccagcaatgtcggcagtaccgtgaaaggcggccaaaacagcacagccgccagcaccaagtatgatgtatttagacagctctctctcgaaggctcaggattgggcgtagaagatttaaaagacaatacacccagtggcaaatctgatgatgactttgccgactttcacagctctaagttttcttccatcaactcagacaagtccctgggtgaaaaagcggtggcatttagacataccaaggaagatagcgccagcgtcaagtccctggatttgccctcgattggtggctcaagcgtggggaaggaggactccgaggatgccctgtccgtccaatttgacatgaagctcgctgatgtcggcggagacttgaagcacgtgatgagtgattccagtctagacttgcctactgtcagcggccagcaccccccggctgccgctgggagtgggtctccttccgcaacatctattttgcaaaaaaaggaaacttctttcgggagtagtgaaaatatcactatgaccagcttgtcaaaagtgactacattcgtgtctgaggatgcgttacccgaaactaccttccccgcactcgcgagtttcaaggatacaatacctcagacaagtgaacaaaaagaatacgagaatcgcgactataaagactttacaaaacaggacctgccaaccgccgaacgcagccaggaagccacatgcccttccccagcttcgtcgggtgctagccaggagacacctaatgaatgctccgacgacttcggggaattccagagcgagaagcctaagatcagcaaattcgatttcctggtggccacatcacaaagcaagatgaaatcttctgaggaaatgatcaaatccgagttggctacctttgacctctcagtgcagggctcgcacaaaaggtccctgtcattaggcgacaaggaaatctccagatcaagtccctcgccagcacttgaacagccgttccgcgatcgctcaaacactcttaatgagaagccagcactgcccgtgatccgagataagtataaggatctgaccggggaggttgaggaaaacgagagatatgcttatgaatggcagcgttgcttgggatcggccctcaacgtaatcaaaaaagccaacgacactctgaacggaatatcttcttcaagcgtatgtacagaggtaatccaatccgcgcagggaatggagtacttgctaggcgtggtggaagtatatagagtgaccaaaagagtcgagcttgggattaaagctactgctgtttgttctgagaagctccagcagctcctcaaagatatagacaaagtatggaacaatttgatcggctttatgtcattagctacacttacacctgacgagaatagccttgactttagtagctgcatgctgagacctggcatcaaaaatgcccaggaattggcctgcggcgtctgcctgctgaatgttgatagcaggtctcgtaaagaagagaagccagccgaggagcaccctaagaaagctttcaactccgagacagattccttcaagctggcatatggtgggcatcaatatcatgcttcttgcgcaaatttctggatcaactgcgtagaacctaagcctccgggtttagtgctaccagacttgctgtag

SEQ ID NO: 18210 - DNA, 594 bp, synthetic construct
  source 1..594: mol_type = other DNA; note = Synthetic coding sequence
atggctgcattccgggatatcgaggaggtgagtcaggggttgctgtccctcctcggtgctaatcgcgctgaagcccagcagcgccgactgctcgggaggcacgaacaggtggttgagcgcttactggaaacgcaggacggcgccgagaagcagctgcgagagatactaaccatggaaaaggaagtagcacagtcactgctcaacgcgaaagagcaggttcaccagggaggcgtggagctgcagcagctggaggccggactgcaggaggctggcgaggaggacacccggcttaaggcctccctgttacagctgacacgggagctggaagagctgaaagagattgaggcagatctggaacgacaggaaaaagaggttgacgaagataccaccgtgaccattccgtcagctgtgtacgttgcgcagctataccaccaggtgagcaagatcgagtgggattacgaatgtgaacctgggatggtgaaggggattcatcatggtcctagtgttgctcagccgatacatctagatagtacccaactgtcaaggaaatttatctcagattacttgtggtccctggtggacactgagtggtag

SEQ ID NO: 18211 - DNA, 906 bp, synthetic construct
  source 1..906: mol_type = other DNA; note = Synthetic coding sequence
atgacaagacacggaaagaattgcacggccggggcagtatatacttaccatgaaaaaaaaaaggacaccgctgcaagcggttacgggactcagaacatcagactcagtcgagacgctgtgaaagattttgactgctgttgccttagccttcagccctgtcatgacccggttgtgactcccgacggatacctgtatgagcgcgaagctattctagagtatattctgcaccagaaaaaagagatcgccaggcagatgaaggcttatgagaaacagagggggacccgccgggaggaacagaaggagctgcagcgggccgcctcacaagaccacgtacgcggctttttggaaaaggagtccgcaatcgtcagtaggccgctcaacccctttaccgctaaagccctgagtggaacatccccagacgatgtgcagcccgggccttcagtgggcccaccaagcaaggataaagataaagtcctgcctagcttttggattccctcactcacacctgaagccaaggccactaaactggaaaagccttcccgcacggtgacctgtcctatgagcgggaaacccttgagaatgagcgatctaacgccagtccactttactcctttggactcttcagtggatcgtgtgggactcatcacacggagtgaaagatacgtgtgtgccgtaactcgggactctttgagtaacgcgaccccttgcgcagtgctccgcccgtcaggagcggtggtgacactggaatgcgtggagaagttaatacggaaggatatggtggacccggtcacgggcgacaagctgacagatcgggacatcattgtgcttcagcgcgggggaacagggttcgccggcagtggcgtcaagctacaagcggaaaagtcgaggcccgtgatgcaggcgtag

SEQ ID NO: 18212 - DNA, 990 bp, synthetic construct
  source 1..990: mol_type = other DNA; note = Synthetic coding sequence
atggaggtagctgaaccctcctcccctaccgaagaggaggaagaggaagaggagcactccgcagaacctaggccaagaactaggtcaaatcctgagggcgccgaagacagagcagtgggcgcacaggctagcgtggggagccgcagtgagggggagggcgaggctgcctcagcagacgacggctcactgaatacctctggagcaggtccgaagtcctggcaggttccccccccagcaccagaagttcagatccgcactcctcgagtcaactgtccagagaaggtcatcatctgcctggatctcagtgaagaaatgagtctgccaaagttggaaagcttcaatggttcaaagacaaatgccctcaacgtcagtcagaagatgattgaaatgttcgtcaggaccaagcataagatagacaagagccatgagttcgccctggtggtggtcaacgacgacacagcttggctttccggtctcacctcagatccgagggagctgtgctcctgtttgtacgatctagaaactgcttcttgtagtacattcaacttggaggggctgttctccttaattcagcagaaaaccgaactccctgtcaccgaaaatgtccagacaattcctcccccctatgtggttcggacaattctggtctattccaggcctccctgccagcctcagttctcactgaccgaaccaatgaaaaagatgtttcagtgcccctacttcttctttgacgtggtgtatattcacaacggaaccgaggagaaggaggaggagatgtcctggaaggacatgtttgcttttatgggttctttggatactaagggaaccagttacaaatatgaggtcgccctcgctggacccgccctggagctccataactgcatggctaagcttctcgctcacccacttcaacgaccgtgccaatcccacgcgtcctattcgctcctggaggaggaggatgaggccattgaggtggaagctactgtttag

SEQ ID NO: 18213 - DNA, 1263 bp, synthetic construct
  source 1..1263: mol_type = other DNA; note = Synthetic coding sequence
atgctgagcagcttcccggtggttttactggaaactatgtctcactataccgatgaaccccggtttaccatcgaacagatcgatcttcttcaacgccttagacgcaccggaatgaccaaacacgaaattctccacgcgctggaaacactggacaggcttgatcaagaacactctgataagtttggccggagaagttcgtacggaggcagcagctatgggaactctacaaacaacgtcccagcctctagcagcaccgccaccgccagcacgcagacccagcactctggcatgtccccatcgccgtcaaacagttatgatacatctcctcaaccatgcacaacaaatcaaaatggtagggagaacaacgagcggctatctacatctaacggtaaaatgagcccaacgcgctaccacgccaactccatggggcaacgctcttactccttcgaagcctctgaggaagacctggatgtggacgacaaggttgaagagctgatgaggcgagattcgagcgtcattaaagaggagatcaaagcttttctggcaaaccgccggatatcccaagccgtggtagcccaggttacaggaattagccaatcccggatttcccactggttgctacagcagggctctgacctatctgagcagaaaaagcgtgctttttatagatggtaccaactggagaagaccaacccgggcgctacactgtccatgcgcccagcgccgattccgatagaagaccccgagtggagacagaccccaccccctgtgagcgcaacctctggcacctttcgattaagacgcggaagcaggttcacctggcggaaagaatgcctcgccgtgatggagtcatactttaatgaaaaccagtaccccgacgaagccaagagagaagagattgccaacgcttgcaatgcagtgatccagaagcctggcaaaaaactatccgacttggaaagggtgacatcactgaaggtgtataattggtttgctaataggcggaaggagatcaaacgccgcgcaaacatagaagcagccatcctcgagtcacatggaattgatgtgcaatcccctggcggacactccaattccgatgacgtcgatggaaacgactactccgagcaggatgacagcacttcacattctgaccatcaggaccccatcagccttgccgtagagatggcggccgtcaatcatactatcttggcacttgctagacaaggggccaatgaaattaagaccgaggccctcgatgatgattag

SEQ ID NO: 18214 - DNA, 1263 bp, synthetic construct
  source 1..1263: mol_type = other DNA; note = Synthetic coding sequence
atgctgtcatctttcccagtcgttttgctggaaacgatgtcgcattacacagacgagcctaggtttaccatcgaacagatcgatctcctgcagcggctcagaaggacaggcatgactaagcacgagatccttcacgcactagaaactctggatagactggatcaggagcattctgacaagttcgggcgacgctcttcctatgggggctcaagctacggcaactcaaccaacaatgtgcctgcgtctagttcaaccgcaaccgccagcactcagacgcagcattcgggtatgtctccctcaccatccaactcttatgatactagtccacaaccttgcactaccaatcagaatgggcgtgagaacaacgaaagactctctacctctaacggcaaaatgagccctactcggtaccatgcaaactcgatgggccagaggtcttattctttcgaagcatctgaggaagacctggatgtggatgataaggtggaagagctgatgcgccgggacagtagcgtgatcaaggaggaaatcaaagcctttctcgccaaccgaagaattagtcaggccgtggtggctcaggtgactggcatcagccagtccagaattagccactggctccttcaacagggcagcgatctatcggagcagaagaagcgagcgttctacaggtggtaccaactggagaaaacaaaccccggtgcgactctgtctatgcggccggctccaataccgatcgaggaccccgagtggcgtcagactccacctccagtgagcgccacaagcggaacatttagactccggcgcgggtcgaggtttacttggcggaaagagtgcctggcagtgatggagagctattttaatgagaaccaatacccagacgaggctaagcgagaggaaattgctaacgcctgcaatgccgttatccagaagcccggcaagaagttgtcagatcttgagcgtgtaacctctttgaaggtgtacaactggttcgcaaacaggagaaaggaaattaaaagaagggccaacatcgaagctgccatactggaatcacatgggatcgatgtgcagtccccagggggccactctaatagcgatgatgtcgacggcaatgactacagcgaacaggacgattcaacatcccattccgatcatcaggacccaataagtctggccgttgaaatggcagctgtgaaccacacaatcctcgccctggcgcgccaaggcgccaatgaaatcaaaacggaggcgctcgacgatgactag

SEQ ID NO: 18215 - DNA, 915 bp, synthetic construct
  source 1..915: mol_type = other DNA; note = Synthetic coding sequence
atgctctctagcttccccgtcgtactgttggagaccatgagccattacaccgacgagcctaggtttactatcgaacagatagatctgctccagcggttacgcagaacaggcatgaccaagcatgaaattctccatgcactggagacactcgatcgtctcgatcaggaacattctgacaagttcggtcggaggtctagctacgggggcagttcctacgggaattctactaataatgtgcccgcctcgtcaagcaccgctacagcctctacccaaactcagcacagcggcatgtcccctagcccaagtaattcttacgataccagccctcagccctgtacaaccaatcagaacggccgagagaataatgagcgactgagcacaagcaatggaaagatgtctccaacgaggtaccacgccaatagtatggggcagcggtcatactctttcgaggccagtgaggaagatctggacgtggatgataaggtggaggaactcatgcggcgcgactcctctgtcataaaggaggagatcaaggcctttttggctaacaggaggatctcccaagcagttgtcgcccaggtgacaggaatctctcagtctaggatctcccattggctgcttcagcagggctcagacctgagtgaacagaagaagcgggcattctatagatggtatcaactggaaaagacgaatccgggggcaactctttctatgaggcctgccccaatccccatcgaggatcctgagtggagacaaactccaccccccgtgtccgccacctcaggaacatttagactgaggcgcggttcccgattcacctggagaaaagagtgcttagccgtaatggagcgcaacacgtggtctccggagcgacgtatggaggaaaataaatggaagctgctaagtgcgggatag

SEQ ID NO: 18216 - DNA, 1332 bp, synthetic construct
  source 1..1332: mol_type = other DNA; note = Synthetic coding sequence
atgctgagtagttttcctgttgtgttgctcgaaactatgtcacattacacggacgagcccagattcaccattgaacaaattgacctgctccagcgcctacggaggaccggcatgacgaagcacgaaatcctccacgccctggagaccctcgacaggctcgaccaagagcactcagacaaattcggccgcagatcctcctacggtgggagctcctatggtaactctaccaataacgtccctgccagcagttccactgctaccgcaagtacccagacgcagcactccggcatgtctccatctccaagtaatagttatgatacatctccgcagccgtgtaccacaaatcaaaacggtagagagaataacgaacgtctgagtaccagcaatggaaagatgtctcccacccggtaccacgccaattctatgggacagagatcctatagttttgaggcatctgaagaggacttggatgtggacgataaggtggaagagttgatgcggagggatagctcggtgatcaaggaagaaatcaaagctttcctggccaatagacgcatcagtcaggctgtcgtggcccaggtaaccggtattagtcagtcccgcatttcgcactggctgctgcagcaaggttccgacctgtcagaacaaaagaagagagctttctatagatggtatcagctagaaaagaccaatccaggggccaccctgtcaatgagacccgctccaattccaattgaggatccagaatggcgtcagacaccaccccccgtgtcagccacttcaggaacgttcaggctgaggcgcggcagtagatttacctggcgcaaggagtgcttggccgtaatggagtcctattttaacgagaatcagtacccggacgaagccaagagagaagaaatagccaatgcatgcaacgcagtgattcagaaacccggcaagaagctgtctgaccttgagcgtgtgacgagcttaaaggtttacaactggttcgccaaccgtcggaaggaaattaaacgccgggctaatattgctgcgattctagagtcccatggcattgatgttcagtccccaggcggacacagtaattccgacgatgtggacgggaatgattattcggagcaggacacatggcaagtacgcaacggggaagaggaggaaggtcgtagctcagagggggggcgggaggcagagaaggacgatagcacgtcccatagcgatcaccaagatcctattagtctggctgtcgaaatggccgctgttaatcacaccatcctagctctggcccgccagggggccaatgagataaagaccgaggccctcgatgatgattag

SEQ ID NO: 18217 - DNA, 357 bp, synthetic construct
  source 1..357: mol_type = other DNA; note = Synthetic coding sequence
atgctctcctcctttccagtggtgctgctcgaaaccatgtcgcattataccgacgaaccgaggttcacaatcgagcagatcgacctcctgcaaagattgcgtagaactggaatgaccaagcatgaaatcctgcacgctctggaaaccctggataggctcgatcaagaacactccgacaagtttggcaggaggagctcctatggcggaagttcctacgggaacagcacaaataatgtgccggcatcttcatccacagccaccgcctctacccaaactcagcattctggtatgtcccctagcccttcaaactcctatgacacatccccccagccatgtacaaccaatcagaacgggtag

SEQ ID NO: 18218 - DNA, 1332 bp, synthetic construct
  source 1..1332: mol_type = other DNA; note = Synthetic coding sequence
atgctcagttcattccccgtggtgctgctggagaccatgtcgcattacacagatgagccacgcttcaccatagagcaaattgacctccttcagcgcctgcgcaggactggcatgactaagcacgaaatcctgcacgcgttagagactctggatcgcctcgaccaggagcactctgataagttcggcagacggtcctcctatggggggagtagctacggtaatagcacaaacaacgtcccggctagttcctctacagccaccgcctcaacacagacacagcactcgggaatgtccccctccccaagtaacagctacgacacctccccacagccttgcaccaccaatcagaatggccgggagaacaacgaaagactctcaacctctaatgggaagatgtcccccacacgttaccacgcgaactccatgggtcaacggtcctactctttcgaggcaagcgaggaagatctcgatgtcgatgacaaagtggaagagctgatgaggcgggactctagtgtaatcaaggaggaaattaaagcattcctggctaatcgacgaatctctcaggcagttgtcgcacaagttactgggatcagccaatcccgaatttcgcactggctgttacagcagggaagtgatctgagtgagcagaagaagagggccttctacagatggtaccaactcgagaaaacaaatcctggagctactttaagtatgcgtccagccccgattcctatagaagacccagagtggaggcaaacaccaccacccgtgtcagccactagcggaacatttaggctgcgcaggggctctagattcacatggaggaaagagtgtttggccgtgatggagtcttatttcaacgagaatcagtatcctgatgaagcgaaacgcgaggagatcgcaaacgcttgtaatgcagtgattcagaagcctggaaaaaagcttagcgacctcgagagggttacatccctaaaagtgtacaattggtttgctaaccgccgcaaagagattaaaaggagagcgaatatcgcagccatcctcgaatcccacggcatagatgtgcagagccccggtggccactcaaatagcgacgacgtggacggcaatgactactcagaacaagacacgtggcaagtgagaaacggggaggaagaggagggacgatcctcggaaggcggccgcgaggccgagaaggatgacagtaccagccactctgaccaccaggaccctattagcctggccgtagagatggctgccgtgaatcacaccatcctggccttggccaggcagggagccaacgagataaagacagaggctttggacgatgactag

SEQ ID NO: 18219 - DNA, 1218 bp, synthetic construct
  source 1..1218: mol_type = other DNA; note = Synthetic coding sequence
atgctgagctcctttccagtcgtactgctcgaaactatgtcacactacaccgatgaaccacgcttcacaatcgagcaaatagatctgcttcagaggctgaggagaacgggcatgaccaaacatgagatcttgcatgccttagaaacactggacaggctcgatcaggagcactccgataaattcgggaggagaagctcctatgggggatcctcctatggtaactctaccaacaacgttcctgcctcatcttccacagcgacagcctcgacacagacccagcatagtggcatgagtccttctccatcaaacagttatgacacaagtccacagccctgtacaacaaatcagaacggtcgggaaaataacgaacgcctgtccacatccaatggaaagatgagccccaccaggtaccatgccaactcaatgggacagcgcagctattctttcgaggcgtccgaagaagatttagatgtggatgataaggtggaggaactaatgaggagagactctagtgttatcaaggaggagattaaagccttccttgcaaacagacgaattagccaggccgtggttgcacaggttaccggcatttcacaaagcagaatctctcactggctgctccagcaaggtagcgacctttccgaacagaaaaaaagggccttctatcggtggtatcagctggagaagactaaccccggggctaccttaagcatgcggccagcgcctatccccatcgaagatcctgaatggagacagacacctcccccagtgtctgcgacatcaggcactttcagactgcggcgtggctctcgattcacctggcggaaggagtgcctggcggttatggaatcatattttaacgagaatcaatatccggacgaagccaaacgtgaagaaatcgctaacgcttgcaatgcggtcattcagaagcccgggaaaaaactgagcgacctggaacgggtgacgtctctgaaagtgtacaattggttcgctaatcgtagaaaggagatcaagcggagagcgaatatcgccgccattctggaaagccacgggatcgatgttcagtcccctggaggccactctaactcagacgatgtagacggaaatgactatagcgagcaggatacctggcaggtgaggaatggtgaggaggaggagggtcgcagcagcgaaggcgggcgcgaagccgaaaaggtggaggaggaaaggaggatctag

SEQ ID NO: 18220 - DNA, 1380 bp, synthetic construct
  source 1..1380: mol_type = other DNA; note = Synthetic coding sequence
atgacagctgaggagatgaaggccacagaaagtggggcccagagcgcccccctgcccatggagggcgtggacatcagccccaagcaggatgagggcgtgctgaaggtgatcaagcgggagggcaccggcacagagatgcccatgattggagacagagtgtttgtgcactacacaggctggctgctggatggcaccaagtttgacagcagcctggacaggaaggacaagttctcctttgacctgggcaaaggagaggtgatcaaggcctgggacatcgccatcgccaccatgaaggtgggggaggtgtgccacatcacctgcaagccagaatatgcctacggcagcgctggcagcccccccaagatccccccaaatgccaccctggtgtttgaggtggagctgtttgagttcaagggggaggacctgacagaggaggaggatggcggcatcatccgccgcatccagaccagaggagagggctacgccaagcccaatgaaggagccatcgtggaggtggccctggagggctactacaaggacaagctgtttgaccagcgggagctgcgctttgagatcggggagggggagaacctggacctgccctacggcctggagcgggccatccagaggatggagaagggggagcacagcatcgtgtacctgaagcccagctatgcctttggatctgtgggcaaggagaagttccagatccccccaaatgctgagctgaagtatgagctgcacctgaagagctttgagaaggccaaggagagctgggagatgaacagcgaggagaagctggagcagagcaccatcgtgaaggagcggggcaccgtgtacttcaaggagggcaagtacaagcaggccctgctgcagtacaagaagatcgtgtcctggctggagtatgagagcagcttcagcaatgaggaggcccagaaggcccaggccctgcggctggccagccacctgaacctggccatgtgccacctgaagctgcaggccttctctgctgccatcgagagctgcaacaaggccctggagctggacagcaacaatgagaagggcctcttccggcggggggaggcccacctggccgtgaatgactttgagctggcccgggctgacttccagaaggtgctgcagctgtaccccaacaacaaggccgccaagacccagctggccgtgtgccagcagaggatccggcggcagctggcccgggagaagaagctgtatgccaacatgtttgagcggctggccgaggaggagaacaaggccaaggccgaggccagcagcggggaccaccccacagacacagagatgaaggaggagcagaagagcaacacagctggcagccagagccaggtggagacagaggcctag

SEQ ID NO: 18221 - DNA, 477 bp, synthetic construct
  source 1..477: mol_type = other DNA; note = Synthetic coding sequence
atggagcccccagagggcgccggcactggagagatcgtgaaggaggccgaggtgccccaggccgccctgggcgtgcctgcccagggcaccggggacaatggccacacccctgtggaggaggaggtgggcggcatccctgtgcctgcccctggcctgctgcaggtgacagagcggcggcagcccctgagctctgtgagcagcctggaggtgcactttgacctgctggacctgacagagctgacagacatgtctgaccaggagctggccgaggtgtttgctgacagtgatgatgagaacctgaacacagagagccctgctggcctgcaccccctgccccgggccggctacctgcggagccccagctggaccaggaccagggctgagcagagccatgagaagcagcccctgggggaccctgagcggcaggccaccgtgctggacaccttcctgactgtggagcggccccaggaggactag

SEQ ID NO: 18222 - DNA, 954 bp, synthetic construct
  source 1..954: mol_type = other DNA; note = Synthetic coding sequence
atggccagcgtcatcccagccagcaacagatccatgagaagtgacaggaacacctacgtgggcaagagatttgtgcacgtgaagaacccctacctggacctgatggatgaggacatcctgtaccacctggacctgggcaccaagacccacaacctgcctgccatgtttggagatgtgaagtttgtgtgtgtgggcggcagccccaacaggatgaaggcctttgccctcttcatgcacaaggagctgggctttgaggaggccgaggaggacatcaaggacatctgtgccggcacagaccgctactgcatgtacaagacaggccctgtgctggccatcagccacggcatgggcatccccagcatcagcatcatgctgcacgagctgatcaagctgctgcaccacgcccgctgctgtgatgtgaccatcatcagaattggcaccagcggcggcattggaattgcccctggcaccgtggtgatcacagacattgctgtggacagcttcttcaagcccaggtttgagcaggtgatcctggacaacatcgtgaccaggagcacagagctggacaaggagctgtctgaggagctgttcaactgcagcaaggagatccccaacttccccaccctggtgggccacaccatgtgcacctatgacttctatgagggccagggccgcctggatggagccctgtgcagcttcagccgggagaagaagctggactacctgaagagggccttcaaggccggcgtgagaaatattgagatggagagcacagtgtttgctgccatgtgtggcctgtgtggcctgaaggctgctgtggtgtgtgtgaccctgctggaccggctggactgtgaccagatcaacctgccccatgatgtgctggtggagtaccagcagaggccccagctgctgatcagcaacttcatcagaagaaggctgggcctgtgtgactag

SEQ ID NO: 18223 - DNA, 1095 bp, synthetic construct
  source 1..1095: mol_type = other DNA; note = Synthetic coding sequence
atgtctgaggtggaggccgccgccggggccacagctgtgcctgctgccaccgtgcctgccacagctgctggggtggtggccgtggtggtgcctgtgcctgctggggagccccagaagggcggcggggccggcggcggcggcggggccgccagcggccctgctgctggcaccccatctgcccctggcagcaggaccccaggcaacccagccacagctgtgtctggcaccccagcccccccagcccggagccaggccgacaagcctgtgctggccatccaggtgctgggcaccgtgaagtggttcaacgtgagaaatggctacggcttcatcaacagaaatgacaccaaggaggatgtgtttgtgcaccagacagccatcaagaggaacaaccccaggaagttcctgcggtctgtgggagatggagaaacagtggagtttgatgtggtggagggggagaagggagctgaggccaccaacgtgactggacctggaggagtgcctgtgaagggcagccgctatgcccccaacagaaggaagagccgccgcttcatccccaggcctccttctgtggcccccccacccatggtggccgagatccccagcgctggcaccggccctggcagcaaaggagagagagctgaggacagcggccagaggccccggcgctggtgccccccacccttcttctacagaagaagatttgtgcggggcccccggccccccaaccagcagcagcccatcgagggcacagacagagtggagcccaaggagacagcccccctggagggccaccagcagcagggagatgagcgggtgcccccaccccgcttccggccccgctaccgccggcccttccggccccggccccggcagcagcccaccacagaaggaggagatggagagaccaagcccagccagggccctgcagatggcagcaggcctgagccccagaggcccaggaaccggccctacttccagaggcggcggcagcaggcccctggcccccagcaggcccctggcccccggcagcctgctgcccctgagaccagcgcccctgtgaacagcggggaccccaccaccaccatcctggagtag

SEQ ID NO: 18224 - DNA, 5706 bp, synthetic construct
  source 1..5706: mol_type = other DNA; note = Synthetic coding sequence
atggccaccttcaggaacaaccacatgaagaccaaggcctctgtgaggaagagcttctctgaagatgtgttccagagcgtgaagagcctgctgcagagccagaaggagctgtgcagcgtgacagctgaggactgcctgcagcaggatgaacatgccaacctgacagaggtgaccttcctgggcttcaatgaggagacagatgctgcccacatccaggacctggccgctgtgtccctggagctgcctgacatcctgaacagcctgcacttctgcagcctgaatgaaaatgagatcatctgcatgaagaacatcaacaagcccctggacatcagcagtgaccccctgaaccagagccaccccagcggcatgctgtgtgtgatgagggtgagccccaccagcccccggctgagaattgacttcatcttcagcctgctgagcaaatatgccaccggcatccgctacaccctggacaccttcctgcaccagaagcaccagctggagaccacagatgaagatgatgatgacaccaaccagagcgtgagcagcattgaagatgactttgtgacagcctttgagcacctggaggaggaggagaccagcaagccctacaatgatggcatgaacatcaccgtgctgcggagccagtgtgatgctgccagccagacagtgacaggccaccacctggagacccatgacctgaagatcctgatcagcagcggccagcagaagagcctggccaagcccagcaccagctctgtgaatgtgctgggccacaaggagctgcccagcgtgaagacctctgtgaccaccagcatcagcgagccctggacccagaggagcttctaccgcagcagcaatgccagtgacaaggacagcgacctgcagaagaccttcttcagcagcagccctgcctacagcagcgagagcgagtgcagcagccccagccctgtgatcttcctggatgaggagggctaccagaagagcctgaaggccaagctggagctgcccaagatccctgtgatgaaggatgacatcgaggacagcgacagcgaggtgtctgagttctttgacagctttgaccagtttgatgagctggagcagaccctggagacctgcctcttcaacaaggaccccgtcatcggcaagagcagccagaggaagggccacaagcacggcaagagctgcatgaacccccagaagttcaagtttgacaggcctgccctgcctgccaacgtgaggaagcccacccccaggaagccagagagcccctacggcaacctgtgtgatgccccagacagccccaggcctgtgaaggccagccgggaggacagcggcctcttcagccccatccgcagcagcgccttcagccccctgggcggctgcaccccagctgagtgcttctgccagacagacatcggcggggaccgcatccatgaaaatcatgattctgtgtactacacctatgaagattatgccaagagcatcagctgtgaggtgctgggctctgtgctgcggacccaccacaccaacaccctgagcaacatcaacagcatcaagcacggggagaacaagacagtgaccttcaagcacggcaacctggaccagaagaacaagagcaagaacaagagcctgatgatcaaggacagcatccagaagtttgctgctgacctggtggagaagagctttggcagcgccttcaaggacctgcagaagggcgtgagcagctgcaccaatgccctgtaccacctggccatcaagctgaccagctctgtgctgcagatggcctttgatgagctgcggcggcagagggccttcagcctgaaggagcgggccatcagcggcctggccaacttcctggtgtctgaggccctgagcaatgccctgaaggacctgcagtatgtgaagaagcagatcttcaccaacacagtggccaggtttgctgctgacctggccgaggagctggtgtttgagggcatcatggaggtgtgccagttctcctacccccagaccccagccagcccccagtgtggcagctttgattttgaggacaaggtggtgaagctgtatgccaaggacctgtctgagagcgtcatccaggaggccttcatcgagctgagccaggtggatgtgaccttcaccaccaaggctgctgtgtctgtgtccacagacaacatcaagtatgtgtctgctgagagcgtggtgcccagcacccaggccgtgaccttcagccccagcttccacaaccaggccatcatggtgaccaagcctgtgcaggagtacaagaaggagtacacagtgcagcaggccctcttctgcaccagcggcatcgtgaccagcatccctgtgcccctggccggcagcgccctgctgccctaccacatcagcagcacagcctgccaggccaaggcccacctgagcagtgatgacagcaacagcaatggagacagcgcccaggtgcacatcgccaccaagaaccgggaggagaaggccgcctgcctgaggaacatctgcctgcccagcgagcacaaccctggcaaccagaatgacttcaagcccaccaatgatgacatcgagatgcagagcagcagcaagctgcccaatgaccctgccatcatcagcaacttctctgctgctgtggtgcacaccatcgtgaatgagaccctggagagcatgaccagcctggaggtgaccaagatggtggatgagaggacagactacctgaccaagagcctgaaggagaagaccccacccttcagccactgtgaccaggccgtgctgcagtgcagcgaggccagcagcaacaaggacatgtttgctgaccggctgagcaagagcatcatcaagcacagcattgacaagagcaagagcgtcatccccaacatcgacaagaatgctgtgtacaaggagagcctgcctgtgtctggagaggagagccagctgaccccagagaagagccccaagttcccagacagccagaaccagctgacccactgcagcctgtctgctgccaaggactgtgtgcctgagtgcaaggtgtccatggtgcacggcagcagcctggagaccctgcccagctgcccagctgtgacaggccagaagagtgacctgaaggagagcgccaaggaccagcccctgaagaagcacaacctgaacagcaccagcctggaggccctgagctttggccaggagaaccccttcccccacagccacaccttcagcagcacagccctgacctgtgtggatggcctgcacgtggaggacaagcagaaggtgcgggacagaaatgtcatcccagacaccccacccagcacccccctggtgcccagccgggccagcagcgagtgggacatcaagaagctgaccaagaagctgaagggggagctggccaaggagtttgccccagccaccccacccagcaccccccacaacagctctgtgggcagcctgtctgaaaatgagcagaacaccatcgagaaggaggagttcatgctgaagctgatgaggagcctgtctgaggaggtggagagcagcgagagcggggagctgcctgaggtggatgtgaagtctgagcacagcggcaagaaggtgcagtttgctgaggccctggccacccacatcctgagcctggccacagagatggccgccagccacctggacaacaagatcatccaggagcccaaggtgaagaacccctgcctgaatgtgcagagccagaggtctgtgagccccaccttcctgaaccccagtgatgagaacctgaagaccctgtgcaactttgctggggacctggccgctgaggtgatcacagaagctgagaagatcgccaaggtgaggaactgcatgctgttcaagcagaagaagaacagctgctacgcagatggagatgaggactacaaggtggaggagaagctggacatcgaggccgtggtgcacccccgggaggtggaccccttcatcctgagcctgccccccagcagctgcatgagcggcctgatgtacaagtaccccagctgtgagagcgtgacagatgaatatgccggccacctgatccagatcctgaagcaggagggcggcaacagcgagctgatcatggaccagtatgccaaccggctggcctacagatctgtgaagagcggcctgcaggaggccgccaagaccaccaaggtgcagtgcaacagcaggatgtttcctgtgcccagcagccaggtgaagaccaacaaggagctgctgatgttcagcaacaaggagcaccaccaggaggccgacaagaagaggcagagcaagagaaatgaaggctacttctgcaagaaccagacctgtgagaggaccctggacccctacagaaatgaggtgtcccagctgtacagcttcagcaccagcctggtgcacagcatcaccaaggatgccaaggaggagctgacagccagcctggtgggcctgcccaagagcctgacagacagctgcctgtttgagaagagcggctatgaagaagataatgaatgccacgtgaccccagagctgcccaagagcctgcagcccagcagccagaaccaccgcttctaccacagcacaggcagcctgaatggctacggctgtggggacaacgtggtgcaggccgtggagcagtatgccaagaaggtggtggatgacaccctggagctgaccctgggcagcacagtgttccgggtgtctgagaccaccaagtctgctgacagagtgacctacgccgagaagctgagccccctgaccggccaggcctgccgctactgtgacctgaaggagctgcacaactgcaccggcaacagcagccagcacttcttccggcagggcagcctggccagcagcaagccagccagcaaccccaagttcagcagccgctaccagaagagccgcatcttccacctgtctgtgccccagatccacgtgaacctggacaagaaggctgtgctggccgagaagatcgtggccgaggccatcgagaaggccgagcgggagctgagcagcaccagcctggccgctgacagcggcatcggccaggagggcgccagctttgctgagagcctggccacagagaccatgacagctgctgtgaccaacgtgggccatgctgtgagcagcagcaaggagattgaggacttccagagcacagagagcgtgagcagccagcagatgaacctgagcattggagatgacagcacaggctcctggagcaacctgagctttgaagatgagcaccaggatgagagcagcagcttccaccacctgtctgagagcaatggaaacagcagctcctggagcagcctgggcctggagggggacctgtatgaggacaacctgtccttccccaccagtgacagtgatggcccagatgacaaggatgaggagcatgaagatgaggtggagggcctgggccaggacggcaagaccctgctgatcaccaacatcgacatggagccctgcaccgtggacccccagctgcgcatcatcctgcagtggctgattgccagcgaggccgaggtggccgagctgtacttccatgacagcgccaacaaggagttcatgctgctgagcaagcagctgcaggagaagggctggaaggtgggggacctgctgcaggccgtgctgcagtactatgaggtgatggagaaggccagcagcgaggagcgctgcaagagcctgtttgactggctgctggagaatgcctag

SEQ ID NO: 18225 - DNA, 417 bp, synthetic construct
  source 1..417: mol_type = other DNA; note = Synthetic coding sequence
atggccgagctgcagcagctgcgggtgcaggaggccgtggagagcatggtgaagagcctggagcgggagaacatcaggaagatgcagggcctgatgttccgctgcagcgccagctgctgtgaggacagccaggcctccatgaagcaggtgcaccagtgcatcgagcgctgccacgtgcccctggcccaggcccaggccctggtgaccagcgagctggagaagttccaggaccggctggcccgctgcaccatgcactgcaatgacaaggccaaggacagcattgatgctggcagcaaggagctgcaggtgaagcagcagctggacagctgtgtgaccaagtgtgtggatgaccacatgcacctgatccccaccatgaccaagaagatgaaggaggccctgctgagcatcggcaagtag

SEQ ID NO: 18226 - DNA, 1110 bp, synthetic construct
  source 1..1110: mol_type = other DNA; note = Synthetic coding sequence
atgaccctggaggccatccgctacagccggggcagcctgcagatcctggaccagctgctgctgcccaagcagagccgctatgaagctgtgggctctgtgcaccaggcctgggaggccatccgggccatgaaggtgcggggggccccagccatcgccctggtgggctgcctgagcctggccgtggagctgcaggccggggccggcggccctggcctggccgccctggtggcctttgtgcgggacaagctgtccttcctggtgacagcccggcccacagctgtgaacatggcccgggccgcccgggacctggctgatgtggccgcccgggaggccgagcgggagggcgccacagaggaggccgtgcgggagagggtcatctgctgcacagaggacatgctggagaaggacctgcgggacaacagaagcattggagacctgggcgcccggcacctgctggagcgggtggcccccagcggcggcaaggtgacagtgctgacccactgcaacacaggagccctggccacagctggctacggcacagccctgggcgtcatccgcagcctgcacagcctgggccgcctggagcacgccttctgcacagagacccggccctacaaccagggcgcccggctgacagcctttgagctggtgtatgagcagatcccagccaccctcatcacagacagcatggtggccgccgccatggcccacagaggagtgtctgctgtggtggtgggcgctgacagagtggtggccaatggagacacagccaacaaggtgggcacctaccagctggccatcgtggccaagcaccacggcatccccttctacgtggccgcccccagcagcagctgtgacctgcggctggagaccgggaaggagatcatcatcgaggagaggcctggccaggagctgacagatgtgaatggagtgagaattgctgcccctggcatcggcgtgtggaacccagcctttgatgtgacccctcatgacctgatcaccggcggcatcatcacagagctgggcgtgtttgcccctgaggagctgaggacagccctgaccaccaccatcagcagcagagatggcaccctggatggcccccagatgtag

SEQ ID NO: 18227 - DNA, 3660 bp, synthetic construct
  source 1..3660: mol_type = other DNA; note = Synthetic coding sequence
atgatgagcctgtctgtgcggccccagaggcggctgctgagcgcccgggtgaacagaagccagagctttgctggggtgctgggcagccatgagcggggccccaggagcttccctgtgttcagccccccaggcccccccaggaagcccccagccctgagccgggtgtccaggatgttttctgtggcccaccctgctgccaaggtgccccagcctgagcggctggacctggtgtacacagccctgaagaggggcctgacagcctacctggaggtgcaccagcaggagcaggagaagctgcagggccagatccgggagagcaagaggaacagccggctgggcttcctgtatgacctggacaagcaggtgaagagcattgagcgcttcctgcggcggctggagttccacgccagcaagattgatgagctgtatgaggcctactgtgtgcagaggcggctgagagatggagcctacaacatggtgcgggcctacaccaccggcagccctggcagccgggaggcccgggacagcctggccgaggccacccggggccaccgggagtacacagagagcatgtgcctgctggagagcgagctggaggcccagctgggggagttccacctgaggatgaagggcctggccggctttgcccggctgtgtgtgggggaccagtatgagatctgcatgaagtatggccggcagcgctggaagctgcggggcagaattgagggcagcggcaagcaggtgtgggacagcgaggagaccatcttcctgcccctgctgacagagttcctgagcatcaaggtgacagagctgaagggcctggccaaccacgtggtggtgggctctgtgtcctgtgagaccaaggacctgtttgctgccctgccccaggtggtggccgtggacatcaatgacctgggcaccatcaagctgagcctggaggtgacctggagcccctttgacaaggatgaccagcccagcgctgccagctctgtgaacaaggccagcacagtgaccaagcgcttcagcacctacagccagagccccccagacacccccagcctgcgggagcaggccttctacaacatgctgcggcggcaggaggagctggagaatggaacagcctggagcctgagcagcgagagcagtgatgacagcagcagcccccagctgtctggaacagcccggcacagccctgccccccggcccctggtgcagcagcctgagcccctgcccatccaggtggccttcagaagacctgagacccccagcagcggccccctggatgaggagggcgctgtggcccctgtgctggccaatggacatgccccctacagcaggaccctgagccacatcagcgaggcctctgtggatgctgccctggccgaggcctctgtggaggccgtgggccctgagagcctggcctggggccccagcccccccacccacccagcccccacccatggagagcaccccagccctgtgcccccagccctggaccccggccacagcgccaccagcagcaccctgggcaccaccggctctgtgcccaccagcacagatcctgcccccagcgcccacctggacagcgtgcacaagagcacagacagcggccccagcgagctgcccggccccacccacaccaccaccggcagcacctacagcgccatcaccaccacccacagcgcccccagccccctgacccacaccaccaccggcagcacccacaagcccatcatcagcaccctgaccaccaccggccccaccctgaacatcatcggccctgtgcagaccaccaccagccccacccacaccatgcccagccccacccacaccacagccagccccacccacaccagcaccagccccacccacacccccaccagccccacccacaagacctccatgagcccccccaccaccaccagccccacccccagcggcatgggcctggtgcagacagccaccagccccacccaccccaccaccagccccacccaccccaccaccagccccatcctgatcaacgtgagccccagcaccagcctggagctggccaccctgagcagccccagcaagcacagcgaccccaccctgcctggaacagacagcctgccctgcagcccccctgtgagcaacagctacacccaggccgaccccatggcccccaggaccccccaccccagccctgcccacagcagcaggaagcccctgaccagccctgccccagaccccagcgagagcacagtgcagagcctgagccccacccccagcccccccaccccagccccccagcacagcgacctgtgcctggccatggctgtgcagacccctgtgcccacagctgctgggggcagcggggacaggagcctggaggaggccctgggcgccctgatggccgccctggatgactaccggggccagtttcctgagctgcagggcctggagcaggaggtgacccggctggagagcctgctgatgcagaggcagggcctgaccaggagccgggccagcagcctgagcatcaccgtggagcacgccctggagagcttctccttcctgaatgaagatgaagatgaagataatgatgtgcctggggaccggccccccagcagccctgaggccggggctgaagattccattgacagccccagcgcccggcccctgagcacaggctgcccagccctggatgctgccctggtgcgccacctgtaccactgcagccggctgctgctgaagctgggcaccttcggccccctgcgctgccaggaggcctgggccctggagcggctgctgcgggaggcccgggtgctggaggccgtgtgtgagttcagccgccgctgggagatcccagccagcagcgcccaggaggtggtgcagttcagcgccagcaggcctggcttcctgaccttctgggaccagtgcacagagcggctgagctgcttcctgtgccctgtggagcgggtgctgctgaccttctgcaaccagtacggggcccggctgagcctgcggcagcccggcctggccgaggccgtgtgtgtgaagttcctggaggatgccctgggccagaagctgccccggcggccccagcccggccctggagagcagctgactgtgttccagttctggagctttgtggagaccctggacagccccaccatggaggcctacgtgacagaaacagctgaggaggtgctgctggtgaggaacctgaacagtgatgaccaggccgtggtgctgaaggccctgcggctggcccctgagggccgcctgcggagagatggcctgcgggccctgagcagcctgctggtgcacggcaacaacaaggtgatggctgctgtgtccacccagctgcggagcctgagcctgggccccaccttccgggagcgggccctgctgtgcttcctggaccagctggaggatgaagatgtgcagaccagggtggccggctgcctggccctgggctgcatcaaggcccctgagggcatcgagcccctggtgtacctgtgccagacagacacagaagctgtgcgggaggccgcccggcagagcctgcagcagtgtggggaggagggccagagcgcccaccggcggctggaggagagcctggatgccctgccccgcatctttggacctggctccatggccagcacagccttctag

SEQ ID NO: 18228 - DNA, 1326 bp, synthetic construct
  source 1..1326: mol_type = other DNA; note = Synthetic coding sequence
atggcctctgtggccgccgcccgggctgtgcctgtgggcagcggcctgcggggcctgcagaggaccctgcccctggtggtgatcctgggcgccaccggcaccgggaagagcaccctggccctgcagctgggccagaggctgggcggggagatcgtgtctgctgacagcatgcaggtgtatgagggcctggacatcatcaccaacaaggtgtctgcccaggagcagaggatctgccgccaccacatgatcagctttgtggaccccctggtgaccaactacacagtggtggacttcaggaacagagccacagccctgattgaggacatctttgcccgggacaagatccccatcgtggtgggcggcaccaactactacatcgagagcctgctgtggaaggtgctggtgaacaccaagccccaggagatgggcacagagaaggtgattgacaggaaggtggagctggagaaggaggatggcctggtgctgcacaagaggctgagccaggtggaccctgagatggccgccaagctgcacccccatgacaagaggaaggtggcccggagcctgcaggtgtttgaggagaccggcatcagccacagcgagttcctgcaccggcagcacacagaggagggcggcggccccctgggcggccccctgaagttcagcaacccctgcatcctgtggctgcatgctgaccaggccgtgctggatgagcggctggacaagagggtggatgacatgctggccgccggcctgctggaggagctgcgggacttccaccggcgctacaaccagaagaatgtgtctgagaacagccaggactaccagcacggcatcttccagagcatcggcttcaaggagttccacgagtacctgatcacagagggcaagtgcaccctggagaccagcaaccagctgctgaagaagggccctggccccatcgtgccccctgtgtatggcctggaggtgtctgatgtgtccaagtgggaggagagcgtgctggagcccgccctggagatcgtgcagagcttcatccagggccacaagcccacagccacccccatcaagatgccctacaatgaagctgagaacaagaggagctaccacctgtgtgacctgtgtgaccgcatcatcattggagaccgggagtgggccgcccacatcaagagcaagagccacctgaaccagctgaagaagagaagaaggctggacagtgatgctgtgaacaccatcgagagccagagcgtgtccccagaccacaacaaggagcccaaggagaagggcagccctggccagaatgaccaggagctgaagtgcagcgtgtag

SEQ ID NO: 18229 - DNA, 618 bp, synthetic construct
  source 1..618: mol_type = other DNA; note = Synthetic coding sequence
atggccgagcccctgcagcctgaccctggagctgctgaagatgctgctgcccaggccgtggagaccccaggctggaaggccccagaagatgctggcccccagcccggcagctatgagatccgccactacggccctgccaagtgggtgtccacctctgtggagagcatggactgggacagcgccatccagacaggcttcaccaagctgaacagctacatccagggcaagaatgagaaggagatgaagatcaagatgacagcccctgtgaccagctatgtggagcccggcagcggccccttcagcgagagcaccatcaccatcagcctgtacatccccagcgagcagcagtttgatcctccccggcccctggagagtgatgtgttcatcgaggacagagctgagatgacagtgtttgtgcgcagctttgatggcttcagcagcgcccagaagaaccaggagcagctgctgaccctggccagcatcctgcgggaggatggcaaggtgtttgatgagaaggtgtactacacagctggctacaacagccctgtgaagctgctgaacagaaataatgaggtgtggctgatccagaagaatgagcccaccaaggaaaatgaatag

SEQ ID NO: 18230 - DNA, 624 bp, synthetic construct
  source 1..624: mol_type = other DNA; note = Synthetic coding sequence
atgagctgcaccatcgagaagatcctgacagatgccaagaccctgctggagcggctgcgggagcatgatgctgctgctgagagcctggtggaccagagcgctgccctgcaccggcgggtggccgccatgagggaggccggcacagccctgcctgaccagtaccaggaggatgccagtgacatgaaggacatgagcaagtacaagccccacatcctgctgagccaggagaacacccagatccgggacctgcagcaggagaaccgggagctgtggatcagcctggaggagcaccaggatgccctggagctgatcatgagcaagtacaggaagcagatgctgcagctgatggtggccaagaaggctgtggatgctgagcctgtgctgaaggcccaccagagccacagcgctgagattgagagccagattgaccgcatctgtgagatgggagaggtgatgaggaaggctgtgcaggtggatgatgaccagttctgcaagatccaggagaagctggcccagctggagctggagaacaaggagctgcgggagctgctgagcatcagcagcgagagcctgcaggccaggaaggagaacagcatggacacagccagccaggccatcaagtag

SEQ ID NO: 18231 - DNA, 1032 bp, synthetic construct
  source 1..1032: mol_type = other DNA; note = Synthetic coding sequence
atgaacatccacaggagcacccccatcaccatcgcccgctatggccgcagcaggaacaagacccaggactttgaggagctgagcagcatccgctctgctgagcccagccagagcttcagccccaacctgggcagccccagccccccagagacccccaacctgagccactgtgtgtcctgcatcggcaagtacctgctgctggagcccctggagggggaccacgtgttccgggctgtgcacctgcacagcggggaggagctggtgtgcaaggtgtttgacatcagctgctaccaggagagcctggccccctgcttctgcctgagcgcccacagcaacatcaaccagatcacagagatcatcctgggggagaccaaggcctacgtgttctttgagaggagctatggagacatgcacagctttgtgaggacctgcaagaagctgcgggaggaggaggccgcccggctcttctaccagatcgccagcgctgtggcccactgccatgatggcggcctggtgctgcgggacctgaagctgaggaagttcatcttcaaggatgaggagaggaccagggtgaagctggagagcctggaggatgcctacatcctgcggggagatgatgacagcctgagtgacaagcacggctgcccagcctacgtgtccccagagatcctgaacaccagcggcagctacagcggcaaggctgctgatgtgtggagcctgggcgtgatgctgtacaccatgctggtgggccgctaccccttccatgacatcgagcccagcagcctcttcagcaagatcagaagaggccagttcaacatccctgagaccctgagccccaaggccaagtgcctgatccgcagcatcctgcggcgggagcccagcgagcggctgaccagccaggagatcctggaccacccctggttcagcacagacttctctgtgagcaacagcgcctatggagccaaggaggtgtctgaccagctggtgcctgatgtgaacatggaggagaacctggaccccttcttcaactag

SEQ ID NO: 18232 - DNA, 3048 bp, synthetic construct
  source 1..3048: mol_type = other DNA; note = Synthetic coding sequence
atgaggcgcttcctgcggcccggccatgaccctgtgcgggagcggctgaagagggacctcttccagttcaacaagacagtggagcacggcttcccccaccagcccagcgccctgggctacagccccagcctgcgcatcctggccatcggcaccaggtctggggccatcaagctgtatggagcccctggggtggagttcatgggcctgcaccaggagaacaatgctgtgacccagatccacctgctgcccggccagtgccagctggtgaccctgctggatgacaacagcctgcacctgtggagcctgaaggtgaagggcggggccagcgagctgcaggaggatgagagcttcaccctgcggggccccccaggagctgcccccagcgccacccagatcaccgtggtgctgccccacagcagctgtgagctgctgtacctgggcacagagagcggaaatgtgtttgtggtgcagctgcctgccttccgggccctggaggacaggaccatcagcagtgatgctgtgctgcagaggctgcctgaggaggcccggcacagaagagtgtttgagatggtggaggccctgcaggagcacccccgggaccccaaccagatcctgattggctacagccggggcctggtggtgatctgggacctgcagggcagccgggtgctgtaccacttcctgagcagccagcagctggagaacatctggtggcagagagatggccgcctgctggtgtcctgccacagtgatggcagctactgccagtggcctgtgtcctctgaggcccagcagcctgagcccctgcggagcctggtgccctacggccccttcccctgcaaggccatcacccgcatcctgtggctgaccacccggcagggcctgcccttcaccatcttccagggcggcatgccccgggccagctatggagacagacactgcatcagcgtcatccatgatggccagcagacagcctttgacttcaccagccgggtgattggcttcaccgtgctgacagaagctgaccctgctgccacctttgatgacccctatgccctggtggtgctggccgaggaggagctggtggtgattgacctgcagacagctggctggccccctgtgcagctgccctacctggccagcctgcactgcagcgccatcacctgcagccaccacgtgagcaacatccccctgaagctgtgggagcgcatcatcgctgctggcagccggcagaatgcccacttcagcaccatggagtggcccattgatggcggcaccagcctgaccccagccccaccccagagggacctgctgctgaccggccatgaagatggcaccgtgcgcttctgggatgccagcggcgtgtgcctgcggctgctgtacaagctgagcacagtgcgggtcttcctgacagacacagaccccaatgaaaacttcagcgcccagggagaagatgagtggccacccctgaggaaggtgggcagctttgacccctacagtgatgacccccggctgggcatccagaagatcttcctgtgcaagtacagcggctacctggccgtggccggcacagctggccaggtgctggtgctggagctgaatgatgaagctgctgagcaggccgtggagcaggtggaggccgacctgctgcaggaccaggagggctaccgctggaagggccacgagcggctggccgcccggagcggccctgtgcgctttgagcccggcttccagccctttgtgctggtgcagtgccagcccccagctgtggtgaccagcctggccctgcacagcgagtggaggctggtggccttcggcaccagccacggcttcggcctgtttgaccaccagcagaggcggcaggtgtttgtgaagtgcaccctgcaccccagcgaccagctggccctggagggccccctgagccgggtgaagagcctgaagaagagcctgcggcagagcttccggaggatgaggaggagccgggtgagcagcaggaagaggcaccctgctggccccccaggagaggcccaggagggcagcgccaaggccgagcggcccggcctgcagaacatggagctggcccctgtgcagaggaagattgaggcccggtctgctgaggacagcttcaccggctttgtgaggaccctgtactttgctgacacctacctgaaggacagcagccgccactgccccagcctgtgggccggcaccaacggcggcaccatctatgccttcagcctgcgggtgcccccagctgagaggaggatggatgagcctgtgcgggcagagcaggccaaggagatccagctgatgcaccgggcccctgtggtgggcatcctggtgctggatggccacagcgtgcccctgcctgagcccctggaggtggcccatgacctgagcaagagcccagacatgcagggcagccaccagctgctggtggtgtctgaggagcagttcaaggtgttcaccctgcccaaggtgtctgccaagctgaagctgaagctgacagccctggagggcagccgggtgcggcgggtgtctgtggcccacttcggcagccggcgggcagaagattatggagagcaccacctggccgtgctgaccaacctgggggacatccaggtggtgtccctgcccctgctgaagccccaggtgcgctacagctgcatcagaagagaagatgtgtctggcatcgccagctgtgtgttcaccaagtatggccagggcttctacctgatcagccccagcgagtttgagcgcttcagcctgagcaccaagtggctggtggagccccgctgcctggtggacagcgctgagaccaagaaccacaggcctggaaatggagctggccccaagaaggcccccagccgggccagaaattctggcacccagagtgatggagaggagaagcagcccggcctggtgatggagcgggccctgctgagtgatgagcgggccgccaccggggtgcacatcgagcccccctggggcgccgccagcgccatggccgagcagagcgagtggctgtctgtgcaggccgccaggtag

SEQ ID NO: 18233 - DNA, 897 bp, synthetic construct
  source 1..897: mol_type = other DNA; note = Synthetic coding sequence
atggctgctgctgagcctgctgtgctggccctgcccaacagcggggccggcggggccggggcccccagcggcaccgtgcctgtgctcttctgcttctctgtgtttgcccggcccagctctgtgccccatggagctggctatgagctgctgatccagaagttcctgagcctgtatggagaccagattgacatgcacaggaagtttgtggtgcagctgtttgctgaggagtggggccagtatgtggacctgcccaagggctttgctgtgtctgagcgctgcaaggtgcggctggtgcccctgcagatccagctgaccaccctgggcaacctgacccccagcagcacagtgttcttctgctgtgacatgcaggagcgcttccggcctgccatcaagtactttggagacatcatctctgtgggccagaggctgctgcagggcgcccgcatcctgggcatccctgtgattgtgacagagcagtaccccaagggcctgggcagcacagtgcaggagattgacctgactggagtgaagctggtgctgcccaagaccaagttctccatggtgctgcctgaggtggaggccgccctggccgagatccctggggtgcgctctgtggtgctgtttggagtggagacccacgtgtgcatccagcagacagccctggagctggtgggccggggcgtggaggtgcacatcgtggctgatgccaccagcagccgctccatgatggacaggatgtttgccctggagcggctggccaggacaggcatcatcgtgaccaccagcgaggccgtgctgctgcagctggtggccgacaaggaccaccccaagttcaaggagatccagaacctgatcaaggccagcgcccctgagagcggcctgctgagcaaggtgtag

SEQ ID NO: 18234 - DNA, 2439 bp, synthetic construct
  source 1..2439: mol_type = other DNA; note = Synthetic coding sequence
atgtctgagcagggcgacctgaaccaggccatcgccgaggagggcggcacagagcaggagacagccaccccagaaaatggcatcgtgaagtctgagagcctggatgaggaggagaagctggagctgcagaggcggctggaggcccagaaccaggagaggaggaagagcaagagcggggccggcaagggcaagctgaccaggagcctggccgtgtgtgaggagagcagcgcccggcctggaggagagagcctgcaggaccaggagagcatccacctgcagctgagcagcttcagcagcctgcaggaggaggacaagagcaggaaggatgattctgagcgggagaaggagaaggacaagaacaaggacaagaccagcgagaagcccaagatccgcatgctgagcaaggactgcagccaggagtacacagacagcactggaattgacctgcacgagttcctgatcaacaccctgaagaacaacagccgggacaggatgatcctgctgaagatggagcaggagatcatcgacttcatcgctgacaacaacaaccactacaagaagttcccccagatgagcagctaccagaggatgctggtgcaccgggtggccgcctacttcggcctggaccacaacgtggaccagacaggcaagagcgtcatcatcaacaagaccagcagcacccgcatccctgagcagcgcttctgtgagcacctgaaggatgagaagggggaggagagccagaagcgcttcatcctgaagagggacaacagcagcattgacaaggaggacaaccagcagaacaggatgcaccccttcagagatgaccggcgcagcaagagcattgaggagcgggaggaggagtaccagagggtgcgggagcgcatctttgcccatgacagcgtgtgcagccaggagagcctgtttgtggagaacagccggctgctggaggacagcaacatctgcaatgagacctacaagaagaggcagctgttccggggcaacagagatggcagcggccgcaccagcggcagccggcagagcagcagtgaaaatgagctgaagtggagcgaccaccagagggcctggagcagcacagacagcgacagcagcaacagaaacctgaagccagccatgaccaagacagccagctttggaggcatcaccgtgctgaccaggggggacagcaccagcagcaccaggagcacaggcaagctgagcaaggccggcagcgagagcagcagcagcgctggcagcagcggcagcctgagcaggacccacccccccctgcagagcacccccctggtgtctggagtggccgccggcagccctggctgtgtgccctacccagaaaatggaattggaggccaggtggcccccagcagcaccagctacatcctgctgcccctggaggccgccaccggcatccccccaggcagcatcctgctgaacccccacacaggccagccctttgtgaacccagatggcaccccagccatctacaacccccccaccagccagcagcccctgcggagcgccatggtgggccagagccagcagcagcccccccagcagcagcccagcccccagccccagcagcaggtgcagcccccccagccccagatggccggccccctggtgacccagagagatgatgtggccacccagtttggccagatgaccctgagccggcagagcagcggggagaccccagagccccccagcggccctgtgtaccccagcagcctgatgccccagcctgcccagcagcccagctatgtgattgccagcacaggccagcagctgcccactggaggcttcagcggcagcggcccccccatcagccagcaggtgctgcagcccccacccagcccccagggctttgtgcagcagcccccaccagcccagatgcctgtgtactactaccccagcggccagtaccccaccagcaccacccagcagtaccggcccatggcccctgtgcagtacaatgcccagaggagccagcagatgccccaggccgcccagcaggccggctaccagcctgtgctgagcggccagcagggcttccagggcctgattggagtgcagcagcccccccagagccagaatgtcatcaacaaccagcagggcacccctgtgcagagcgtgatggtgtcctaccccaccatgagcagctaccaggtgcccatgacccagggcagccagggcctgccccagcagagctaccagcagcccatcatgctgcccaaccaggccggccagggcagcctgcctgccaccggcatgcctgtgtactgcaatgtgaccccacccaccccccagaacaacctgcggctcatcggcccccactgccccagcagcacagtgcctgtgatgtctgccagctgcaggaccaactgtgcctccatgagcaatgccggctggcaggtgaagttctag

SEQ ID NO: 18235 - DNA, 1191 bp, synthetic construct
  source 1..1191: mol_type = other DNA; note = Synthetic coding sequence
atgaccaccctggtgctggacaacggggcctacaatgccaagattggctacagccatgaaaatgtgtctgtcatccccaactgccagttccgcagcaagacagcccggctgaagaccttcaccgccaaccagattgatgagatcaaggaccccagcggcctcttctacatcctgcccttccagaagggctacctggtgaactgggatgtgcagaggcaggtgtgggactacctgtttgggaaggagatgtaccaggtggacttcctggacaccaacatcatcatcacagagccctacttcaacttcaccagcatccaggagagcatgaatgagatcctgtttgaggagtaccagttccaggccgtgctgcgggtgaatgctggggccctgagcgcccaccgctacttccgggacaaccccagcgagctgtgctgcatcatcgtggacagcggctacagcttcacccacatcgtgccctactgccgcagcaagaagaagaaggaggccatcatccgcatcaacgtgggcggcaagctgctgaccaaccacctgaaggagatcatctcctaccggcagctgcacgtgatggatgagacccacgtgatcaaccaggtgaaggaggatgtgtgctacgtgtcccaggacttctacagagacatggacatcgccaagctgaagggggaggagaacacagtgatgattgattatgtgctgcctgacttcagcaccatcaagaagggcttctgcaagccccgggaggagatggtgctgagcggcaagtacaagtctggagagcagatcctgcggctggccaatgaaagatttgctgtgcctgagatcctcttcaaccccagcgacatcggcatccaggagatgggcatccctgaggccatcgtgtacagcatccagaacctgcctgaggagatgcagccccacttcttcaagaacatcgtgctgaccggcggcaacagcctcttccctggcttccgggacagagtgtacagcgaggtgcgctgcctgacccccacagattatgatgtgtctgtggtgctgcctgagaaccccatcacctacgcctgggagggcggcaagctgatcagtgaaaatgatgactttgaggacatggtggtgacccgggaggactatgaggagaatggccacagcgtgtgtgaggagaagtttgacatctag

SEQ ID NO: 18236 - DNA, 1005 bp, synthetic construct
  source 1..1005: mol_type = other DNA; note = Synthetic coding sequence
atggagcccggccccacagctgcccagaggcgctgcagcctgcccccctggctgcccctgggcctgctgctgtggagcggcctggccctgggcgccctgcccttcggcagcagcccccacagggtcttccatgacctgctgtctgagcagcagctgctggaggtggaggacctgagcctgagcctgctgcagggcggcggcctgggccccctgagcctgcccccagacctgcctgacctggaccctgaatgtcgggagctgctgctggactttgccaacagcagcgctgagctgaccggctgcctggtgcgcagcgcccggcctgtgcggctgtgccagacctgctaccccctcttccagcaggtggtgtccaagatggacaacatcagcagagctgctggcaacaccagcgagagccagagctgtgcccggagcctgctgatggctgacaggatgcagatcgtggtgatcctgtctgagttcttcaacaccacctggcaggaggccaactgtgccaactgcctgaccaacaacagcgaggagctgagcaacagcacagtgtacttcctgaacctcttcaaccacaccctgacctgctttgagcacaacctgcagggcaatgcccacagcctgctgcagaccaagaactacagcgaggtgtgcaagaactgccgggaggcctacaagaccctgagcagcctgtacagcgagatgcagaagatgaatgagctggagaacaaggccgagcccggcacccacctgtgcattgatgtggaggatgccatgaacatcaccaggaagctgtggagcaggaccttcaactgcagcgtgccctgcagcgacacagtgcctgtgattgctgtgtctgtgttcatcctcttcctgcctgtggtgttctacctgagcagcttcctgcacagcgagcagaagaagaggaagctgatcctgcccaagaggctgaagagcagcaccagctttgccaacatccaggagaacagcaactag

SEQ ID NO: 18237 - DNA, 2172 bp, synthetic construct
  source 1..2172: mol_type = other DNA; note = Synthetic coding sequence
atgagcacagccactggacctgaggccgcccccaagcccagcgccaagagcatctatgagcagaggaagcgctacagcacagtggtgatggctgatgtgtcccagtaccctgtgaaccacctggtgaccttctgcctgggggaggatgatggagtgcacacagtggaggatgccagcaggaagctggccgtgatggacagccagggccgggtgtgggcccaggagatgctgctgcgggtgtccccagaccacgtgaccctgctggaccctgccagcaaggaggagctggagagctaccccctgggcgccatcgtgcgctgtgatgctgtgatgcctcctggccgcagccgcagcctgctgctgctggtgtgccaggagcctgagcgggcccagccagatgtgcacttcttccagggcctgcggctgggcgctgagctgatccgggaggacatccagggcgccctgcacaactaccgcagcggccgcggggagaggagagctgctgccctgcgggccacccaggaggagctgcagagggacaggagccctgctgctgagaccccacccctgcagaggcggcccagcgtgcgggccgtcatcagcacagtggagagaggagctggccggggccggccccaggccaagcccatccctgaggccgaggaggcccagaggcctgagcctgtgggcaccagcagcaatgctgacagcgccagcccagacctgggcccccggggccctgacctggccgtgctgcaggccgagcgggaggtggacatcctgaaccacgtgtttgatgatgtggagagctttgtgtcccggctgcagaagtctgctgaggccgcccgggtgctggagcaccgggagcggggccgccgcagcagaagaagagctgctggggagggcctgctgaccctgcgggccaagccacccagcgaggccgagtacacagatgtgctgcagaagatcaagtatgccttcagcctgctggcccggctgcggggcaacattgctgaccccagcagccctgagctgctgcacttcctgtttggccccctgcagatgattgtgaacaccagcggcggccctgagtttgccagctctgtgcggcggccccacctgaccagtgatgctgtggccctgctgcgggacaacgtgaccccccgggagaatgagctgtggaccagcctgggggacagctggacccggcccggcctggagctgagccctgaggagggccccccctacagacctgagttcttcagcggctgggagccccctgtgacagacccccagagccgggcctgggaggaccctgtggagaagcagctgcagcacgagaggagaagacggcagcagagcgccccccaggtggccgtgaatggccaccgggacctggagcctgagagcgagccccagctggagagcgagacagctgggaagtgggtgctgtgcaactatgacttccaggccaggaacagcagcgagctgtctgtgaagcagagagatgtgctggaggtgctggatgacagcaggaagtggtggaaggtgcgggaccctgctggccaggagggctacgtgccctacaacatcctgaccccctacccaggcccccggctgcaccacagccagagccctgcccggagcctgaacagcaccccacctcctcctccagccccagccccagcccctcctccagccctggcccggccccgctgggaccggccccgctgggacagctgtgacagcctgaatggcctggaccccagcgagaaggagaagttcagccagatgctgattgtgaatgaggagctgcaggcccggctggcccagggccgcagcggccccagcagagctgtgcccggcccccgggcccctgagccccagctgagccctggcagtgatgccagcgaggtgcgggcctggctgcaggccaagggcttcagcagcggcaccgtggatgccctgggcgtgctgaccggggcccagctgttcagcctgcagaaggaggagctgcgggctgtgtccccagaggagggcgcccgggtgtacagccaggtgacagtgcagaggagcctgctggaggacaaggagaaggtgtctgagctggaggccgtgatggagaagcagaagaagaaggtggagggggaggtggagatggaggtgatctag

SEQ ID NO: 18238 - DNA, 5622 bp, synthetic construct
  source 1..5622: mol_type = other DNA; note = Synthetic coding sequence
atgttcagccgccgcagccatggagatgtgaagaagagcacccagaaggtgctggaccccaagaaggatgtgctgacccggctgaagcacctgcgggccctgctggacaacgtggatgccaatgacctgaagcagttctttgagaccaactacagccagatctacttcatcttctatgagaacttcatcgccctggagaacagcctgaagctgaagggcaacaacaagagccagcgggaggagctggacagcatcctcttcctgtttgagaagatcctgcagttcctgcctgagcgcatcttcttccgctggcactaccagagcatcggcagcaccctgaagaagctgctgcacactggaaacagcatcaagatccgctgtgagggcatccgcctcttcctgctgtggctgcaggccctgcagaccaactgtgccgaggagcaggtgctgatctttgcctgcctggtgcccggcttccctgctgtgatgagcagccggggcccctgcaccctggagaccctcatcaaccccagccccagcgtggctgatgtgaagatctacccagaggagatcacccccctgctgcctgccatctctggagagaagattgctgaggaccagacctgcttcttcctgcagatcctgctgaagtacatggtgatccaggccgccagcctggagtggaagaacaaggagaaccaggacaccggcttcaagttcctgttcaccctcttcaggaagtactacctgccccacctgttccccagcttcaccaagctgaccaacatctacaagcctgtgctggacatcccccacctgcggcccaagcctgtgtacatcaccaccacccgggacaatgaaaacatctacagcaccaagatcccctacatggccgcccgggtggtgttcatcaagtggatcgtgaccttcttcctggagaagaagtacctgacagccacccagaacaccaagaatggagtggatgtgctgcccaagatcatccagacagtgggcggcggcgctgtgcaggagcgggcccctgagctggatggcggcggccccacagagcaggacaagagccacagcaacagcagcaccctgagtgaccggcggctgagcaacagcagcctgtgcagcattgaggaggagcacaggatggtgtatgagatggtgcagaggatcctgctgagcacccggggctacgtgaactttgtgaatgaggtgttccaccaggccttcctgctgcccagctgtgaaattgctgtgaccaggaaggtggtgcaggtgtacaggaagtggatcctgcaggacaagcctgtgttcatggaggagccagacaggaaggatgtggcccaggaggatgctgagaagctgggcttcagcgagacagacagcaaggaggccagcagcgagagcagcggccacaagaggagcagctcctggggccgcacctacagcttcaccagcgccatgagccggggctgtgtgacagaggaggagaacaccaacgtgaaggccggcgtgcaggccctgctgcaggtgttcctgaccaacagcgccaacatcttcctgctggagccctgtgccgaggtgcctgtgctgctgaaggagcaggtggatgcctgcaaggctgtgctgatcatcttccggaggatgatcatggagctgaccatgaacaagaagacctgggagcagatgctgcagatcctgctgcgcatcacagaggccgtgatgcagaagcccaaggacaagcagatcaaggacctgtttgcccagagcctggccggcctgctcttccgcaccctgatggtggcctggatccgggccaacctgtgtgtgtacatcagccgggagctgtgggatgacttcctgggcgtgctgagcagcctgacagagtgggaggagctgatcaatgagtgggccaacatcatggacagcctgacagctgtgctggccaggacagtgtatggagtggagatgaccaacctgcccctggacaagctgtctgagcagaaggagaagaagcagaggggcaagggctgtgtgctggacccccagaagggcaccaccgtgggccgctccttcagcctgtcctggaggagccacccagatgtgacagagcccatgaggttccgcagcgccaccaccagcggggcccctggggtggagaaggccaggaacatcgtgcggcagaaggccacagaggtggaggagtgccagcagagtgaaaatgccccagctgctggcagcggccacctgactgtgggccagcagcagcaggtgctgcggagcagcagcaccagtgacatccctgagcccctgtgcagcgacagcagccagggccagaaggccgagaacacccagaacagcagcagcagcgagccccagcccatccaggagaacaagggccacgtgaagcgggagcacgagggcatcaccatcctggtgagaagaagcagcagccctgctgagctggacctgaaggatgacctgcagcagacccagggcaaatgtcgggagcggcagaagtctgagagcaccaacagcgacaccaccctgggctgcaccaatgaagctgagctgtccatgggcccctggcagacctgtgaagaagatcctgagctgaacacccccacagatgtggtggctgatgctgatgcccggcactggctgcagctgagccccacagatgccagcaacctgacagacagcagcgagtgcctgacagatgactgcagcatcatcgccggcggcagcctgaccggctggcacccagattctgctgctgtgctgtggaggagagtgctgggcatcctgggagatgtgaacaacatccagagccccaagatccacgcccgggtcttctgctacctgtatgagctgtggtacaagctggccaagatccgggacaacctggccatcagcctggacaaccagagcagccccagcccccctgtgctgatcccccccctgaggatgtttgcctcctggctgttcaaggccgccaccctgcccaatgagtacaaggagggcaagctgcaggcctaccgcctcatctgtgccatgatgacccggcggcaggatgtgctgcccaacagcgacttcctggtgcacttctacctggtgatgcacctgggcctgaccagcgaggaccaggacatcctgaacaccatcatccgccactgccccccacgcttcttcagcctgggcttccctggcttctccatgctggtgggggacttcatcacagctgctgcccgggtgctgagcacagacatcctgacagcccccaggtctgaggccgtgacagtgctgggcagcctggtgtgcttccccaacacctaccaggagatccccctgctgcagagcgtgcctgaggtgaatgaggccatcaccggcacagaagatgtgaagcactacctgatcaacatcctgctgaagaatgccacagaggagcccaatgaatatgcccgctgcatcgctgtgtgcagcctgggcgtgtggatctgtgaggagctggcccagtgcaccagccacccccaggtgaaggaggccatcaacgtgattggagtgaccctgaagttccccaacaagatcgtggcccaggtggcctgtgatgtgctgcagctgctggtgtcctactgggagaagctgcagatgtttgagaccagcctgcccaggaagatggccgagatcctggtggccaccgtggccttcctgctgcccagcgctgagtacagctctgtggagacagacaagaagttcatcgtgtccctgctgctgtgcctgctggactggtgcatggccctgcctgtgtctgtgctgctgcaccctgtgtccacagctgtgctggaggagcagcacagcgcccgggcccccctgctggactacatctacagagtgctgcactgctgcgtgtgtggcagcagcacctacacccagcagagccactacatcctgaccctggccgacctgagcagcacagattatgaccccttcctgcccctggccaacgtgaagagcagcgagcctgtgcagtaccacagcagcgctgagctgggcaacctgctgactgtggaggaggagaagaagagaagaagcctggagctgatccccctgacagccaggatggtgatggcccacctggtgaaccacctgggccactaccccctgagcggcggccctgccatcctgcacagcctggtgtctgagaaccacgacaatgcccacgtggagggcagcgagctgagctttgaggtgttccgcagccccaacctgcagctgtttgtgttcaatgacagcaccctcatctcctacctgcagacccccacagagggccctgtgggcggcagccctgtgggcagcctgagtgatgtgcgggtcatcgtgcgggacatcagcggcaagtacagctgggatggcaaggtgctgtatggccccctggagggctgcctggcccccaacggcaggaaccccagcttcctgatcagctcctggcaccgggacaccttcggcccccagaaggacagcagccaggtggaggagggagatgatgtgctggacaagctgctggagaacatcggccacaccagcccagaatgtctgctgcccagccagctgaacctgaatgagcccagcctgaccccctgtggcatgaactatgaccaggagaaggagatcattgaagtcatcctgcggcagaatgcccaggaggatgagtacatccagagccacaactttgacagcgccatgaaggtgaccagccagggccagcccagccctgtggagccccggggccccttctacttctgccgcctgctgctggatgacctgggcatgaacagctgggacaggaggaagaacttccacctgctgaagaagaacagcaagctgctgcgggagctgaagaacctggacagccggcagtgccgggagacccacaagattgctgtgttctacatcgccgagggccaggaggacaagtgcagcatcctgagcaatgaaagaggcagccaggcctatgaagattttgtggccggcctgggctgggaggtggacctgagcacccactgcggcttcatgggcggcctgcagagaaatggcagcacaggccagacagccccctactatgccaccagcacagtggaggtgatcttccacgtgtccaccaggatgcccagcgacagtgatgacagcctgaccaagaagctgcggcacctgggcaatgatgaggtgcacatcgtgtggagcgagcacagccgggactacagaagaggcatcatccccacagcctttggagatgtgtccatcatcatctaccccatgaagaaccacatgttcttcatcgccatcaccaagaagccagaggtgcccttcttcggccccctgtttgatggagccatcgtgtctgggaagctgctgcccagcctggtgtgtgccacctgcatcaatgccagcagagctgtgaagtgcctgatccccctgtaccagagcttctatgaggagcgggccctgtacctggaggccatcatccagaaccaccgggaggtgatgacctttgaggactttgctgcccaggtgttcagccccagccccagctacagcctgagcggcacagactag

SEQ ID NO: 18239 - DNA, 1041 bp, synthetic construct
  source 1..1041: mol_type = other DNA; note = Synthetic coding sequence
atggcccggcccggccagcgctggctgggcaagtggctggtggccatggtggtgtgggccctgtgccgcctggccacccccctggccaagaacctggagcctgtgtcctggagcagcctgaaccccaagttcctgagcggcaagggcctggtgatctaccccaagatcggggacaagctggacatcatctgccccagggctgaggccggccggccctatgagtactacaagctgtacctggtgcggcctgagcaggccgccgcctgcagcacagtgctggaccccaacgtgctggtgacctgcaacagacctgagcaggagatccgcttcaccatcaagttccaggagttcagccccaactacatgggcctggagttcaagaagcaccacgactactacatcaccagcaccagcaatggcagcctggagggcctggagaaccgggagggcggcgtgtgcaggaccaggaccatgaagatcatcatgaaggtgggccaggaccccaatgctgtgaccccagagcagctgaccaccagccggcccagcaaggaggccgacaacacagtgaagatggccacccaggcccctggcagccggggcagcctgggggacagtgatggcaagcatgaaacagtgaaccaggaggagaagagcggccctggggccagcggcggcagcagcggggaccctgatggcttcttcaacagcaaggtggccctgtttgctgctgtgggcgccggctgcgtcatcttcctgctgatcatcatcttcctgactgtgctgctgctgaagctgaggaagaggcacaggaagcacacccagcagagagctgctgccctgagcctgagcaccctggccagccccaagggcggcagcggcacagctggaacagagcccagcgacatcatcatccccctgcggaccacagagaacaactactgcccccactatgagaaggtgtctggggactatggccaccctgtgtacatcgtgcaggagatgccaccccagagccctgccaacatctactacaaggtgtag

SEQ ID NO: 18240 - DNA, 1617 bp, synthetic construct
  source 1..1617: mol_type = other DNA; note = Synthetic coding sequence
atggccagtgaccccatcttcaccctggccccacccctgcactgccactatggagccttccccccaaatgccagcggctgggagcagcccccaaatgccagcggcgtgtctgtggccagcgctgccctggccgccagcgctgccagccgggtggccaccagcacagaccccagctgcagcggctttgcccccccagacttcaaccactgcctgaaggactgggactacaacggcctgcctgtgctgaccaccaatgccatcggccagtgggacctggtgtgtgacctgggctggcaggtgatcctggagcagatcctcttcatcctgggctttgccagcggctacctgttcctgggctacccagctgacagatttggaagaagaggcatcgtgctgctgaccctgggcctggtgggcccctgtggggtgggcggcgctgctgctggcagcagcactggagtgatggccctgcgcttcctgctgggcttcctgctggccggcgtggacctgggcgtgtacctgatgaggctggagctgtgtgaccccacccagaggctgcgggtggccctggccggggagctggtgggcgtgggcggccacttcctgttcctgggcctggccctggtgtccaaggactggaggttcctgcagaggatgatcacagccccctgcatcctcttcctgttctacggctggccaggcctcttcctggagagcgcccgctggctgattgtgaagaggcagatcgaggaggcccagagcgtgctgcgcatcctggccgagaggaaccggccccacggccagatgctgggggaggaggcccaggaggccctgcaggacctggagaacacctgccccctgcctgccaccagcagcttctcctttgccagcctgctgaactacagaaacatctggaagaacctgctgatcctgggcttcaccaacttcatcgcccacgccatccgccactgctaccagcctgtgggcggcggcggcagccccagcgacttctacctgtgcagcctgctggccagcggcacagctgccctggcctgtgtgttcctgggcgtgacagtggaccgcttcggccggcggggcatcctgctgctgtccatgaccctgactggaattgccagcctggtgctgctgggcctgtgggactgtgagcaccccatcttccccaccgtgtgggcccagcagggcaaccccaacagagacctgaatgaggccgccatcaccaccttctctgtgctgggcctcttcagcagccaggccgccgccatcctgagcaccctgctggccgctgaggtgatccccaccaccgtgcggggccggggcctgggcctcatcatggccctgggcgccctgggcggcctgagcggccctgcccagaggctgcacatgggccacggggccttcctgcagcacgtggtgctggccgcctgtgccctgctgtgcatcctgagcatcatgctgctgcctgagaccaagaggaagctgctgcctgaggtgctgagagatggagagctgtgccggcggcccagcctgctgcggcagcccccacccacccgctgtgaccacgtgcccctgctggccacccccaacccagccctgtag

SEQ ID NO: 18241 - DNA, 1128 bp, synthetic construct
  source 1..1128: mol_type = other DNA; note = Synthetic coding sequence
atgagcacagctgggaaggtgatcaagtgcaaggctgctgtgctgtgggagctgaagaagcccttcagcattgaggaggtggaggtggccccacccaaggcccacgaggtgcgcatcaagatggtggccgtgggcatctgtggcacagatgaccacgtggtgtctggcaccatggtgacccccctgcctgtgatcctgggccacgaggccgccggcatcgtggagagcgtgggggagggcgtgaccaccgtgaagccaggggacaaggtgatccccctggccatcccccagtgtgggaagtgccgcatctgcaagaaccctgagagcaactactgcctgaagaatgatgtgagcaacccccagggcaccctgcaggacggcaccagccgcttcacctgcaggaggaagcccatccaccacttcctgggcatcagcaccttcagccagtacacagtggtggatgaaaatgctgtggccaagattgatgctgccagccccctggagaaggtgtgcctgattggctgcggcttcagcacaggctacggcagcgctgtgaatgtggccaaggtgaccccaggcagcacctgtgctgtgtttggcctgggcggcgtgggcctgagcgccatcatgggctgcaaggctgctggagctgcccgcatcatcgctgtggacatcaacaaggacaagtttgccaaggccaaggagctgggcgccacagagtgcatcaacccccaggactacaagaagcccatccaggaggtgctgaaggagatgacagatggcggcgtggacttctcctttgaagtcatcggccgcctggacaccatgatggccagcctgctgtgctgccacgaggcctgtggcaccagcgtcatcgtgggcgtgcccccagacagccagaacctgtccatgaaccccatgctgctgctgactggaagaacctggaagggggccatcctgggcggcttcaagagcaaagaatgtgtgcccaagctggtggccgacttcatggccaagaagttcagcctggatgccctgatcacccacgtgctgccctttgagaagatcaatgaaggatttgacctgctgcacagcggcaagagcatccgcaccatcctgatgttttag

SEQ ID NO: 18242 - DNA, 1641 bp, synthetic construct
  source 1..1641: mol_type = other DNA; note = Synthetic coding sequence
atgtgcagcctgggcctcttccccccacctccaccccggggccaggtgaccctgtatgagcacaacaatgagctggtgacaggcagcagctatgagagccccccaccagacttccggggccagtggatcaacctgcctgtgctgcagctgaccaaggaccccctgaagaccccaggccgcctggaccacggcaccaggacagccttcatccaccaccgggagcaggtgtggaagcgctgcatcaacatctggagagatgtgggcctgtttggagtgctgaatgagatcgccaacagcgaggaggaggtgtttgagtgggtgaagacagccagcggctgggccctggccctgtgccgctgggccagcagcctgcacggcagcctcttcccccacctgagcctgcggtctgaggacctgattgctgagtttgcccaggtgaccaactggagcagctgctgcctgcgggtgtttgcctggcacccccacaccaacaagtttgctgtggccctgctggatgacagcgtgcgggtgtacaatgccagcagcaccatcgtgcccagcctgaagcaccggctgcagagaaatgtggccagcctggcctggaagcccctgagcgcctctgtgctggccgtggcctgccagagctgcatcctgatctggaccctggaccccaccagcctgagcacccggcccagcagcggctgtgcccaggtgctgagccaccctggccacacccctgtgaccagcctggcctgggcccccagcggcggccgcctgctgagcgccagccctgtggatgctgccatccgggtgtgggatgtgtccacagagacctgtgtgcccctgccctggttccggggcggcggcgtgaccaacctgctgtggagcccagatggcagcaagatcctggccaccacccccagcgctgtgttccgggtgtgggaggcccagatgtggacctgtgagcgctggcccaccctgagcggccgctgccagacaggctgctggagcccagatggcagccggctgctcttcaccgtgctgggggagcccctcatctacagcctgtccttccctgagcgctgtggggagggcaagggctgtgtgggcggggccaagagcgccaccatcgtggccgacctgtctgagaccaccatccagaccccagatggagaggagcggctgggcggggaggcccacagcatggtgtgggaccccagcggggagcggctggccgtgctgatgaagggcaagccccgggtgcaggacggcaagcctgtgatcctgctcttccgcaccaggaacagccctgtgtttgagctgctgccctgtggcatcatccagggcgagcccggggcccagccccagctgatcaccttccaccccagcttcaacaagggggccctgctgtctgtgggctggagcactggaagaattgcccacatccccctgtactttgtgaatgcccagttcccccgcttcagccctgtgctgggccgggcccaggagcccccagctgggggcggcggcagcatccatgacctgcccctcttcacagagaccagccccaccagcgccccctgggaccccctgcccggccccccacctgtgctgccccacagcccccacagccacctgtag

SEQ ID NO: 18243 - DNA, 576 bp, synthetic construct
  source 1..576: mol_type = other DNA; note = Synthetic coding sequence
atgggcaagaagaccaagaggacagctgacagcagcagcagtgaagatgaggaggagtatgtggtggagaaggtgctggaccggcgggtggtgaagggccaggtggagtacctgctgaagtggaagggcttcagcgaggagcacaacacctgggagcctgagaagaacctggactgcccagagctgatcagcgagttcatgaagaagtacaagaagatgaaggagggggagaacaacaagccccgggagaagtctgagagcaacaagaggaagagcaacttcagcaacagcgcagatgacatcaagagcaagaagaagcgggagcagagcaatgacatcgcccggggctttgagcggggcctggagcctgagaagatcattggagccacagacagctgtggggacctgatgttcctgatgaagtggaaggacacagatgaggccgacctggtgctggccaaggaggccaacgtgaagtgcccccagatcgtgattgccttctatgaggagcggctgacctggcacgcctacccagaagatgctgagaacaaggagaaggagacagccaagagctag

SEQ ID NO: 18244 - DNA, 1554 bp, synthetic construct
  source 1..1554: mol_type = other DNA; note = Synthetic coding sequence
atgggcaggaagagcaagaagtggggcaagaaggtgagccgctatgagggcaaggtgcggctgaagaaggtgcctgccaagaagctggtgcctgcctggaaggagaaggtgctgtgggccctgctggccgtgctgctggcctcctggaggctgtgggccatcaaggacttccaggagtgcacctggcaggtggtgctgaatgagttcaagagggtgggggagagcggcgtgtctgacagcttctttgagcaggagcctgtggacacagtgagcagcctcttccacatgctggtggacagccccatcgaccccagcgagaagtacctgggcttcccctactacctgaagatcaactacagctgtgaggagaagcccagcgaggacctggtgaggatgggccacctgaccggcctgaagcccctggtgctggtgaccttccagagccctgtgaacttctaccgctggaagattgagcagctgcagatccagatggaggccgcccccttccgcagcaagggcggccctgggggcggcggccgggacaggaacctggccggcatgaacatcaatggcttcctgaagagggaccgggacaacaacatccagttcaccgtgggggaggagctgttcaacctgatgccccagtactttgtgggcgtgagcagccggcccctgtggcacacagtggaccagagccctgtgctgatcctgggcggcatccccaatgagaagtatgtgctgatgacagacaccagcttcaaggacttcagcctggtggaggtgaatggagtgggccagatgctgagcattgacagctgctgggtgggcagcttctactgcccccacagcggcttcaccgccaccatctatgacaccatcgccacagagagcaccctcttcatccggcagaaccagctggtgtactacttcaccggcacctacaccaccctgtatgaaagaaacagaggcagcggggagtgtgctgtggccggccccaccccaggagagggcaccctggtgaaccccagcacagagggctcctggatccgggtgctggccagcgagtgcatcaagaagctgtgccctgtgtacttccacagcaatggcagcgagtacatcatggccctgaccaccgggaagcatgagggctacgtgcacttcggcaccatccgggtgaccacctgcagcatcatctggagcgagtacatcgccggggagtacaccctgctgctgctggtggagagcggctatggaaatgccagcaagcgcttccaggtggtgtcctacaacacagccagtgatgacctggagctgctgtaccacatccctgagttcatccctgaggcccggggcctggagttcctgatgatcctgggcacagagagctacaccagcacagccatggcccccaagggcatcttctgcaacccctacaacaacctgatcttcatctggggcaacttcctgctgcagaggagcggcacctcctggagggctgccaccggcagcaccagctgcagcctgcccagggctggccgctgcaccagcgcctag

SEQ ID NO: 18245 - DNA, 1203 bp, synthetic construct
  source 1..1203: mol_type = other DNA; note = Synthetic coding sequence
atgagcggccgggtgggggacctgagccccaagcaggccgagaccctggccaagttcagagaaaatgtgcaggatgtgctgcctgccctgcccaacccagatgactacttcctgctgcgctggctgcgggccaggaactttgacctgcagaagtctgaggccctgctgaggaagtacatggagttcaggaagaccatggacatcgaccacatcctggactggcagcccccagaggtgatccagaagtacatgcctgggggcctgtgtggctatgacagagatggctgccctgtgtggtatgacatcatcggccccctggaccccaagggcctgctcttctctgtgaccaagcaggacctgctgaagaccaagatgagggactgtgagcgcatcctgcatgaatgtgacctgcagacagagcggctgggcaagaagattgagaccatcgtgatgatctttgactgtgagggcctgggcctgaagcacttctggaagcccctggtggaggtgtaccaggagttcttcggcctgctggaggagaactacccagagaccctgaagttcatgctgattgtgaaggccaccaagctgtttcctgtgggctacaacctgatgaagcccttcctgtctgaggacaccaggaggaagatcatcgtgctgggcaacaactggaaggagggcctgctgaagctgatcagccctgaggagctgcctgcccagtttggaggcaccctgacagatcctgatggcaaccccaagtgcctgaccaagatcaactacggcggggagatccccaagtccatgtatgtgcgggaccaggtgaagacccagtatgagcacagcgtgcagatcaacagaggcagcagccaccaggtggagtatgagatcctcttccctggctgtgtgctgcgctggcagttcagcagtgatggagctgacatcggctttggagtcttcctgaagaccaagatgggagagcggcagagagctggggagatgacagatgtgctgcccagccagcgctacaatgcccacatggtgcctgaagatggcaacctgacctgcagcgaggccggcgtgtatgtgctgcgctttgacaacacctacagctttgtgcacgccaagaaggtgtccttcaccgtggaggtgctgctgcctgatgagggcatgcagaagtatgacaaggagctgacccctgtgtag

SEQ ID NO: 18246 - DNA, 636 bp, synthetic construct
  source 1..636: mol_type = other DNA; note = Synthetic coding sequence
atggccgagcagcacggggcccctgagcaggccgctgctgggaagagccatggagacctgggcggcagctacaaggtgatcctgtatgagctggagaacttccagggcaagagatgtgagctgtctgctgagtgccccagcctgacagacagcctgctggagaaggtgggcagcatccaggtggagagcggcccctggctggcctttgagagccgggccttccggggggagcagtttgtgctggagaagggggactacccccgctgggatgcctggagcaacagccgggacagcgacagcctgctgagcctgcggcccctgaacatcgacagcccccaccacaagctgcacctgtttgagaacccagccttcagcggcaggaagatggagatcgtggatgatgatgtgcccagcctgtgggcccacggcttccaggacagagtggcctctgtgcgggccatcaatggcacctgggtgggctatgagttccctggctaccggggccggcagtatgtgtttgagcggggggagtaccgccactggaatgagtgggatgccagccagccccagctgcagagcgtgcggcgcatccgggaccagaagtggcacaagaggggccgcttccccagcagctag

SEQ ID NO: 18247 - DNA, 387 bp, synthetic construct
  source 1..387: mol_type = other DNA; note = Synthetic coding sequence
atgacagaagcagatgtgaaccccaaggcctaccccctggctgatgcccacctgaccaagaagctgctggacctggtgcagcagagctgcaactacaagcagctgaggaaaggagccaatgaggccaccaagaccctgaacagaggcatcagcgagttcatcgtgatggccgcagatgctgagcccctggagatcatcctgcacctgcccctgctgtgtgaggacaagaatgtgccctacgtgtttgtgcgcagcaagcaggccctgggccgggcctgtggggtgtccaggcctgtgattgcctgcagcgtgaccatcaaggagggcagccagctgaagcagcagatccagagcatccagcagagcattgagcggctgctggtgtag

SEQ ID NO: 18248 - DNA, 2592 bp, synthetic construct
  source 1..2592: mol_type = other DNA; note = Synthetic coding sequence
atggccggccccaggggggccctgctggcctggtgccggcggcagtgtgagggctacagaggagtggagatccgggacctgagcagcagcttcagagatggcctggccttctgtgccatcctgcaccgccacaggccagacctgctggactttgacagcctgagcaaggacaacgtgtttgagaacaaccggctggcctttgaggtggccgagaaggagctgggcatcccagccctgctggaccccaatgacatggtgtccatgtctgtgcctgactgcctgagcatcatgacctacgtgtcccagtactacaaccacttctgcagccctggccaggccggcgtgtccccacccaggaagggcctggccccctgcagccccccatctgtggcccccacccctgtggagccagaagatgtggcccagggcgaggagctgagcagcggcagcctgtctgagcagggcaccggccagacccccagcagcacctgtgccgcctgccagcagcacgtgcacctggtgcagcgctacctggctgatggccgcctgtaccaccgccactgcttccgctgccgccgctgcagcagcaccctgctgcccggggcctatgaaaatggacctgaggagggcacctttgtgtgtgccgagcactgtgcccggctgggccctggcaccaggagcggcaccaggcctggccccttcagccagcccaagcagcagcaccagcagcagctggctgaagatgccaaggatgtgcctgggggcggccccagcagcagcgccccagctggagctgaggctgatggccccaaggccagccctgaggcccggccccagatccccaccaagccccgggtgcctgggaagctgcaggagctggccagccccccagctggccggcccaccccagcccccaggaaggccagcgagagcaccaccccagccccacccaccccccggcccaggagcagcctgcagcaggagaacctggtggagcaggccggcagcagcagcctggtgaatggccgcctgcacgagctgcctgtgcccaagccccggggcacccccaagcccagcgagggcaccccagcccccaggaaggaccccccctggatcaccctggtgcaggccgagcccaagaagaagccagcccccctgccccccagcagcagccctggcccccccagccaggacagccggcaggtggagaatggaggaacagaggaggtggcccagcccagccccacagccagcctggagagcaagccctacaacccctttgaggaggaggaggaggacaaggaggaggaggccccagctgcccccagcctggccaccagccctgccctgggccaccctgagagcacccccaagagcctgcacccctggtacggcatcacccccaccagcagccccaagaccaagaagaggcctgccccccgggcccccagcgccagccccctggccctgcacgccagccggctgagccacagcgagccccccagcgccacccccagccctgccctgtctgtggagagcctgagcagcgagagcgccagccagacagctggagctgagctgctggagcccccagctgtgcccaagagcagcagcgagcctgctgtgcacgcccctggcaccccaggcaaccctgtgtccctgagcaccaacagcagcctggccagcagtggagagctggtggagccccgggtggagcagatgccccaggccagccctggcctggcccccaggacccggggcagcagcggcccccagcctgccaagccctgcagcggggccacccccacccccctgctgctggtgggggacaggagccctgtgcccagccctggcagcagcagcccccagctgcaggtgaagagcagctgcaaggagaaccccttcaacaggaagcccagccctgctgccagccctgccaccaagaaggccaccaagggcagcaagcctgtgcggcccccagcccctggccacggcttccccctcatcaagaggaaggtgcaggccgaccagtacatccctgaggaggacatccatggagagatggacaccattgaaagaaggctggatgccctggagcaccggggcgtgctgctggaggagaagctgcggggcggcctgaatgaaggccgggaggatgacatgctggtggactggttcaagctgatccacgagaagcacctgctggtgagaagagagagcgagctgatctacgtgttcaagcagcagaacctggagcagaggcaggctgatgtggagtatgagctgcgctgcctgctgaacaagccagagaaggactggacagaggaggaccgggcccgggagaaggtgctgatgcaggagctggtgaccctcatcgagcagagaaatgccatcatcaactgcctggatgaggaccggcagcgggaggaggaggaggacaagatgctggaggccatgatcaagaagaaggagttccagcgggaggccgagcctgagggcaagaagaagggcaagttcaagaccatgaagatgctgaagctgctgggcaacaagagagatgccaagagcaagagcccccgggacaagagctag

SEQ ID NO: 18249 - DNA, 708 bp, synthetic construct
  source 1..708: mol_type = other DNA; note = Synthetic coding sequence
atgtggaggggccgggccggggccctgctgcgggtgtggggcttctggcccaccggggtgcccaggagaagacccctgagctgtgatgctgccagccaggccggcagcaactacccccgctgctggaactgtggcggcccctggggccctggaagagaagatcgcttcttctgcccccagtgccgggccctgcaggccccagaccccacccgggactacttcagcctgatggactgcaacagaagcttccgggtggacacagccaagctgcagcaccgctaccagcagctgcagaggctggtgcacccagacttcttcagccagaggagccagacagagaaggacttcagcgagaagcacagcaccctggtgaatgatgcctacaagaccctgctggcccccctgagccggggcctgtacctgctgaagctgcatggaattgagatccctgagaggacagattatgagatggaccggcagttcctgattgagatcatggagatcaatgagaagctggccgaggccgagagcgaggccgccatgaaggagattgagagcatcgtgaaggccaagcagaaggagttcacagacaacgtgtcctctgcctttgagcaggatgactttgaggaggccaaggagatcctgaccaagatgagatacttcagcaacatcgaggagaagatcaagctgaagaagatccccctgtag

SEQ ID NO: 18250 - DNA, 2010 bp, synthetic construct
  source 1..2010: mol_type = other DNA; note = Synthetic coding sequence
atggccacagagaggagccgcagcgccatggacagccctgtgcctgcctccatgtttgcccctgagcccagcagccctggggccgcccgggctgctgctgctgctgcccggctgcatggaggctttgacagcgactgcagtgaagatggagaggccctgaatggagagcctgagctggacctgaccagcaagctggtgctggtgagccccaccagcgagcagtatgacagcctgctgcggcagatgtgggagaggatggatgagggctgtggggagaccatctacgtgattggccagggcagtgatggaacagaatatggcctgtctgaggccgacatggaggccagctatgccaccgtgaagtccatggccgagcagattgaagcagatgtgatcctgctgcgggagcggcaggaggccggcggccgggtgcgggactacctggtgaggaagagggtgggggacaatgacttcctggaggtgcgggtggccgtggtgggcaatgtggatgctgggaagagcaccctgctgggcgtgctgacccacggggagctggacaatggccggggctttgcccggcagaagctgttccgccacaagcatgaaattgaaagtggccgcaccagctctgtgggcaatgacatcctgggctttgacagcgagggcaatgtggtgaacaagccagacagccatggaggcagcctggagtggaccaagatctgtgagaagagcaccaaggtgatcaccttcatcgacctggccggccacgagaagtacctgaagaccaccgtgtttggcatgacaggccacctgcctgacttctgcatgctgatggtgggcagcaatgccggcatcgtgggcatgaccaaggagcacctgggcctggccctggccctgaatgtgcctgtgtttgtggtggtgaccaagattgacatgtgcccagccaacatcctgcaggagaccctgaagctgctgcagaggctgctgaagagccctggctgcaggaagatccctgtgctggtgcagagcaaggatgatgtgattgtgacagccagcaacttcagcagcgagaggatgtgccccatcttccagatcagcaatgtgactggagagaacctggacctgctgaagatgttcctgaacctgctgagccccaggaccagctaccgggaggaggagcctgctgagttccagattgatgacacctacagcgtgcctggggtgggcaccgtggtgtctggcaccaccctgcggggcctcatcaagctgaatgacaccctgctgctgggccctgaccccctgggcaacttcctgagcattgctgtgaagagcatccacaggaagaggatgcctgtgaaggaggtgcggggcggccagacagccagctttgccctgaagaagatcaagaggagcagcatcaggaagggcatggtgatggtgagcccccggctgaacccccaggcctcctgggagtttgaggccgagatcctggtgctgcaccaccccaccaccatcagcccccgctaccaggccatggtgcactgcggcagcatccggcagacagccaccatcctgtccatggacaaggactgcctgaggactggagacaaggccaccgtgcacttccgcttcatcaagaccccagagtacctgcacatcgaccagaggctggtgttccgggagggccgcaccaaggctgtgggcaccatcaccaagctgctgcagaccaccaacaacagccccatgaacagcaagccccagcagatcaagatgcagagcaccaagaagggccccctgaccaagagagatgaaggaggccccagcggcggccctgctgtgggcgcccctcctcctggagatgaggccagctctgtgggcgccggccagcctgctgccagcagcaacctgcagccccagcccaagcccagcagcggcggcagaagaagaggaggccagaggcacaaggtgaagagccagggcgcctgtgtgaccccagccagcggctgctag

SEQ ID NO: 18251 - DNA, 1656 bp, synthetic construct
  source 1..1656: mol_type = other DNA; note = Synthetic coding sequence
atggccgccccagccctgtcctggaggctgcccctgctgatcctgctgctgcccctggccacctcctgggccagcgctgctgtgaatggcaccagccagttcacctgcttctacaacagccgggccaacatcagctgtgtgtggagccaggatggagccctgcaggacaccagctgccaggtgcacgcctggccagacagaagacgctggaaccagacctgtgagctgctgcctgtgtcccaggcctcctgggcctgcaacctgatcctgggcgccccagacagccagaagctgaccaccgtggacatcgtgaccctgcgggtgctgtgccgggagggcgtgcgctggagggtgatggccatccaggacttcaagccctttgagaacctgcggctgatggcccccatcagcctgcaggtggtgcacgtggagacccaccgctgcaacatctcctgggagatcagccaggccagccactactttgagcggcacctggagtttgaggcccggaccctgagccctggccacacctgggaggaggcccccctgctgaccctgaagcagaagcaggagtggatctgcctggagaccctgaccccagacacccagtatgagttccaggtgcgggtgaagcccctgcagggcgagttcaccacctggagcccctggagccagcccctggccttccgcaccaagccagctgccctgggcaaggacaccatcccctggctgggccacctgctggtgggcctgagcggggccttcggcttcatcatcctggtgtacctgctgatcaactgcaggaacacaggcccctggctgaagaaggtgctgaagtgcaacaccccagaccccagcaagttcttcagccagctgagcagcgagcacggcggagatgtgcagaagtggctgagcagccccttccccagcagcagcttcagccctgggggcctggcccctgagatcagccccctggaggtgctggagcgggacaaggtgacccagctgctgctgcagcaggacaaggtgcctgagcccgccagcctgagcagcaaccacagcctgaccagctgcttcaccaaccagggctacttcttcttccacctgcctgatgccctggagattgaggcctgccaggtgtacttcacctatgacccctacagcgaggaggaccctgatgaaggagtggccggggcccccaccggcagcagcccccagcccctgcagcccctgagcggggaggatgatgcctactgcaccttccccagcagagatgacctgctgctcttcagccccagcctgctgggcggccccagcccccccagcacagcccctgggggcagcggggccggggaggagaggatgccacccagcctgcaggagcgggtgccccgggactgggacccccagcccctgggcccccccaccccaggagtgcctgacctggtggacttccagcccccacctgagctggtgctgcgggaggccggggaggaggtgcctgatgctggcccccgggagggcgtgtccttcccctggagccggcccccaggccagggcgagttccgggccctgaatgcccggctgcccctgaacacagatgcctacctgagcctgcaggagctgcagggccaggaccccacccacctggtgtag

SEQ ID NO: 18252 - DNA, 3516 bp, synthetic construct
  source 1..3516: mol_type = other DNA; note = Synthetic coding sequence
atggagaacaacctgaagacctgccccaaggaggatggagactttgtgtctgacaagatcaagttcaagattgaggaggaggatgatgatggcatccccccagacagcctggagaggatggacttcaagtctgagcaggaggacatgaagcagacagacagcggcggggagagagctggcctgggcggcaccggctgcagctgcaagcccccaggcaagtacctgtctgctgagagtgaagatgattatggagccctcttcagccagtacagcagcaccctgtatgatgtggccatggaggccgtgacccagagcctgctgagcagcaggaacatgagcagcaggaagaagagccctgcctggaagcacttcttcatcagcccccgggacagcaccaaggccatctgcatgtactgtgtgaaggagttcagccggggcaagaatgagaaggacctgagcaccagctgcctgatgagacatgtgcggcgggcccaccccaccgtgctgatccaggagaatggatctgtgtctgctgtgtcctccttccccagccccagcctgctgctgcccccccagcctgcagatgctggggacctgagcaccatcctgagccccatcaagctggtgcagaaggtggccagcaagatccccagcccagaccgcatcacagaggagagcgtgtctgtggtgagcagcgaggagatcagcagtgacatgtctgtgtctgagaagtgtggccgggaggaggccctggtgggcagcagcccccacctgcctgccctgcactatgatgagcctgctgagaacctggccgagaagagcctgcccctgcccaagagcaccagcggcagcagaagaagatctgctgtgtggaagcacttctacctgagccccctggacaacagcaaggctgtgtgcatccactgcatgaatgagttcagccggggcaagaatggcaaggacctgggcaccagctgcctgatccgccacatgtggagggcccaccgggccatcgtgctgcaggagaatggaggcaccggcatcccccccctgtacagcaccccacccaccctgctgcccagcctgctgcccccagagggggagctgagctctgtgagcagcagccctgtgaagcctgtgcgggagagccccagcgccagcagcagcccagaccggctgacagaggacctgcagagccacctgaaccctggagatggcctgatggaggatgtggccgccttcagcagcagtgatgacatcggggaggccagcgccagcagccctgagaagcagcaggctgatggcctgagcccccggctgtttgaaagtggggccatcttccagcagaacaagaaggtgatgaagaggctgaagtctgaggtgtggcaccacttcagcctggcccccatggacagcctgaaggccgagtgccgctactgcggctgtgccatcagccggggcaagaagggagatgtgggcaccagctgcctgatgaggcacctgtacagaagacaccctgaggtggtgggcagccagaagggcttcctgggcgccagcctggccaacagcccctatgccaccctggccagcgctgagagcagcagcagcaagctgacagacctgcccaccgtggtgaccaagaacaaccaggtgatgtttcctgtgaacagcaagaagaccagcaagctgtggaaccacttcagcatctgcagcgctgacagcaccaaggtggtgtgcctgcactgcggccgcaccatcagccggggcaagaagcccaccaacctgggcaccagctgcctgctgcggcacctgcagcgcttccacagcaatgtgctgaagacagaggtgtctgaaacagcccggcccagcagcccagacaccagggtgccccggggcacagagctgagcggggccagcagctttgatgacaccaatgagaagttctatgacagccaccctgtggccaagaagatcaccagcctgattgctgagatgattgccctggacctgcagccctacagctttgtggacaacgtgggcttcaaccggctgctggagtacctgaagccccagtacagcctgcctgcccccagctacttcagcaggacagccatccctggcatgtatgacaacgtgaagcagatcatcatgagccacctgaaggaggccgagagcggggtcatccacttcaccagcggcatctggatgagcaaccagacccgggagtacctgaccctgacagcccactgggtgtcctttgagagccctgcccggccccgctgtgatgaccaccactgcagcgccctgctggatgtgtcccaggtggactgtgactacagcggcaacagcatccagaagcagctggagtgctggtgggaggcctgggtgaccagcacaggcctgcaggtgggcatcaccgtgacagacaatgccagcatcggcaagaccctgaatgaaggagagcacagctctgtgcagtgcttcagccacacagtgaacctgattgtgtctgaggccatcaagagccagaggatggtgcagaacctgctgagcctggccaggaagatctgtgagcgggtgcacaggagccccaaggccaaggagaagctggccgagctgcagcgggagtatgccctgccccagcaccacctgatccaggatgtgcccagcaagtggagcaccagcttccacatgctggagcggctgattgagcagaagagggccatcaatgagatgtctgtggagtgcaacttccgggagctgatcagctgtgaccagtgggaggtgatgcagagcgtgtgccgggccctgaagccctttgaggccgccagccgggagatgagcacccagatgagcaccctgagccaggtgatccccatggtgcacatcctgaacaggaaggtggagatgctgtttgaggagaccatgggcatcgacaccatgctgcggagcctgaaggaggccatggtgtcccggctgagcgccaccctgcatgacccccgctacgtgtttgccaccctgctggacccccgctacaaggccagcctcttcacagaggaggaggccgagcagtacaagcaggacctgatccgggagctggagctgatgaacagcaccagtgaagatgtggccgccagccaccgctgtgatgctggcagccccagcaaggacagcgctgctgaggagaacctgtggagcctggtggccaaggtgaagaagaaggacccccgggagaagctgcctgaggccatggtgctggcctacctggaggaggaggtgctggagcacagctgtgaccccctgacctactggaacctgaagaaggcctcctggccaggcctgagcgccctggccgtgcgcttcctgggctgccccccatccatcgtgcccagcgagaagctgttcaacacccccacagaaaatggcagcctgggccagagccggctgatgatggagcactttgagaagctgatcttcctgaaggtgaacctgcccctcatctacttccagtactag

SEQ ID NO: 18253 - DNA, 744 bp, synthetic construct
  source 1..744: mol_type = other DNA; note = Synthetic coding sequence
atgcagcccatcctgctgctgctggccttcctgctgctgcccagggcagatgctggggagatcatcggcggccacgaggccaagccccacagccggccctacatggcctacctgatgatctgggaccagaagagcctgaagagatgtggcggcttcctgatcagagatgactttgtgctgacagctgcccactgctggggcagcagcatcaacgtgaccctgggcgcccacaacatcaaggagcaggagcccacccagcagttcatccctgtgaagaggcccatcccccacccagcctacaaccccaagaacttcagcaatgacatcatgctgctgcagctggagaggaaggccaagaggaccagggctgtgcagcccctgcggctgcccagcaacaaggcccaggtgaagccaggccagacctgcagcgtggccggctggggccagacagcccccctgggcaagcacagccacaccctgcaggaggtgaagatgacagtgcaggaggacagaaaatgtgagagtgacctgcggcactactatgacagcaccatcgagctgtgtgtgggggaccctgagatcaagaagaccagcttcaagggggacagcggcggccccctggtgtgcaacaaggtggcccagggcatcgtgtcctatggaagaaataatggcatgccaccccgggcctgcaccaaggtgtcctcctttgtgcactggatcaagaagaccatgaagcgctactag

SEQ ID NO: 18254 - DNA, 1062 bp, synthetic construct
  source 1..1062: mol_type = other DNA; note = Synthetic coding sequence
atggaggatggagtgctgaaggagggcttcctggtgaagaggggccacatcgtgcacaactggaaggcccgctggttcatcctgcggcagaacaccctggtgtactacaagctggagggcggccggcgggtgaccccacccaagggccgcatcctgctggatggctgcaccatcacctgcccctgcctggagtatgagaaccggcccctgctgatcaagctgaagacccagaccagcacagagtacttcctggaggcctgcagccgggaggagagagatgcctgggcctttgagatcaccggggccatccatgctggccagcccgggaaggtgcagcagctgcacagcctgaggaacagcttcaagctgcccccccacatcagcctgcaccgcatcgtggacaagatgcatgacagcaacacaggcatccgcagcagccccaacatggagcagggcagcacctacaagaagaccttcctgggcagcagcctggtggactggctgatcagcaacagcttcaccgccagccggctggaggccgtgaccctggcctccatgctgatggaggagaacttcctgcggcctgtgggcgtgcgctccatgggcgccatccgcagcggggacctggccgagcagttcctggatgacagcacagccctgtacacctttgctgagagctacaagaagaagatcagccccaaggaggagatcagcctgagcacagtggagctgtctggaacagtggtgaagcagggctacctggccaagcagggccacaagaggaagaactggaaggtgagaagatttgtgctgaggaaggaccctgccttcctgcactactatgaccccagcaaggaggagaacagacctgtgggcggcttcagcctgcggggcagcctggtgtctgccctggaggacaatggagtgcccactggagtgaagggaaatgtgcagggcaacctcttcaaggtgatcaccaaggatgacacccactactacatccaggccagcagcaaggccgagagagctgagtggattgaggccatcaagaagctgacctag

SEQ ID NO: 18255 - DNA, 2025 bp, synthetic construct
  source 1..2025: mol_type = other DNA; note = Synthetic coding sequence
atggccgaggtgcctgaggactatgacagcggcccagatgaagatggagagctggagcctgagaggcctgagctgcccggcctgcacaagctgtatgaaaatgctgagccagacaccatggccaaggctgacagcaagctgcctgctgagatctaccaggagccccagcctgagacagaggaggaggacttcaaggagggggagccagattctgccaagaatgtgcagctgaagccaggcggcaccagccaggagggcatcgccaaggagagcaagagagatgtgcccagcgagacagagcccggcatccaccaggaggtgaagtctgagaccagccgggagatgggagagttcttcaaggacctggaggcccccatggatgagacccacaaggagagtgacctggagcccccagaggaggccaagcccaacgtgacagaagatgtgttcctggagagcgccatggagacagatcctgaccctgtgcccccaacagagaccatgtctgaggtgtctggggccaccgtgcgggagaggaacctggagctgctggaggaggagacagagcccggggtgcctgaggagagcctgcgggtgcagcacgaggagaccggcctggagcccccagagcagaccaagcaggacttccccagcgagaagctgggggagagcctggaggagacagacctgcagccccccaagatgaccaagccagagaccccagaggagacccagcgggagagcacagagaagaagaggacagagcccccagagcaggcccggctggagttcctggagaaggagcccaggaagagcagcgaggaggccggcctggagcccccagaggagacccagcctgaggtgcctgaggagatgcagaggaaggccacagaggagaagggcacagagctgcctgagaggaccaagccagacttcccagaccacaagcccaggaagagcacagatgaaaatgtgcctgagcccctggaggagatcaagctggagttccctgaggaggagagcaggaagaccaatgaggagaccatcctggagcagagcgagatgatgaagccagagagccctgaggagatcaggaagagcaatgagaagaagaacccccagcccccagaggagactggacctgtgctgccccaggagatcaacccccaggtggaggagaagacccagaccaagcccacagagaagatcctggagctgcctgatgagaccaagccccgggagacccacgtggagttcagcaaggaggacaggcctgagcccatcaagagcaagtacagcgtgggcaatgatgagctggagcaccgggagcccaagaggggcaagctgagcctgagtgacaagttcaggaaggagtactatgccctgggcagcctgcgggagagcgaggagagcatcggcacccactatgagttcctgcagcccctgcagaagctgctgaatgtgtctgaagaatgttcctacagcgaccccagcgagagccagacagagctgtctgaatttgtgcatgagaaggaggtggtggacctgagccaggagctgaaggagcgggtgtctgaagatgatgagacccagcctgagaagggcacagagctgcagtttgagcacctgaactgggaccctgaggaggtggccgagtggatcagccagctgggcttcccccagtacaaggagtgcttcatcaccaacttcatcagcggcaggaagctgatccacgtgaactgcagcaacctgccccagatgggcatcaccaactttgaggacatgaaggccatcagccgccacacccaggagctgctggagattgaggagcccctcttcaagaggagcatcagcctgccctacagagacatcatcggcctgtacctggagcagaagggccacacaggcatcaagagtgacagcctgaccctgtctgaatttgtgaaggctgctggcctgcaggactatgcccctgagatcacagccccagaagaaaatgaggagctgccctgcacagagccctag

SEQ ID NO: 18256 - DNA, 1689 bp, synthetic construct
  source 1..1689: mol_type = other DNA; note = Synthetic coding sequence
atgaggcctgagcccggcggctgctgctgcagaagaacagtgcgggccaacggctgtgtggccaacggggaggtgagaaatggctacgtgcgcagcagcgctgctgctgctgctgctgctgctgctggccagatccaccacgtgacccagaatggaggcctgtacaagaggcccttcaatgaggcctttgaggagacccccatgctggtggccgtgctgacctacgtgggctacggcgtgctgaccctgtttggctacctgcgggacttcctgcgctactggagaattgagaagtgccaccacgccacagagcgggaggagcagaaggactttgtgtccctgtaccaggactttgagaacttctacaccaggaacctgtacatgaggatccgggacaactggaaccggcccatctgcagcgtgcctggggcccgggtggacatcatggagcggcagagccatgactacaactggagcttcaagtacacaggcaacatcatcaagggcgtcatcaacatgggcagctacaactacctgggctttgccaggaacacaggcagctgccaggaggccgccgccaaggtgctggaggagtatggagctggggtgtgcagcacccggcaggagatcggcaacctggacaagcatgaggagctggaggagctggtggcccgcttcctgggcgtggaggccgccatggcctacggcatgggctttgccaccaacagcatgaacatcccagccctggtgggcaagggctgcctgatcctgagtgatgagctgaaccacgccagcctggtgctgggcgcccggctgagcggggccaccatccgcatcttcaagcacaacaacatgcagagcctggagaagctgctgaaggatgccatcgtgtatggccagcccaggacccggcggccctggaagaagatcctgatcctggtggagggcatctacagcatggagggcagcatcgtgcggctgcctgaggtgattgccctgaagaagaagtacaaggcctacctgtacctggatgaggcccacagcattggagccctgggccccaccggccggggcgtggtggagtacttcggcctggaccctgaagatgtggatgtgatgatgggcaccttcaccaagagctttggagccagcggcggctacatcggcggcaagaaggagctgattgactacctgcggacccacagccacagcgctgtgtatgccaccagcctgagcccccctgtggtggagcagatcatcacctccatgaagtgcatcatgggccaggacggcaccagcctgggcaaggaatgtgtgcagcagctggccgagaacacccgctacttcagaagaaggctgaaggagatgggcttcatcatctatggaaatgaagacagccctgtggtgcccctgatgctgtacatgcctgccaagattggagccttcggccgggagatgctgaagagaaatattggagtggtggtggtgggcttccctgccacccccatcatcgagagccgggcccgcttctgcctgtctgctgcccacaccaaggagatcctggacacagccctgaaggagattgatgaggtgggggacctgctgcagctgaagtacagccgccaccggctggtgcccctgctggaccggccctttgatgagaccacctatgaggagacagaagattag

SEQ ID NO: 18257 - DNA, 2346 bp, synthetic construct
  source 1..2346: mol_type = other DNA; note = Synthetic coding sequence
atgagcagcagcagccccaccggccagatcgccagcgctgctgacatcaagcaggagaatggcatggagagcgccagcgagggccaggaggcccaccgggaggtggccggcggcgctgctgtgggcctgagccccccagccccagcccccttccccctggagcctggagatgctgccacagctgctgcccgggtgtctggagaggagggcgctgtggccgctgctgctgctggagctgctgctgaccaggtgcagctgcacagcgagctgctgggccgccaccaccacgccgctgctgctgctgcccagacccccctggccttctccccagaccacgtggcctgtgtgtgtgaggccctgcagcagggcggcaacctggaccggctggcccgcttcctgtggagcctgccccagagcgacctgctgcggggaaatgaaagcctgctgaaggcccgggccctggtggccttccaccagggcatctacccagagctgtacagcatcctggagagccacagctttgagagcgccaaccaccccctgctgcagcagctgtggtacaaggcccgctacacagaggccgagcgggcccggggccggcccctgggcgctgtggacaagtaccgcctgcggaggaagttccccctgcccaggaccatctgggatggagaggagaccgtgtactgcttcaaggagaagagcagaaatgccctgaaggagctgtacaagcagaaccgctaccccagccctgctgagaagaggcacctggccaagatcaccggcctgagcctgacccaggtgagcaactggttcaagaacagacggcagagggacaggaaccccagcgagacccagagcaagtctgagagtgatggcaaccccagcacagaagatgagagcagcaagggccacgaggacctgagcccccaccccctgagcagcagcagtgatggcatcaccaacctgagcctgagcagccacatggagcctgtgtacatgcagcagattggaaatgccaagatcagcctgagcagcagcggcgtgctgctgaatggcagcctggtgcctgccagcaccagccctgtgttcctgaatggaaacagcttcatccagggccccagcggggtcatcctgaatggcctgaatgtgggcaacacccaggccgtggccctgaacccccccaagatgagcagcaacatcgtgtccaatggcatctccatgacagacatcctgggcagcaccagccaggatgtgaaggagttcaaggtgctgcagagcagcgccaacagcgccaccaccaccagctacagccccagcgtgcctgtgtccttccctggcctcatccccagcacagaggtgaagcgggagggcatccagacagtggccagccaggacggcggctctgtggtgaccttcaccacccctgtgcagatcaaccagtatggaattgtgcagatccccaacagcggggccaacagccagttcctgaatggcagcatcggcttcagccccctgcagctgccccctgtgtctgtggccgccagccagggcaacatctctgtgagcagcagcaccagtgatggcagcaccttcaccagcgagagcaccaccgtgcagcagggcaaggtgttcctgagcagcctggcccccagcgctgtggtgtacacagtgcccaacacaggccagaccatcggctctgtgaagcaggagggcctggagaggagcctggtgttcagccagctgatgcctgtgaaccagaatgcccaggtgaatgccaacctgagcagcgagaacatcagcggcagcggcctgcaccccctggccagcagcctggtgaatgtgagccccacccacaacttcagcctgagccccagcaccctgctgaaccccacagagctgaacagagacattgctgacagccagcccatgtctgcccctgtggccagcaagagcacagtgacctctgtgagcaacaccaactatgccaccctgcagaactgcagcctcatcaccggccaggacctgctgtctgtgcccatgacccaggccgccctgggggagatcgtgcccacagctgaggaccaggtgggccaccccagccctgctgtgcaccaggactttgtgcaggagcaccggctggtgctgcagagcgtggccaacatgaaggagaacttcctgagcaacagcgagagcaaggccaccagcagcctgatgatgctggacagcaagagcaaatatgtgctggatggcatggtggacacagtgtgtgaggacctggagacagacaagaaggagctggccaagctgcagacagtgcagctggatgaggacatgcaggacctgtag

SEQ ID NO: 18258 - DNA, 1392 bp, synthetic construct
  source 1..1392: mol_type = other DNA; note = Synthetic coding sequence
atgggcaaggagaagacccacatcaacatcgtggtgattggacatgtggacagcggcaagagcaccaccaccggccacctgatctacaagtgtggcggcatcgacaagaggaccatcgagaagtttgagaaggaggccgctgagatgggcaagggcagcttcaagtatgcctgggtgctggacaagctgaaggccgagcgggagcggggcatcaccatcgacatcagcctgtggaagtttgagaccaccaagtactacatcaccatcattgatgcccctggccaccgggacttcatcaagaacatgatcaccggcaccagccaggccgactgtgctgtgctgattgtggccgccggcgtgggggagtttgaagctggcatcagcaagaatggccagacccgggagcacgccctgctggcctacaccctgggcgtgaagcagctgattgtgggcgtgaacaagatggacagcacagagcccgcctacagcgagaagagatatgatgagatcgtgaaggaggtgtctgcctacatcaagaagattggctacaacccagccaccgtgccctttgtgcccatcagcggctggcatggagacaacatgctggagcccagccccaacatgccctggttcaagggctggaaggtggagaggaaggagggcaatgccagcggcgtgtccctgctggaggccctggacaccatcctgccccccacccggcccacagacaagcccctgcggctgcccctgcaggatgtgtacaagattggaggcattggaacagtgcctgtgggccgggtggagaccggcatcctgcggcccggcatggtggtgacctttgcccctgtgaacatcaccacagaggtgaagtctgtggagatgcaccacgaggccctgtctgaggccctgcccggggacaacgtgggcttcaacgtgaagaatgtgtctgtgaaggacatcagaagaggaaatgtgtgtggggacagcaagagtgaccccccccaggaggccgcccagttcaccagccaggtgatcatcctgaaccaccctggccagatctctgctggctacagccctgtgattgactgccacacagcccacatcgcctgcaagtttgctgagctgaaggagaagattgacagaagaagtggcaagaagctggaggacaaccccaagagcctgaagtctggagatgctgccatcgtggagatggtgcctgggaagcccatgtgtgtggagagcttcagccagtacccacccctgggccgctttgctgtgcgggacatgaggcagacagtggccgtgggcgtcatcaagaatgtggagaagaagtctggaggagctgggaaggtgaccaagagcgcccagaaggcccagaaggccggcaagtag

SEQ ID NO: 18259 - DNA, 600 bp, synthetic construct
  source 1..600: mol_type = other DNA; note = Synthetic coding sequence
atggctgctgccaacaagggcaagtgcctgcccggggtggtgggcctggcccaggccctgcctgtgggccctggccggcgggccatcgctgctggcaacaagccccgggtgcgcagcatccgctttgctgctggccatgatgctgagggcagccacagccacgtgcactttgatgagaagctgcatgacagcgtggtgatggtgacccaggagagtgacagcagcttcctggtgaaggtgggcttcctgaagatcctgcacagatatgagatcaccttcaccctgccccctgtgcaccggctgagcaaggatgtgcgggaggcccctgtgcccagcctgcacctgaagctgctgtctgtggtgcctgtgcctgagggctacagcgtgaagtgtgagtacagcgcccacaaggagggcgtgctgaaggaggagatcctgctggcctgtgagggcggcaccggcacctgtgtgcgggtgacagtgcaggcccgggtgatggacagacaccacggcacccccatgctgctggatggagtgaagtgtgtgggcgctgagctggagtatgacagcgagcacagcgactggcacggctttgattag

SEQ ID NO: 18260 - DNA, 270 bp, synthetic construct
  source 1..270: mol_type = other DNA; note = Synthetic coding sequence
atgcagctgcaggccagcctgtccttcctgctgatcctgaccctgtgcctggagctgcggtctgagctggcccgggacaccatcaaggacctgctgcccaacgtgtgtgccttccccatggagaagggcccctgccagacctacatgacccgctggttcttcaactttgagaccggggagtgtgagctgtttgcctacggcggctgcggcggcaacagcaacaacttcctgaggaaggagaagtgtgagaagttctgcaagttcacctag

SEQ ID NO: 18261 - DNA, 1251 bp, synthetic construct
  source 1..1251: mol_type = other DNA; note = Synthetic coding sequence
atgtctgaggctgatggcctgcggcagaggcggcccctgcggccccaggtggtgacagatgatgatggccaggcccctgaggccaaggatggcagcagcttcagcggccgggtcttccgggtgaccttcctgatgctggccgtgtccctgactgtgcccctgctgggcgccatgatgctgctggagagccccatcgacccccagcccctgtccttcaaggagccccccctgctgctgggcgtgctgcaccccaacaccaagctgcggcaggccgagcggctgtttgagaaccagctggtgggccctgagagcatcgcccacatcggagatgtgatgttcaccggcacagcagatggccgggtggtgaagctggagaatggagaaattgagaccatcgccaggtttggaagtggcccctgcaagaccagagatgatgagcctgtgtgtggccggcccctgggcatccgggccggccccaacggcaccctgtttgtggctgatgcctacaagggcctgtttgaggtgaacccctggaagcgggaggtgaagctgctgctgagcagcgagacccccatcgagggcaagaacatgagctttgtgaatgacctgactgtgacccaggacggcaggaagatctacttcacagacagcagcagcaagtggcagaggcgggactacctgctgctggtgatggagggcacagatgatggccgcctgctggagtatgacacagtgacccgggaggtgaaggtgctgctggaccagctgcgcttccccaacggggtgcagctgagccctgctgaggactttgtgctggtggccgagaccaccatggcccgcatccggcgggtgtatgtgtctggcctgatgaagggcggcgctgacctgtttgtggagaacatgcctggcttcccagacaacatccggcccagcagcagcggcggctactgggtgggcatgagcaccatccggcccaaccctggcttctccatgctggacttcctgtctgagcggccctggatcaagaggatgatcttcaagctgttcagccaggagaccgtgatgaagtttgtgccccgctacagcctggtgctggagctgagtgacagcggggccttccgccgcagcctgcatgaccctgatggcctggtggccacctacatcagcgaggtgcatgaacatgatggccacctgtacctgggcagcttccgcagccccttcctgtgccgcctgagcctgcaggccgtgtag

SEQ ID NO: 18262 - DNA, 870 bp, synthetic construct
  source 1..870: mol_type = other DNA; note = Synthetic coding sequence
atggtgggcgtgaagcctgtgggcagtgaccctgacttccagcctgagctgagcggggccggcagccggctggccgtggtgaagttcaccatgaggggctgcggcccctgcctgcgcatcgccccagccttcagctccatgagcaacaagtacccccaggccgtgttcctggaggtggatgtgcaccagtgccagggcacagctgccaccaacaacatcagcgccacccccaccttcctgttcttcaggaacaaggtgagaattgaccagtaccagggcgcagatgctgtgggcctggaggagaagatcaagcagcacctggagaatgaccccggcagcaatgaagacacagacatccccaagggctacatggacctgatgcccttcatcaacaaggccggctgtgagtgcctgaatgaaagtgatgagcacggctttgacaactgcctgaggaaggacaccaccttcctggagagtgactgtgatgagcagctgctgatcaccgtggccttcaaccagcctgtgaagctgtacagcatgaagttccagggccctgacaatggccagggccccaagtatgtgaagatcttcatcaacctgcccaggtccatggactttgaggaggccgagaggtctgagcccacccaggccctggagctgacagaagatgacatcaaggaggatggcatcgtgcccctgcgctacgtgaagttccagaatgtgaacagcgtgaccatctttgtgcagagcaaccagggcgaggaggagaccacccgcatctcctacttcaccttcatcggcacccctgtgcaggccaccaacatgaatgacttcaagagggtggtgggcaagaagggggagagccactag

SEQ ID NO: 18263 - DNA, 1164 bp, synthetic construct
  source 1..1164: mol_type = other DNA; note = Synthetic coding sequence
atggtgtttgccttctggaaggtgttcctgatcctgagctgcctggccggccaggtgtctgtggtgcaggtgaccatcccagatggctttgtgaatgtgacagtgggcagcaatgtgaccctcatctgcatctacaccaccaccgtggccagccgggagcagctgagcatccagtggagcttcttccacaagaaggagatggagcccatcagcatctacttcagccagggcggccaggccgtggccatcggccagttcaaggaccgcatcaccggcagcaatgaccctggaaatgccagcatcaccatcagccacatgcagcctgctgacagcggcatctacatctgtgatgtgaacaaccccccagacttcctgggccagaaccagggcatcctgaatgtgtctgtgctggtgaagcccagcaagcccctgtgcagcgtgcagggccggcctgagaccggccacaccatcagcctgagctgcctgagcgccctgggcacccccagccctgtgtactactggcacaagctggagggccgggacatcgtgcctgtgaaggagaacttcaaccccaccaccggcatcctggtgattggcaacctgaccaactttgagcagggctactaccagtgcacagccatcaaccggctgggcaacagcagctgtgaaattgacctgaccagcagccaccctgaggtgggcatcatcgtgggcgccctgattggcagcctggtgggcgccgccatcatcatctctgtggtgtgctttgccaggaacaaggccaaggccaaggccaaggagaggaacagcaagaccatcgccgagctggagcccatgaccaagatcaaccccagaggagagagcgaggccatgccccgggaggatgccacccagctggaggtgaccctgcccagcagcatccacgagaccggccctgacaccatccaggagccagactatgagcccaagcccacccaggagcccgcccctgagcccgcccctggcagcgagcccatggctgtgcctgacctggacatcgagctggagctggagcctgagacccagagcgagctggagcctgagcctgagcctgagcctgagagcgagcccggggtggtggtggagcccctgtctgaagatgagaagggcgtggtgaaggcctag

SEQ ID NO: 18264 - DNA, 1821 bp, synthetic construct
  source 1..1821: mol_type = other DNA; note = Synthetic coding sequence
atgtctgacaccagcgagagcggggccggcctgacccgcttccaggccgaggccagcgagaaggacagcagctccatgatgcagaccctgctgactgtgacccagaatgtggaggtgcctgagacccccaaggccagcaaggccctggaggtgtctgaagatgtgaaggtgtccaaggccagcggcgtgtccaaggccacagaggtgtccaagaccccagaggcccgggaggccccagccacccaggccagcagcaccacccagctgacagacacccaggtgctggccgctgagaacaagagcctggccgctgacaccaagaagcagaatgctgacccccaggccgtgaccatgcctgccacagagaccaagaaggtgagccacgtggccgacaccaaggtgaacaccaaggcccaggagacagaagctgcccccagccaggccccagcagatgagcctgagcctgagagcgctgctgcccagagccaggagaaccaggacacccggcccaaggtgaaggccaagaaggccaggaaggtgaagcacctggatggagaagaagatggcagcagtgaccagagccaggccagcggcaccaccggcggcagaagagtgtccaaggccctgatggcctccatggcccggcgggccagccggggccccatcgccttctgggcccggcgggccagcaggacccggctggccgcctgggcccggcgggccctgctgagcctgcggagccccaaggcccggcggggcaaggccaggagaagagctgccaagctgcagagcagccaggagcctgaggcccccccaccaagagatgtggccctgctgcagggccgggccaatgacctggtgaagtacctgctggccaaggaccagaccaagatccccatcaagagaagtgacatgctgaaggacatcatcaaggagtacacagatgtgtacccagagatcatcgagcgggccggctacagcctggagaaggtgtttggcatccagctgaaggagattgacaagaatgaccacctgtacatcctgctgagcaccctggagcccacagatgctggcatcctgggcaccaccaaggacagccccaagctgggcctgctgatggtgctgctgagcatcatcttcatgaatggaaacagaagcagcgaggccgtcatctgggaggtgctgaggaagctgggcctgcggcccggcatccaccacagcctgtttggagatgtgaagaagctgatcacagatgaatttgtgaagcagaagtacctggactatgcccgggtgcccaacagcaaccccccagaatatgagttcttctggggcctgcggagctactatgagaccagcaagatgaaggtgctgaagtttgcctgcaaggtgcagaagaaggaccccaaggagtgggccgcccagtaccgggaggccatggaggccgacctgaaggctgctgctgaggccgctgctgaggccaaggcccgggcagagatccgggccaggatgggcatcggcctgggctctgaaaatgctgctggcccctgcaactgggatgaagctgacatcggcccctgggccaaggcccgcatccaggccggggctgaggccaaggccaaggcccaggagagcggcagcgccagcactggagccagcaccagcaccaacaacagcgccagcgccagcgccagcaccagcggcggcttctctgctggggccagcctgacagccaccctgaccttcggcctgtttgctggcctgggcggggccggggccagcaccagcggcagcagcggggcctgtggcttctcctacaagtag

SEQ ID NO: 18265 - DNA, 369 bp, synthetic construct
  source 1..369: mol_type = other DNA; note = Synthetic coding sequence
atgaccacagccacccggcaggaggtgctgggcctgtaccgcagcatcttccggctggccaggaagtggcaggccaccagcggccagatggaggacaccatcaaggagaagcagtacatcctgaatgaggcccggaccctcttcaggaagaacaagaacctgacagacacagacctgatcaagcagtgcattgatgagtgcacagccagaattgaaattggcctgcactacaagatcccctacccccggcccatccacctgccccccatgggcctgacccccctgcggggccggggcctgcggagccaggagaagctgaggaagctgagcaagcctgtgtacctgcggagccatgatgaggtgtcctag

SEQ ID NO: 18266 - DNA, 582 bp, synthetic construct
  source 1..582: mol_type = other DNA; note = Synthetic coding sequence
atgctgggcgtgctggagctgctgctgctgggcgccgcctggctggccggccctgcccggggccagaatgaaacagagcccatcgtgctggagggcaagtgcctggtggtgtgtgacagcaaccccaccagtgaccccactggaacagccctgggcatctctgtgcgcagcggcagcgccaaggtggccttcagcgccatccgcagcaccaaccacgagcccagcgagatgagcaacagaaccatgatcatctactttgaccaggtgctggtgaacatcggcaacaactttgattctgagaggagcaccttcatcgcccccaggaagggcatctacagcttcaacttccacgtggtgaaggtgtacaaccggcagaccatccaggtgtccctgatgctgaatggctggcctgtgatcagcgcctttgctggggaccaggatgtgacccgggaggccgccagcaatggagtgctgatccagatggagaagggggaccgggcctacctgaagctggagcggggcaacctgatgggcggctggaagtacagcaccttcagcggcttcctggtgttccccctgtag

SEQ ID NO: 18267 - DNA, 1578 bp, synthetic construct
  source 1..1578: mol_type = other DNA; note = Synthetic coding sequence
atgagccggcagctgctgcctgtgctgctgctgctgctgctgcgggccagctgcccctggggccaggagcagggcgcccggagccccagcgaggagcccccagaggaggagatccccaaggaggatggcatcctggtgctgagccgccacaccctgggcctggccctgcgggagcacccagccctgctggtggagttctacgccccctggtgtggccactgccaggccctggcccctgagtacagcaaggctgctgctgtgctggccgctgagagcatggtggtgaccctggccaaggtggatggccctgcccagcgggagctggccgaggagtttggagtgacagagtaccccaccctgaagttcttcagaaatggaaacagaacccaccctgaggagtacacaggccccagagatgctgagggcattgctgagtggctgcggaggagagtgggccccagcgccatgaggctggaggatgaggccgccgcccaggccctgattggaggccgggacctggtggtgattggcttcttccaggacctgcaggatgaagatgtggccaccttcctggccctggcccaggatgccctggacatgaccttcggcctgacagaccggcccaggctcttccagcagtttggcctgaccaaggacacagtggtgctcttcaagaagtttgatgagggccgggctgacttccctgtggatgaggagctgggcctggacctgggggacctgagccgcttcctggtgacccacagcatgaggctggtgacagagttcaacagccagaccagcgccaagatctttgctgcccgcatcctgaaccacctgctgctgtttgtgaaccagaccctggccgcccaccgggagctgctggccggctttggagaggccgccccccgcttccggggccaggtgctgtttgtggtggtggatgtggccgctgacaatgaacatgtgctgcagtacttcggcctgaaggccgaggccgcccccaccctgcggctggtgaacctggagaccaccaagaagtatgcccctgtggatggcggccctgtgacagctgccagcatcacagccttctgccacgctgtgctgaatggccaggtgaagccctacctgctgagccaggagatccccccagactgggaccagaggcctgtgaagaccctggtgggcaagaactttgagcaggtggcctttgatgagaccaagaatgtgtttgtgaagttctacgccccctggtgcacccactgcaaggagatggccccagcctgggaggccctggccgagaagtaccaggaccacgaggacatcatcatcgccgagctggatgccacagccaatgagctggatgcctttgctgtgcacggcttccccaccctgaagtacttccctgctggccctggcaggaaggtgattgagtacaagagcacccgggacctggagaccttcagcaagttcctggacaatggaggagtgctgcccacagaggagcccccagaggagcctgctgcccccttccctgagcccccagccaacagcaccatgggcagcaaggaggagctgtag

SEQ ID NO: 18268 - DNA, 2262 bp, synthetic construct
  source 1..2262: mol_type = other DNA; note = Synthetic coding sequence
atggctgacaagaggaagctgcagggcgagattgaccgctgcctgaagaaggtgtctgaaggagtggagcagtttgaggacatctggcagaagctgcacaatgctgccaatgccaaccagaaggagaagtatgaggccgacctgaagaaggagatcaagaagctgcagaggctgcgggaccagatcaagacctgggtggccagcaatgagatcaaggacaagaggcagctgattgacaacaggaagctgattgagacccagatggagcgcttcaaggtggtggagcgggagaccaagaccaaggcctacagcaaggagggcctgggcctggcccagaaggtggaccctgcccagaaggagaaggaggaggtgggccagtggctgaccaacaccatcgacaccctgaacatgcaggtggaccagtttgagagcgaggtggagagcctgtctgtgcagaccaggaagaagaagggggacaaggacaagcaggaccgcatcgagggcctgaagaggcacatcgagaagcaccgctaccacgtgaggatgctggagaccatcctgaggatgctggacaatgacagcatcctggtggatgccatcaggaagatcaaggatgatgtggagtactacgtggacagcagccaggaccctgactttgaagaaaatgagttcctgtatgatgacctggacctggaggacatcccccaggccctggtggccaccagcccccccagccacagccacatggaggatgagatcttcaaccagagcagcagcacccccaccagcaccaccagcagcagccccatcccccccagccctgccaactgcaccacagagaacagtgaagatgacaagaagaggggccgcagcacagacagcgaggtgtcccagagccctgccaagaatggcagcaagcctgtgcacagcaaccagcacccccagagccctgctgtgccccccacctaccccagcggccccccacctgctgccagcgccctgagcaccaccccaggcaacaatggagtgcctgccccagctgcccctccttctgccctgggccccaaggccagccctgcccccagccacaacagcggcaccccagccccctatgcccaggccgtggcccccccagcccccagcggccccagcaccacccagccccggccccccagcgtgcagcccagcggcggcggcggcggcggcagcggcggcggcggcagcagcagcagcagcaacagcagcgctgggggcggggccggcaagcagaatggagccaccagctacagctctgtggtggccgacagccctgctgaggtggccctgagcagcagcggcggcaacaatgccagcagccaggccctgggccccccatctggcccccacaaccccccacccagcaccagcaaggagcccagcgctgctgcccccaccggggccggcggcgtggcccctggcagcggcaacaacagcggcggccccagcctgctggtgcccctgcctgtgaacccccccagcagccccacccccagcttcagtgatgccaaggccgccggggccctgctgaatggaccaccccagttcagcacagcccctgagatcaaggcccctgagcccctgagcagcctgaagtccatggccgagcgggccgccatcagcagcggcattgaagatcctgtgcccaccctgcacctgacagagcgggacatcatcctgagcagcaccagcgcccccccagccagcgcccagccccccctgcagctgtctgaggtgaacatccccctgagcctgggcgtgtgccccctgggccctgtgcccctgaccaaggagcagctgtaccagcaggccatggaggaggccgcctggcaccacatgccccaccccagcgacagcgagcgcatccggcagtacctgcccaggaacccctgccccaccccaccctaccaccaccagatgcccccaccccacagcgacacagtggagttctaccagaggctgagcacagagaccctcttcttcatcttctactacctggagggcaccaaggcccagtacctggccgccaaggccctgaagaagcagagctggaggttccacaccaagtacatgatgtggttccagagacatgaggagcccaagaccatcacagatgaatttgagcagggcacctacatctactttgattatgagaagtggggccagaggaagaaggagggcttcacctttgagtaccgctacctggaggaccgggacctgcagtag

SEQ ID NO: 18269 - DNA, 1146 bp, synthetic construct
  source 1..1146: mol_type = other DNA; note = Synthetic coding sequence
atgccctttggaaacacccacaacaagttcaagctgaactacaagccagaggaggagtacccagacctgagcaagcacaacaaccacatggccaaggtgctgaccctggagctgtacaagaagctgcgggacaaggagaccccatctggcttcaccgtggatgatgtgatccagacaggagtggacaaccctggccaccccttcatcatgacagtgggctgtgtggccggagatgaggagagctatgaggtgttcaaggagctgtttgaccccatcatcagtgacagacatggaggctacaagcccacagacaagcacaagacagacctgaaccacgagaacctgaagggaggagatgacctggaccccaactacgtgctgagcagccgggtgaggacaggccgcagcatcaagggctacaccctgcccccccactgcagcagaggagagaggagagctgtggagaagctgtctgtggaggccctgaacagcctgaccggggagttcaagggcaagtactaccccctgaagtccatgacagagaaggagcagcagcagctgattgatgaccacttcctgtttgacaagcctgtgagccccctgctgctggccagcggcatggcccgggactggccagatgcccggggcatctggcacaatgacaacaagagcttcctggtgtgggtgaatgaggaggaccacctgcgggtcatctccatggagaagggcggcaacatgaaggaggtgttccgccgcttctgtgtgggcctgcagaagattgaggagatcttcaagaaggccggccaccccttcatgtggaaccagcacctgggctacgtgctgacctgccccagcaacctgggcaccggcctgcggggcggcgtgcacgtgaagctggcccacctgagcaagcaccccaagtttgaggagatcctgacccggctgcggctgcagaagaggggcaccggcggcgtggacacagctgctgtgggctctgtgtttgatgtgtccaatgctgaccggctgggcagcagcgaggtggagcaggtgcagctggtggtggatggagtgaagctgatggtggagatggagaagaagctggagaagggccagagcattgatgacatgatcccagcccagaagtag

SEQ ID NO: 18270 - DNA, 300 bp, synthetic construct
  source 1..300: mol_type = other DNA; note = Synthetic coding sequence
atggcccagggccagaggaagttccaggcccacaagccagccaagagcaagacagctgctgctgccagcgagaagaacagaggccccaggaaaggaggccgggtcatcgcccccaagaaggcccgggtggtgcagcagcagaagctgaagaagaacctggaggtgggcatcaggaagaagattgaacatgatgtggtgatgaaggccagcagcagcctgcccaagaagctggccctgctgaaggccccagccaagaagaagggagctgctgctgccaccagcagcaagacccccagctag

SEQ ID NO: 18271 - DNA, 1491 bp, synthetic construct
  source 1..1491: mol_type = other DNA; note = Synthetic coding sequence
atggatgatgtgcctgcccccaccccagccccagcccctcctgctgctgctgccccccgggtgcccttccactgcagtgaatgtgggaagagcttccgctacagaagtgacctgcggcggcactttgcccggcacacagccctgaagccccacgcctgcccccgctgtgggaagggcttcaagcacagcttcaacctggccaaccacctgcggagccacactggagagcggccctaccgctgcagcgcctgccccaagggcttccgggacagcacaggcctgctgcaccaccaggtggtgcacactggagagaagccctactgctgcctggtgtgtgagctgcgcttcagcagccgcagcagcctgggccgccacctgaagaggcagcaccggggcgtgctgcccagccccctgcagcccggccctggcctgcctgccctgagcgccccctgcagcgtgtgctgcaatgtgggcccctgcagcgtgtgtggcggcagcggggccggcggcggggagggccctgagggcgctggggccggcctgggctcctggggcctggccgaggccgctgctgctgctgctgccagcctgcccccatttgcctgtggggcctgtgccaggagatttgaccacggccgggagctggccgcccactgggccgcccacacagatgtgaagcccttcaagtgcccccgctgtgagcgggacttcaatgccccagccctgctggagcggcacaagctgacccatgacctgcagggccctggggcccccccagcccaggcctgggccgccggccctggagctggccctgagacagctggggagggcacagctgctgaggccggagatgcccccctggccagtgaccggcggctgctgctgggccctgctgggggcggcgtgcccaagctgggcggcctgctgcctgagggcggcggggaggccccagccccagctgctgctgctgagcccagcgaggacaccctgtaccagtgtgactgtggcaccttctttgccagcgctgctgccctggccagccacctggaggcccacagcggccctgccacctacggctgcggccactgtggggccctgtatgctgccctggccgccctggaggagcacagaagagtgtcccatggagagggcggcggggaggaggccgccacagctgcccgggagcgggagcccgccagcggggagcccccatctggcagcggccggggcaagaagatcttcggctgcagtgaatgtgagaagctgttccgcagcccccgggacctggagcggcacgtgctggtgcacactggagagaagcccttcccctgcctggagtgtgggaagttcttcagacatgagtgctacctgaagaggcaccggctgctgcacggcacagagcggcccttcccctgccacatctgtgggaagggcttcatcaccctgagcaacctgagccgccacctgaagctgcaccggggcatggactag

SEQ ID NO: 18272 - DNA, 663 bp, synthetic construct
  source 1..663: mol_type = other DNA; note = Synthetic coding sequence
atgaagagcgtcatctaccacgccctgagccagaaggaggccaatgacagtgatgtgcagcccagcggggcccagagagctgaggcctttgtgcgggccttcctgaagaggagcacccccaggatgagcccccaggcccgggaggaccagctgcagaggaaggctgtggtgctggagtacttcaccaggcacaagaggaaggagaagaagaagaaggccaagggcctgagcgcccggcagaggcgggagctgcggctgtttgacatcaagccagagcagcagcgctacagcctcttcctgcccctgcacgagctgtggaagcagtacatccgggacctgtgcagcggcctgaagccagacacccagccccagatgatccaggccaagctgctgaaggctgacctgcacggggccatcatctctgtgaccaagagcaagtgccccagctatgtgggcatcaccggcatcctgctgcaggagaccaagcacatcttcaagatcatcaccaaggaggaccggctgaaggtgatccccaagctgaactgtgtgttcaccgtggagacagatggcttcatctcctacatctacggcagcaagttccagctgcggagcagcgagaggtctgccaagaagttcaaggccaagggcaccatcgacctgtag

SEQ ID NO: 18273 - DNA, 768 bp, synthetic construct
  source 1..768: mol_type = other DNA; note = Synthetic coding sequence
atggcccgggccaaggccctgctgggcggccctggagaggagctggaggccgacacagagtacctggacccctttgatgcccagccccacccagcccccccagatgatggctacatggagccctatgatgcccagtgggtgatgtctgagctgcccggccggggcgtgcagctgtatgacaccccctatgaggagcaggaccctgagacagcagatggcccccccagcggccagaagccccggcagagcaggatgccccaggaggatgagaggcctgcagatgaatatgaccagccctgggagtggaagaaggaccacatcagccgggcctttgctgtgcagtttgacagccctgagtgggagaggaccccaggcagcgccaaggagctgcggcggcccccacccaggagcccccagcctgctgagcgggtggaccctgccctgcccctggagaagcagccctggttccacggccccctgaacagagcagatgctgagagcctgctgagcctgtgcaaggagggcagctacctggtgcggctgtctgagaccaacccccaggactgcagcctgagcctgcggagcagccagggcttcctgcacctgaagtttgcccggacccgggagaaccaggtggtgctgggccagcacagcggccccttccccagcgtgcctgagctggtgctgcactacagcagccggcccctgcctgtgcagggcgctgagcacctggccctgctgtaccctgtggtgacccagaccccctag

SEQ ID NO: 18274 - DNA, 858 bp, synthetic construct
  source 1..858: mol_type = other DNA; note = Synthetic coding sequence
atgtctgatgacttcctgtggtttgagggcatcgccttccccaccatgggcttccgctctgagaccctgaggaaggtgagagatgaatttgtgatcagagatgaagatgtgatcatcctgacctaccccaagagcggcaccaactggctggccgagatcctgtgcctgatgcacagcaaaggagatgccaagtggatccagagcgtgcccatctgggagaggagcccctgggtggagagcgagatcggctacacagccctgtctgaaacagagagccccaggctcttcagcagccacctgcccatccagctgttccccaagagcttcttcagcagcaaggccaaggtgatctacctgatgaggaaccccagagatgtgctggtgtctggctacttcttctggaagaacatgaagttcatcaagaagcccaagtcctgggaggagtactttgagtggttctgccagggcaccgtgctgtatggctcctggtttgaccacatccacggctggatgcccatgagggaggagaagaacttcctgctgctgtcctatgaggagctgaagcaggacaccggccgcaccatcgagaagatctgccagttcctgggcaagaccctggagcctgaggagctgaacctgatcctgaagaacagcagcttccagagcatgaaggagaacaagatgagcaactacagcctgctgtctgtggactatgtggtggacaaggcccagctgctgaggaagggcgtgtctggggactggaagaaccacttcaccgtggcccaggccgaggactttgacaagctgttccaggagaagatggctgacctgccccgggagctgttcccctgggagtag

SEQ ID NO: 18275 - DNA, 1647 bp, synthetic construct
  source 1..1647: mol_type = other DNA; note = Synthetic coding sequence
atgaagaccccagctgacaccggctttgccttcccagactgggcctacaagccagagagcagccctggcagccggcagatccagctgtggcacttcatcctggagctgctgaggaaggaggagtaccagggcgtcatcgcctggcagggcgactatggagaatttgtgatcaaggaccctgatgaggtggcccggctgtggggcgtgaggaagtgcaagccccagatgaactatgacaagctgagccgggccctgcgctactactacaacaagaggatcctgcacaagaccaagggcaagcgcttcacctacaagttcaacttcaacaagctggtgctggtgaactaccccttcattgatgtgggcctggccggcggcgctgtgccccagagcgcccctcctgtgcccagcggcggcagccacttccgcttcccccccagcacccccagcgaggtgctgagccccacagaggaccccaggagccccccagcctgcagcagcagcagcagcagcctcttctctgctgtggtggcccggcggctgggccggggctctgtgtctgactgcagtgatggcaccagcgagctggaggagcccctgggggaggacccccgggcccggcccccaggccccccagacctgggcgccttccggggcccccccctggcccggctgccccatgaccccggggtcttccgggtgtacccccggccccggggcggccctgagcccctgagccccttccctgtgagccccctggccggccctggcagcctgctgcccccccagctgagccctgccctgcccatgacccccacccacctggcctacacccccagccccaccctgagccccatgtaccccagcggcggcggcggccccagcggcagcggcggcggcagccacttctccttcagccctgaggacatgaagcgctacctgcaggcccacacccagagcgtgtacaactaccacctgagcccccgggccttcctgcactacccaggcctggtggtgccccagccccagaggccagacaagtgccccctgccccccatggcccctgagaccccacctgtgcccagcagcgccagcagcagcagcagcagcagcagcagccccttcaagttcaagctgcagcccccacccctgggccggcggcagagagctgctggggagaaggctgtggccggggctgacaagagcggcggcagcgctgggggcctggccgagggcgctggggccctggcccctcctcctcctccaccccagatcaaggtggagcccatcagcgagggggagagcgaggaggtggaggtgacagacatcagtgatgaagatgaagaagatggagaggtgttcaagaccccccgggcccccccagccccacccaagccagagcccggggaggcccctggggccagccagtgcatgcccctgaagctgcgcttcaagaggcgctggagcgaggactgccgcctggagggcggcggcggccctgctgggggctttgaagatgaaggagaggacaagaaggtgcggggggagggccctggagaggccggcggccccctgaccccccggcgggtgtccagtgacctgcagcacgccacagcccagctgagcctggagcaccgggacagctag

SEQ ID NO: 18276 - DNA, 1530 bp, synthetic construct
  source 1..1530: mol_type = other DNA; note = Synthetic coding sequence
atgggcgtgctgaagttcaagcacatcttcttccgcagctttgtgaagagcagcggcgtgtcccagatcgtgttcaccttcctgctgatcccctgctgcctgaccctgaacttccgggcccctcctgtgatccccaacgtgcccttcctgtgggcctggaatgcccccagcgagttctgcctgggcaagtttgatgagcccctggacatgagcctcttctccttcatcggcagcccccgcatcaatgccaccggccagggcgtgaccatcttctacgtggaccggctgggctactacccctacatcgacagcatcaccggggtgacagtgaatggaggcatcccccagaagatcagcctgcaggaccacctggacaaggccaagaaggacatcaccttctacatgcctgtggacaacctgggcatggctgtgattgactgggaggagtggaggcccacctgggccaggaactggaagcccaaggatgtgtacaagaacagaagcattgagctggtgcagcagcagaatgtgcagctgagcctgacagaggccacagagaaggccaagcaggagtttgagaaggccggcaaggacttcctggtggagaccatcaagctgggcaagctgctgcggcccaaccacctgtggggctactacctgttcccagactgctacaaccaccactacaagaagccaggctacaacggcagctgcttcaacgtggagatcaagagaaatgatgacctgtcctggctgtggaatgaaagcacagccctgtaccccagcatctacctgaacacccagcagagccctgtggccgccaccctgtatgtgaggaacagagtgcgggaggccatccgggtgtccaagatcccagatgccaagagccccctgcctgtgtttgcctacacccgcatcgtgttcacagaccaggtgctgaagttcctgagccaggatgagctggtgtacacctttggagagaccgtggccctgggcgccagcggcatcgtcatctggggcaccctgagcatcatgaggtccatgaagagctgcctgctgctggacaactacatggagaccatcctgaacccctacatcatcaacgtgaccctggccgccaagatgtgcagccaggtgctgtgccaggagcagggcgtgtgcatcaggaagaactggaacagcagtgactacctgcacctgaacccagacaactttgccatccagctggagaagggcggcaagttcaccgtgcggggcaagcccaccctggaggacctggagcagttcagcgagaagttctactgcagctgctacagcaccctgagctgcaaggagaaggcagatgtgaaggacacagatgctgtggatgtgtgcatcgcagatggagtgtgcattgatgccttcctgaagccacccatggagacagaggagccccagatcttctacaatgccagccccagcaccctgagcgccaccatgtttattgtgtccatcctcttcctgatcatcagctctgtggccagcctgtag

SEQ ID NO: 18277 - DNA, 1041 bp, synthetic construct
  source 1..1041: mol_type = other DNA; note = Synthetic coding sequence
atggagacccagctgagcaatggccccacctgcaacaacacagccaacggccccaccaccatcaacaacaactgcagcagccctgtggacagcggcaacacagaggacagcaagaccaacctgattgtgaactacctgccccagaacatgacccaggaggagctgaagagcctgtttggcagcatcggggagattgagagctgcaagctggtgcgggacaagatcaccggccagagcctgggctacggctttgtgaactacatcgaccccaaggatgctgagaaggccatcaacaccctgaatggcctgcggctgcagaccaagaccatcaaggtgtcctatgcccggcccagcagcgccagcatcagagatgccaacctgtatgtgtctggcctgcccaagaccatgacccagaaggagctggagcagctgttcagccagtatggccgcatcatcaccagccgcatcctggtggaccaggtgacaggcatcagcagaggagtgggcttcatccgctttgacaagagaattgaagctgaggaggccatcaagggcctgaatggccagaagcccccaggggccacagagcccatcaccgtgaagtttgccaacaaccccagccagaagaccaaccaggccatcctgagccagctgtaccagagccccaacagacgctacccaggccccctggcccagcaggcccagcgcttccgcttcagccccatgaccattgatggcatgaccagcctggccggcatcaacatccctggccaccctggcaccggctggtgcatctttgtgtacaacctggccccagatgctgatgagagcatcctgtggcagatgtttggcccctttggagctgtgaccaacgtgaaggtgatccgggacttcaacaccaacaagtgcaagggcttcggctttgtgaccatgaccaactatgatgaagctgccatggccatcgccagcctgaatggctaccgcctgggggacagagtgctgcaggtgtccttcaagaccaacaagacccacaaggcctag

SEQ ID NO: 18278 - DNA, 1437 bp, synthetic construct
  source 1..1437: mol_type = other DNA; note = Synthetic coding sequence
atggcccacgtgcctgcccggaccagccctggccctggcccccagctgctgctgctgctgctgcccctcttcctgctgctgctgagagatgtggccggcagccaccgggccccagcctggagcgccctgcctgctgctgctgatggcctgcagggcgaccgggacctgcagaggcaccctggagatgctgctgccaccctgggccccagcgcccaggacatggtggccgtgcacatgcaccggctgtatgagaagtacagccggcagggcgcccggcctgggggcggcaacacagtgcgctccttccgggcccggctggaggtggtggaccagaaggctgtgtacttcttcaacctgacctccatgcaggacagcgagatgatcctgacagccaccttccacttctacagcgagcccccacgctggccccgggccctggaggtgctgtgcaagccccgggccaagaatgccagcggccggcccctgcccctgggcccccccacccggcagcacctgctcttccgcagcctgagccagaacacagccacccagggcctgctgcggggggccatggccctggcccccccaccccggggcctgtggcaggccaaggacatcagccccatcgtgaaggccgccaggagagatggagagctgctgctgagcgcccagctggacagcgaggagcgggaccccggggtgccccggcccagcccctatgccccctacatcctggtgtatgccaatgacctggccatcagcgagcccaacagcgtggccgtgaccctgcagagatatgaccccttccctgctggggaccctgagccccgggccgcccccaacaacagcgctgacccccgggtgagaagagctgcccaggccaccggccccctgcaggacaatgagctgcccggcctggatgagcggcccccccgggcccacgcccagcacttccacaagcaccagctgtggcccagccccttccgggccctgaagcccaggcctggcaggaaggacaggaggaagaagggccaggaggtgttcatggccgccagccaggtgctggactttgatgagaagaccatgcagaaggcccggaggaagcagtgggatgagccccgggtgtgcagccgccgctacctgaaggtggactttgctgacatcggctggaatgagtggatcatcagccccaagagctttgatgcctactactgtgccggggcctgtgagttccccatgcccaagatcgtgcggcccagcaaccacgccaccatccagagcatcgtgcgggctgtgggcatcatccctggcatccctgagccctgctgcgtgcctgacaagatgaacagcctgggcgtgctcttcctggatgagaacagaaatgtggtgctgaaggtgtaccccaacatgtctgtggacacctgtgcctgcaggtag

SEQ ID NO: 18279 - DNA, 978 bp, synthetic construct
  source 1..978: mol_type = other DNA; note = Synthetic coding sequence
atggagagcaagatgggagagctgcccctggacatcaacatccaggagccccgctgggaccagagcaccttcctgggccgggcccggcacttcttcaccgtgacagaccccaggaacctgctgctgagcggggcccagctggaggccagcagaaatattgtgcagaactacagagctggggtggtgaccccaggcatcacagaggaccagctgtggagggccaagtatgtgtatgacagcgccttccacccagacaccggggagaaggtggtgctgattggaaggatgtctgcccaggtgcccatgaacatgaccatcaccggctgcatgctgaccttctacaggaagacccccaccgtggtgttctggcagtgggtgaaccagagcttcaatgccatcgtgaactacagcaacagaagtggggacacccccatcaccgtgcggcagctgggcacagcctacgtgtctgccaccactggagctgtggccacagccctgggcctgaagagcctgaccaagcacctgccccccctggtgggccgctttgtgccctttgctgctgtggccgccgccaactgcatcaacatccccctgatgaggcagcgggagctgcaggtgggcatccctgtggctgatgaggccggccagaggctgggctacagcgtgacagctgccaagcagggcatcttccaggtggtgatcagccgcatctgcatggccatcccagccatggccatccccccactcatcatggacaccctggagaagaaggacttcctgaagaggcggccctggctgggcgcccccctgcaggtgggcctggtgggcttctgcctggtgtttgccacccccctgtgctgtgccctcttcccccagaagagcagcatccacatcagcaacctggagcctgagctgcgggcccagatccacgagcagaaccccagcgtggaggtggtgtactacaacaagggcctgtag

SEQ ID NO: 18280 - DNA, 1068 bp, synthetic construct
  source 1..1068: mol_type = other DNA; note = Synthetic coding sequence
atggagccccacctgctgggcctgctgctgggcctgctgctgggcggcaccagggtgctggccggctaccccatctggtggagcctggccctgggccagcagtacaccagcctgggcagccagcccctgctgtgtggcagcatccctggcctggtgcccaagcagctgcgcttctgcaggaactacatcgagatcatgcccagcgtggccgagggcgtgaagctgggcatccaggagtgccagcaccagttccggggccgccgctggaactgcaccaccattgatgacagcctggccatctttggacctgtgctggacaaggccacccgggagagcgcctttgtgcacgccatcgccagcgctggggtggcctttgctgtgaccaggagctgtgccgagggcaccagcaccatctgtggctgtgacagccaccacaagggccccccaggagagggctggaagtggggcggctgcagtgaagatgctgactttggagtgctggtgtcccgggagtttgctgatgccagagaaaatagaccagatgcccggagcgccatgaacaagcacaacaatgaagctggccgcaccaccatcctggaccacatgcacctgaagtgcaagtgccacggcctgagcggcagctgtgaggtgaagacctgctggtgggcccagcctgacttccgggccatcggggacttcctgaaggacaagtatgacagcgccagcgagatggtggtggagaagcaccgggagagccggggctgggtggagaccctgcgggccaagtacagcctcttcaagccacccacagagcgggacctggtgtactatgagaacagccccaacttctgtgagcccaaccctgagaccggcagctttggcacccgggacaggacctgcaatgtgaccagccatggaattgatggctgtgacctgctgtgctgcggccggggccacaacaccaggacagagaagaggaaggagaagtgccactgcatcttccactggtgctgctacgtgtcctgccaggagtgcatccgcatctatgatgtgcacacctgcaagtag

SEQ ID NO: 18281 - DNA, 1437 bp, synthetic construct
  source 1..1437: mol_type = other DNA; note = Synthetic coding sequence
atggccgcccggcccatcaccctgggcatcgacctgggcaccacctctgtgaaggccgccctgctgcgggccgccccagatgaccccagcggctttgctgtgctggccagctgtgcccgggccgcccgggcagaggccgctgtggagagcgctgtggccggcccccagggccgggagcaggatgtgagccgcatcctgcaggccctgcatgaatgtctggccgccctgccccggccccagctgcggtctgtggtgggcattggagtgtctggccagatgcacggcgtggtgttctggaagacaggccagggctgtgagtggacagagggcggcatcacccctgtgtttgagcccagggctgtgagccacctggtgacctggcaggacggccgctgcagcagcgagttcctggccagcctgccccagcccaagagccacctgtctgtggccactggatttggctgtgccaccatcttctggctgctgaagtacagacctgagttcctgaagagctatgatgctgctggcaccatccatgactatgtggtggccatgctgtgtggcctgccccggcccctgatgtctgaccagaatgctgcctcctggggctacttcaacacccagagccagagctggaatgtggagaccctgcggagcagcggcttccctgtgcacctgctgcctgacattgctgagcccggctctgtggccggccgcaccagccacatgtggtttgagatccccaagggcacccaggtgggcgtggccctgggggacctgcaggcctctgtgtacagctgcatggcccagaggacagatgctgtgctgaacatcagcacctctgtgcagctggccgcctccatgcccagcggcttccagcctgcccagaccccagaccccacagcccctgtggcctacttcccctacttcaacagaacctacctgggcgtggccgccagcctgaatggaggaaatgtgctggccacctttgtgcacatgctggtgcagtggatggctgacctgggcctggaggtggaggagagcacagtgtacagcaggatgatccaggccgctgtgcagcagagggacacccacctgaccatcacccccaccgtgctgggggagcggcacctgcctgaccagctggcctctgtgacccgcatcagcagcagtgacctgagcctgggccacgtgacccgggccctgtgccggggcatcgtgcagaacctgcacagcatgctgcccatccagcagctgcaggactggggcgtggagcgggtgatgggcagcggcagcgccctgagcagaaatgatgtgctgaagcaggaggtgcagagggccttccccctgcccatgagctttggccaggatgtggatgctgctgtgggcgccgccctggtgatgctgcggcggcacctgaaccagaaggagagctag

SEQ ID NO: 18282 - DNA, 1578 bp, synthetic construct
  source 1..1578: mol_type = other DNA; note = Synthetic coding sequence
atgagaagaagaagaagaagagatggcttctacccagccccagacttccgggaccgggaggccgaggacatggccggcgtgtttgacatcgacctggaccagccagaagatgctggctctgaagatgagctggaggagggcggccagctgaatgaatccatggaccacggcggcgtgggcccctatgagctgggcatggagcactgtgagaagtttgagatcagcgagacctctgtgaacagaggccctgagaagatccggccagaatgttttgagctgctgcgggtgctgggcaaaggaggctacggcaaggtgttccaggtgaggaaggtgactggagccaacacaggcaagatctttgccatgaaggtgctgaagaaggccatgattgtgagaaatgccaaggacacagcccacaccaaggccgagaggaacatcctggaggaggtgaagcaccccttcatcgtggacctgatctatgccttccagacaggaggcaagctgtacctgatcctggagtacctgagcggcggggagctgttcatgcagctggagcgggagggcatcttcatggaggacacagcctgcttctacctggccgagatctccatggccctgggccacctgcaccagaagggcatcatctacagagacctgaagccagagaacatcatgctgaaccaccagggccacgtgaagctgacagactttggcctgtgcaaggagagcatccatgatggcaccgtgacccacaccttctgtggcaccatcgagtacatggcccctgagatcctgatgaggagcggccacaacagagctgtggactggtggagcctgggcgccctgatgtatgacatgctgaccggggccccacccttcaccggggagaacaggaagaagaccatcgacaagatcctgaagtgcaagctgaacctgcccccctacctgacccaggaggcccgggacctgctgaagaagctgctgaagagaaatgctgccagccggctgggcgccggccctggagatgctggggaggtgcaggcccaccccttcttccgccacatcaactgggaggagctgctggccaggaaggtggagccccccttcaagcccctgctgcagagtgaagaagatgtgtcccagtttgacagcaagttcacccggcagacccctgtggacagcccagatgacagcaccctgtctgagagcgccaaccaggtgttcctgggcttcacctacgtggcccccagcgtgctggagagcgtgaaggagaagttctcctttgagcccaagatccgcagcccccggcgcttcatcggcagccccaggacccctgtgtcccctgtgaagttcagccctggggacttctggggccgcggggccagcgccagcacagccaacccccagacccctgtggagtaccccatggagaccagcggcatcgagcagatggatgtgaccatgtctggagaggccagcgcccccctgcccatccggcagcccaacagcggcccctacaagaagcaggccttccccatgatcagcaagaggcctgagcacctgaggatgaacctgtag

SEQ ID NO: 18283 - DNA, 987 bp, synthetic construct
  source 1..987: mol_type = other DNA; note = Synthetic coding sequence
atggccaggacagtggtgctgatcaccggctgcagcagcggcatcggcctgcacctggccgtgcggctggccagtgaccccagccagagcttcaaggtgtatgccaccctgcgggacctgaagacccagggccgcctgtgggaggccgcccgggccctggcctgccccccaggcagcctggagaccctgcagctggatgtgcgggacagcaagtctgtggccgccgcccgggagcgggtgacagagggccgggtggatgtgctggtgtgcaatgccggcctgggcctgctgggccccctggaggccctgggagaagatgctgtggcctctgtgctggatgtgaatgtggtgggcaccgtgaggatgctgcaggccttcctgcctgacatgaagaggcggggcagcggccgggtgctggtgactggatctgtgggcggcctgatgggcctgcccttcaatgatgtgtactgtgccagcaagtttgccctggagggcctgtgtgagagcctggccgtgctgctgctgccctttggagtgcacctgagcctgattgaatgtggccctgtgcacacagccttcatggagaaggtgctgggcagccctgaggaggtgctggacagaacagacatccacaccttccaccgcttctaccagtacctggcccacagcaagcaggtgttccgggaggccgcccagaaccctgaggaggtggccgaggtgttcctgacagccctgcgggcccccaagcccaccctgcgctacttcaccacagagcgcttcctgcccctgctgaggatgaggctggatgaccccagcggcagcaactacgtgacagccatgcaccgggaggtgtttggagatgtgcctgccaaggccgaggccggggctgaggccggcggcggggccggccctggagcagaagatgaggccggccgcggggctgtgggggaccctgagctgggggaccccccagctgccccccagtag

SEQ ID NO: 18284 - DNA, 1626 bp, synthetic construct
  source 1..1626: mol_type = other DNA; note = Synthetic coding sequence
atgcctggcctgcggcgggaccggctgctgaccctgctgctgctgggcgccctgctgtctgctgacctgtacttccacctgtggccccaggtgcagaggcagctgcggccccgggagcggccccggggctgcccctgcaccggccgggccagcagcctggcccgggacagcgctgctgctgccagtgaccccggcaccatcgtgcacaacttcagcaggacagagcccaggacagagcctgctgggggcagccacagcggcagcagcagcaagctgcaggccctgtttgcccaccccctgtacaacgtgcctgaggagccccccctgctgggcgctgaggacagcctgctggccagccaggaggccctgcgctactacagaaggaaggtggcccgctggaacagaagacacaagatgtaccgggagcagatgaacctgaccagcctggacccccccctgcagctgcggctggaggcctcctgggtgcagttccacctgggcatcaacagacatggcctgtacagccgcagcagccctgtggtgtccaagctgctgcaggacatgaggcacttccccaccatctctgctgactacagccaggatgagaaggccctgctgggcgcctgtgactgcacccagatcgtgaagcccagcggcgtgcacctgaagctggtgctgcgcttcagtgactttgggaaggccatgttcaagcccatgaggcagcagagagatgaggagacccctgtggacttcttctacttcatcgacttccagaggcacaatgctgagattgctgccttccacctggaccgcatcctggacttccggcgggtgcccccaacagtgggcagaattgtgaatgtgaccaaggagatcctggaggtgaccaagaatgagatcctgcagagcgtcttctttgtgtccccagccagcaatgtgtgcttctttgccaagtgcccctacatgtgcaagacagaatatgctgtgtgtggcaacccccacctgctggagggcagcctgagcgccttcctgcccagcctgaacctggccccccggctgtctgtgcccaacccctggatccgcagctacaccctggccggcaaggaggagtgggaggtgaaccccctgtactgtgacacagtgaagcagatctacccctacaacaacagccagaggctgctgaatgtgattgacatggccatctttgacttcctgattggcaacatggacagacaccactatgagatgttcaccaagtttggagatgatggcttcctgatccacctggacaatgcccggggcttcggccgccacagccatgatgagatcagcatcctgagccccctgagccagtgctgcatgatcaagaagaagaccctgctgcacctgcagctgctggcccaggccgactaccgcctgagtgatgtgatgagggagagcctgctggaggaccagctgagccctgtgctgacagagccccacctgctggccctggaccggcggctgcagaccatcctgaggacagtggagggctgcatcgtggcccacggccagcagagcgtcatcgtggatggccctgtggagcagctggccccagacagcggccaggccaacctgaccagctag

SEQ ID NO: 18285 - DNA, 954 bp, synthetic construct
  source 1..954: mol_type = other DNA; note = Synthetic coding sequence
atgaagacagccctgatcctgctgagcatcctgggcatggcctgtgccttctccatgaagaacctgcaccggcgggtgaagattgaagattctgaagaaaatggagtcttcaagtaccggccccgctactacctgtacaagcacgcctacttctacccccacctgaagcgcttccctgtgcagggcagcagtgacagcagtgaagaaaatggagatgacagcagcgaggaggaggaggaggaggaggagaccagcaatgaaggagaaaataatgaggagagcaatgaagatgaggacagcgaggccgagaacaccaccctgagcgccaccaccctgggctacggggaggatgccaccccaggcaccggctacacaggcctggccgccatccagctgcccaagaaggccggggacatcaccaacaaggccaccaaggagaaggagagtgatgaggaggaggaggaggaggaggagggcaatgaaaatgaggagagcgaggccgaggtggatgaaaatgagcagggcatcaatggcaccagcaccaacagcacagaagcagaaaatggaaatggcagcagtggaggagacaatggagaggagggggaggaggagagcgtgactggagccaatgctgaggacaccacagaaacaggccggcagggcaagggcaccagcaagaccaccaccagccccaacggcggctttgagcccaccaccccaccccaggtgtaccgcaccaccagccccccatttgggaagaccaccaccgtggagtatgaaggagaatatgagtacaccggggccaatgaatatgacaatggctatgagatctatgaaagtgaaaatggagagcccaggggggacaactaccgggcctatgaagatgagtacagctacttcaagggccagggctatgatggctatgatggccagaactactaccaccaccagtag

SEQ ID NO: 18286 - DNA, 345 bp, synthetic construct
  source 1..345: mol_type = other DNA; note = Synthetic coding sequence
atgagcctgcccagcagccgggccgcccgggtgcccggccccagcggcagcctgtgtgccctgctggccctgctgctgctgctgaccccacctggccccctggccagcgctggccctgtgtctgctgtgctgacagagctgcgctgcacctgcctgcgggtgaccctgcgggtgaaccccaagaccatcggcaagctgcaggtgtttcctgctggcccccagtgcagcaaggtggaggtggtggccagcctgaagaatggcaagcaggtgtgcctggaccctgaggcccccttcctgaagaaggtgatccagaagatcctggacagcggcaacaagaagaactag

SEQ ID NO: 18287 - DNA, 2100 bp, synthetic construct
  source 1..2100: mol_type = other DNA; note = Synthetic coding sequence
atgcccagcctgtggagggagatcctgctggagagcctgctgggctgtgtgtcctggagcctgtaccatgacctgggccccatgatctactacttccccctgcagaccctggagctgaccggcctggagggcttcagcatcgccttcctgagccccatcttcctgaccatcacccccttctggaagctggtgaacaagaagtggatgctgaccctgctgcgcatcatcaccatcggcagcatcgccagcttccaggccccaaatgccaagctgcggctgatggtgctggccctgggcgtgagcagcagcctgattgtgcaggccgtgacctggtggagcggcagccacctgcagcgctacctgcgcatctggggcttcatcctgggccagatcgtgctggtggtgctgcgcatctggtacaccagcctgaaccccatctggagctaccagatgagcaacaaggtgatcctgaccctgagcgccatcgccaccctggaccgcatcggcacagatggagactgcagcaagccagaggagaagaagacaggagaggtggccaccggcatggccagccggcccaactggctgctggccggggccgccttcggcagcctggtgttcctgacccactgggtgtttggagaggtgtccctggtgagccgctgggccgtgtctggccacccccaccctggccctgaccccaacccctttggaggagctgtgctgctgtgcctggccagcggcctgatgctgcccagctgcctgtggttccggggcaccggcctcatctggtgggtgactggaacagccagcgctgctggcctgctgtacctgcacacctgggccgctgctgtgtctggctgtgtgtttgccatcttcaccgcctccatgtggccccagaccctgggccacctgatcaacagcggcaccaaccctgggaagaccatgaccatcgccatgatcttctacctgctggagatcttcttctgtgcctggtgcacagccttcaagtttgtgcctgggggcgtgtatgcccgggagaggagtgatgtgctgctgggcaccatgatgctgatcatcggcctgaacatgctgtttggccccaagaagaacctggacctgctgctgcagaccaagaacagcagcaaggtgctcttcaggaagtctgagaagtacatgaagctgttcctgtggctgctggtgggcgtgggcctgctgggcctgggcctgcggcacaaggcctatgaaaggaagctgggcaaggtggcccccaccaaggaggtgtctgctgccatctggcccttccgcttcggctatgacaatgaaggctggagcagcctggagaggtctgcccacctgctgaatgaaacaggagctgacttcatcaccatcctggagagtgatgccagcaagccctacatgggcaacaatgacctgaccatgtggctgggggagaagctgggcttctacacagactttggccccagcacccgctaccacacctggggcatcatggccctgagccgctaccccatcgtgaagtctgagcaccacctgctgcccagccctgagggggagatcgccccagccatcaccctgactgtgaacatcagcggcaagctggtggactttgtggtgacccactttggaaatcatgaagatgacctggacaggaagctgcaggccatcgctgtgtccaagctgctgaagagcagcagcaaccaggtgatcttcctgggctacatcaccagcgcccctggcagccgggactacctgcagctgacagaacatggaaatgtgaaggacatcgacagcacagaccatgaccgctggtgtgagtacatcatgtaccggggcctcatccggctgggctacgcccgcatcagccatgctgagctgagtgacagcgagatccagatggccaagttccgcatcccagatgaccccaccaactacagagacaaccagaaggtggtgattgaccaccgggaggtgtctgagaagatccacttcaaccccaggtttggcagctacaaggagggccacaactatgagaacaaccaccacttccacatgaacacccccaagtacttcctgtag

SEQ ID NO: 18288 - DNA, 1449 bp, synthetic construct
  source 1..1449: mol_type = other DNA; note = Synthetic coding sequence
atgctgtttgagggcaaggtgaacccccagacccagagcctgctggctgaatgtggggagtggaccaggaggagcctgcacctgcgggtgctgggccggcagctgatcctgcccacagacaagggcgtgcagcacttccagggcagcaccccagccagcgctgtgcaccggccccccctgagcgcctgtggccacagcagcaacatccgggagctgtgcatcagcggcagccagatcgtgcctgctgccctgagcgccagcgccctgcccggcccagatgacacaggagtggccgacctgacagcccggagcagcctggaggaggaggtgtaccacgtggatggcaagattgaggagtactttgcctttgacagaaaagaagatgatgatgaatgtctggagcagaagccagcccagcccggcaggaagtggaggaagctgggcctgccccctgtgagcccccgggactgtgtgaaggatgctgtggccgctgaggtgtttgaccacgtgtggaccaacatggtggagctgctggaggagctgatcaggaagcactgggagaccaccctgacagagggcaagaagcagcgggagaccctgaaggtggccggcaaccgcttcccccacgtgctggtgccccacgcccatgctgatggagccagcggccccccatctggccacgccgaggcccacggcatcagcctggccagccggctgaaccccccccagatccaccacttcagcagcagcttctacagcgacatgaatggagtgatgaccatccaggccaagcccctgcagaggaggcctgcctactttgctgacaggacccagaatgagaaggaggacaaggccagcggcggcggggccggggccctgagcagcgccccccaccggctgggccgggccagtgacacccacggcctgagccccagcgccaagaagacccctgtgccctggaggctgcccagcctggccagtgacagccagaggctgaagacccccaacatctacagtgatgaggtgctgcggggcaccaagctgcccaccggggtggaccacatggccagccccctggtgcagaccagccgcagccgcttcccccccctggtgacagagacccggggccagaacacagctgtgcccggctgccgcctggtgtcctaccggggccgccacctgcagaacagagtgctgagcgccatgccagatggaacagagaggagccggctgcgggagaggacagccaccctggagcggctgagccggcccagcaccacccacaccttccggcagagcgacacccccaggaagagcagcctgacccagatggagtttgctgcccacacctggacaggccagagcatcctgaccggcagccagtatgtgcccaagagcttccagaggaccaccctgaccttcaagaggcgcttccaggtgaccagctag

SEQ ID NO: 18289 - DNA, 1392 bp, synthetic construct
  source 1..1392: mol_type = other DNA; note = Synthetic coding sequence
atgggcgccggccccagcctgctgctggccgccctgctgctgctgctgtctggagatggagctgtgcgctgtgacaccccagccaactgcacctacctggacctgctgggcacctgggtgttccaggtgggcagcagcggcagccagagagatgtgaactgcagcgtgatgggcccccaggagaagaaggtggtggtgtacctgcagaagctggacacagcctatgatgacctgggcaacagcggccacttcaccatcatctacaaccagggctttgagatcgtgctgaatgactacaagtggtttgccttcttcaagtacaaggaggagggcagcaaggtgaccacctactgcaatgagaccatgacaggctgggtgcatgatgtgctgggcaggaactgggcctgcttcaccgggaagaaggtgggcacagcctctgaaaatgtgtatgtgaacatcgcccacctgaagaacagccaggagaagtacagcaacagactctacaagtatgaccacaactttgtgaaggccatcaatgccatccagaagtcctggacagccaccacctacatggagtatgagaccctgaccctgggggacatgatcagaagaagtggcggccacagcaggaagatcccccggcccaagccagcccccctgacagctgagatccagcagaagatcctgcacctgcccacctcctgggactggagaaatgtgcacggcatcaactttgtgtcccctgtgaggaaccaggccagctgtggcagctgctacagctttgcctccatgggcatgctggaggcccgcatccgcatcctgaccaacaacagccagacccccatcctgagcccccaggaggtggtgtcctgcagccagtatgcccagggctgtgagggcggcttcccctacctgattgctgggaagtatgcccaggactttggcctggtggaggaggcctgcttcccctacacaggaacagacagcccctgcaagatgaaggaggactgcttccgctactacagcagcgagtaccactacgtgggcggcttctacggcggctgcaatgaggccctgatgaagctggagctggtgcaccacggccccatggctgtggcctttgaggtgtatgatgacttcctgcactacaagaagggcatctaccaccacacaggcctgcgggaccccttcaacccctttgagctgaccaaccacgctgtgctgctggtgggctacggcacagacagcgccagcggcatggactactggatcgtgaagaacagctggggcaccggctggggagaaaatggctacttccgcatccggcggggcacagatgaatgtgccatcgagagcattgctgtggccgccacccccatccccaagctgtag

SEQ ID NO: 18290 - DNA, 1941 bp, synthetic construct
  source 1..1941: mol_type = other DNA; note = Synthetic coding sequence
atgagcaaaggacctgctgtgggcatcgacctgggcaccacctacagctgtgtgggcgtcttccagcacggcaaggtggagatcatcgccaatgaccagggcaacagaaccacccccagctatgtggccttcacagacacagagcggctgattggagatgctgccaagaaccaggtggccatgaaccccaccaacacagtgtttgatgccaagaggctcatcggccgccgctttgatgatgctgtggtgcagagcgacatgaagcactggcccttcatggtggtgaatgatgctggccggcccaaggtgcaggtggagtacaagggggagaccaagagcttctacccagaggaggtgtcctccatggtgctgaccaagatgaaggagattgctgaggcctacctgggcaagacagtgaccaatgctgtggtgacagtgcctgcctacttcaatgacagccagaggcaggccaccaaggatgctggcaccatcgccggcctgaatgtgctgcgcatcatcaatgagcccacagctgctgccatcgcctacggcctggacaagaaggtgggcgctgagagaaatgtgctgatctttgacctgggcggcggcacctttgatgtgtccatcctgaccattgaagatggcatctttgaggtgaagagcacagctggggacacccacctgggcggagaagattttgacaacaggatggtgaaccacttcatcgccgagttcaagaggaagcacaagaaggacatcagcgagaacaagagagctgtgcggcggctgaggacagcctgtgagcgggccaagaggaccctgagcagcagcacccaggccagcattgaaattgacagcctgtatgagggcatcgacttctacaccagcatcacccgggccaggtttgaggagctgaatgctgacctcttccggggcaccctggaccctgtggagaaggccctgagagatgccaagctggacaagagccagatccatgacatcgtgctggtgggcggcagcacccgcatccccaagatccagaagctgctgcaggacttcttcaacgggaaggagctgaacaagagcatcaacccagatgaggccgtggcctatggagctgctgtgcaggccgccatcctgagcggggacaagtcagaaaatgtgcaggacctgctgctgctggatgtgacccccctgagcctgggcattgaaacagctgggggcgtgatgacagtgctgatcaagaggaacaccaccatccccaccaagcagacccagaccttcaccacctacagcgacaaccagcccggggtgctgatccaggtgtatgaaggagagcgggccatgaccaaggacaacaacctgctgggcaagtttgagctgaccggcatccccccagccccccggggcgtgccccagatcgaggtgacctttgatattgatgccaacggcatcctgaatgtgtctgctgtggacaagagcacaggcaaggagaacaagatcaccatcaccaatgacaagggccgcctgagcaaagaagatattgaaagaatggtgcaggaggccgagaagtacaaggccgaggatgagaagcagagggacaaggtgagcagcaagaacagcctggagagctatgccttcaacatgaaggccaccgtggaggatgagaagctgcagggcaagatcaatgatgaggacaagcagaagatcctggacaagtgcaatgagatcatcaactggctggacaagaaccagacagctgagaaggaggagtttgagcaccagcagaaggagctggagaaggtgtgcaaccccatcatcaccaagctgtaccagagcgctgggggcatgcctgggggcatgcctgggggcttccctgggggcggggcccctccttctggaggagccagcagcggccccaccatcgaggaggtggactag

SEQ ID NO: 18291 - DNA, 1017 bp, synthetic construct
  source 1..1017: mol_type = other DNA; note = Synthetic coding sequence
atgtgggaggccaaccctgagatgttccacaaggccgaggagctgttcagcaagaccaccaacaatgaggtggatgacatggacaccagtgacacccagtggggctggttctacctggctgaatgtgggaagtggcacatgttccagcctgacaccaacagccagtgcagcgtgtccagtgaagatattgagaagagcttcaagaccaacccctgtggcagcatctccttcaccaccagcaagttctcctacaagattgactttgctgagatgaagcagatgaacctgaccaccgggaagcagaggctcatcaagagggcccccttcagcatcagcgccttctcctacatctgtgaaaatgaggccatccccatgccaccccactgggagaatgtgaacacccaggtgccctaccagctgatccccctgcacaaccagacccatgagtacaatgaggtggccaacctgtttgggaagaccatggacaggaaccgcatcaagaggatccagaggatccagaacctggacctgtgggagttcttctgcaggaagaaggcccagctgaagaagaagaggggcgtgccccagatcaatgagcagatgctgttccacggcaccagcagcgagtttgtggaggccatctgcatccacaactttgactggaggatcaatggcatccatggagctgtgtttgggaagggcacctactttgccagagatgctgcctacagcagccgcttctgcaaggatgacatcaagcacggcaacaccttccagatccatggagtgtccctgcagcagaggcacctgttccgcacctacaagtccatgttcctggcccgggtgctgattggagactacatcaatggagacagcaagtacatgaggcctcccagcaaggatggcagctatgtgaacctgtatgacagctgtgtggatgacacctggaaccccaagatctttgtggtgtttgatgccaaccagatctacccagagtacctgattgacttccactag

SEQ ID NO: 18292 - DNA, 1059 bp, synthetic construct
  source 1..1059: mol_type = other DNA; note = Synthetic coding sequence
atggtgcggcctgtgcgccacaagaagcctgtgaactacagccagtttgaccacagcgacagtgatgatgactttgtgtctgccaccgtgcccctgaacaagaagagcaggacagcccccaaggagctgaagcaggacaagcccaagcccaacctgaacaacctgaggaaggaggagatccctgtgcaggagaagacccccaagaagaggctgcctgagggcaccttcagcatcccagccagcgctgtgccctgcaccaagatggccctggatgacaagctgtaccagagggacctggaggtggccctggccctgtctgtgaaggagctgcccaccgtgaccaccaacgtgcagaacagccaggacaagagcattgagaagcacggcagcagcaagattgagaccatgaacaagagcccccacatcagcaactgcagcgtggccagtgactacctggacctggacaagatcaccgtggaggatgatgtgggcggcgtgcagggcaagaggaaggccgccagcaaggctgctgcccagcagaggaagatcctgctggagggcagtgatggagacagcgccaatgacacagagccagactttgcccctggagaggacagtgaagatgacagcgacttctgtgagagcgaggacaatgatgaggacttctccatgaggaagagcaaggtgaaggagatcaagaagaaggaggtgaaggtgaagagccctgtggagaagaaggagaagaagagcaagagcaaatgtaatgccctggtgacctctgtggacagcgccccagctgctgtgaagtctgagagccagagcctgcccaagaaggtgtccctgagcagtgacaccaccaggaagcccctggagatccgcagccccagcgctgagagcaagaagcccaagtgggtgcccccagctgccagcggcggcagccgcagcagcagcagccccctggtggtggtgtctgtgaagagccccaaccagagcctgcggctgggcctgagccggctggcccgggtgaagcccctgcaccccaatgccaccagcacctag

SEQ ID NO: 18293 - DNA, 1488 bp, synthetic construct
  source 1..1488: mol_type = other DNA; note = Synthetic coding sequence
atgacagtgatgtctggagaaaatgtggatgaggccagcgctgcccctggccacccccaggacggcagctacccccggcaggccgaccatgatgaccacgagtgctgtgagcgggtggtgatcaacatcagcggcctgcgctttgagacccagctgaagaccctggcccagttccccaacaccctgctgggcaaccccaagaagaggatgagatactttgaccccctgagaaatgagtacttctttgacaggaaccggcccagctttgatgccatcctgtactactaccagagcggcggccgcctgcggcggcctgtgaatgtgcccctggacatgttcagcgaggagatcaagttctatgagctgggggaggaggccatggagaagttccgggaggatgagggcttcatcaaggaggaggagcggcccctgcctgagaaggagtaccagaggcaggtgtggctgctgtttgagtacccagagagcagcggccctgcccgggtgattgccatcgtgtctgtgatggtgatcctgatcagcatcgtcatcttctgcctggagaccctgcctgagctgaaggatgacaaggacttcaccggcaccgtgcacagaattgacaacaccaccgtcatctacaacagcaacatcttcacagaccccttcttcatcgtggagaccctgtgcatcatctggttctcctttgagctggtggtgcgcttctttgcctgccccagcaagacagacttcttcaagaacatcatgaacttcattgatattgtggccatcatcccctacttcatcaccctgggcacagaaattgctgagcaggagggcaaccagaagggggagcaggccaccagcctggccatcctgcgggtcatccggctggtgcgggtcttccgcatcttcaagctgagccgccacagcaagggcctgcagatcctgggccagaccctgaaggcctccatgagggagctgggcctgctgatcttcttcctgttcatcggggtcatcctcttcagcagcgctgtgtactttgctgaggccgaggaggccgagagccacttcagcagcatcccagatgccttctggtgggccgtggtgtccatgaccaccgtgggctatggagacatgtaccctgtgaccatcggcggcaagatcgtgggcagcctgtgtgccatcgccggcgtgctgaccatcgccctgcctgtgcctgtgattgtgagcaacttcaactacttctaccaccgggagacagaaggagaggagcaggcccagctgctgcacgtgagcagccccaacctggccagtgacagcgacctgagcagaagaagcagcagcaccatgagcaagtctgagtacatggagattgaggaggacatgaacaacagcatcgcccactaccggcaggtgaacatcagaacagccaactgcaccacagccaaccagaactgtgtgaacaagagcaagctgctgacagatgtgtag

SEQ ID NO: 18294 - DNA, 1632 bp, synthetic construct
  source 1..1632: mol_type = other DNA; note = Synthetic coding sequence
atgaggaagccagctgctggcttcctgcccagcctgctgaaggtgctgctgctgcccctggccccagctgctgcccaggacagcacccaggccagcaccccaggcagccccctgagccccacagaatatgagcgcttctttgccctgctgacccccacctggaaggccgagaccacctgccgcctgcgggccacccacggctgcaggaaccccaccctggtgcagctggaccagtatgagaaccacggcctggtgcctgatggagctgtgtgcagcaacctgccctatgcctcctggtttgagagcttctgccagttcacccactaccgctgcagcaaccacgtgtactatgccaagagggtgctgtgcagccagcctgtgtccatcctgagccccaacaccctgaaggagattgaggccagcgctgaggtgagccccaccaccatgaccagccccatcagcccccacttcaccgtgacagagcggcagaccttccagccctggccagagcggctgagcaacaacgtggaggagctgctgcagagcagcctgagcctgggcggccaggagcaggcccctgagcacaagcaggagcagggcgtggagcaccggcaggagcccacccaggagcacaagcaggaggagggccagaagcaggaggagcaggaggaggagcaggaggaggagggcaagcaggaggagggccagggcaccaaggagggccgggaggccgtgtcccagctgcagacagacagcgagcccaagttccacagcgagagcctgagcagcaaccccagcagctttgccccccgggtgcgggaggtggagagcacccccatgatcatggagaacatccaggagctgatccgcagcgcccaggagattgatgagatgaatgagatctatgatgagaacagctactggaggaaccagaaccctggcagcctgctgcagctgccccacacagaggccctgctggtgctgtgctacagcatcgtggagaacacctgcatcatcacccccacagccaaggcctggaagtacatggaggaggagatcctgggctttgggaagtctgtgtgtgacagcctgggccgccgccacatgagcacctgtgccctgtgtgacttctgcagcctgaagctggagcagtgccacagcgaggccagcctgcagaggcagcagtgtgacaccagccacaagaccccatttgtgagccccctgctggccagccagagcctgagcatcggcaaccaggtgggcagccctgagagcggccgcttctacggcctggacctgtatggaggcctgcacatggacttctggtgtgcccggctggccaccaagggctgtgaagatgtgcgggtgtctggctggctgcagacagagttcctgtccttccaggatggagacttccccaccaagatctgtgacacagactacatccagtaccccaactactgcagcttcaagagccagcagtgcctgatgaggaacagaaacaggaaggtgtccaggatgcgctgcctgcagaatgagacctacagcgccctgagccctgggaagtcagaagatgtggtgctgcgctggagccaggagttcagcaccctgaccctgggccagtttggatag

SEQ ID NO: 18295 - DNA, 666 bp, synthetic construct
  source 1..666: mol_type = other DNA; note = Synthetic coding sequence
atgagcggctgggcagatgagcggggcggggagggagatggccgcatctacgtgggcaacctgcccacagatgtgcgggagaaggacctggaggacctcttctacaagtatggccgcatccgggagattgagctgaagaacagacatggcctggtgccctttgcctttgtgcgctttgaggaccccagagatgctgaagatgccatctacggcagaaatggctatgactatggccagtgccgcctgcgggtggagttccccaggacctacggcggccggggcggctggccccggggcggcagaaatggcccccccaccaggagaagtgacttccgggtgctggtgtctggcctgcccccatctggctcctggcaggacctgaaggaccacatgagggaggccggagatgtgtgctacgcagatgtgcagaaggatggagtgggcatggtggagtacctgaggaaggaggacatggagtatgccctgaggaagctggatgacaccaagttccgcagccatgaaggagagaccagctacatccgggtgtacccagagaggagcaccagctatggctacagccgcagccgcagcggcagccggggccgggacagcccctaccagagccggggcagcccccactacttcagccccttccggccctactag

SEQ ID NO: 18296 - DNA, 2523 bp, synthetic construct
  source 1..2523: mol_type = other DNA; note = Synthetic coding sequence
atgtctgccttccggctgtggccaggcctgctgatcatgctgggcagcctgtgccaccggggcagcccctgtggcctgagcacccacgtggagatcggccaccgggccctggagttcctgcagctgcacaacggccgggtgaactaccgggagctgctgctggagcaccaggatgcctaccaggccggcatcgtgtttcctgactgcttctaccccagcatctgcaagggcggcaagttccatgatgtgtctgagagcacccactggacccccttcctgaatgcctctgtgcactacatccgggagaactaccccctgccctgggagaaggacacagagaagctggtggccttcctgtttggcatcaccagccacatggccgcagatgtgtcctggcacagcctgggcctggagcagggcttcctgcggaccatgggcgccatcgacttccacggcagctacagcgaggcccacagcgctggggactttggaggagatgtgctgagccagtttgagttcaacttcaactacctggcccggcgctggtacgtgcctgtgaaggacctgctgggcatctatgagaagctgtatggcaggaaggtgatcacagaaaatgtgattgtggactgcagccacatccagttcctggagatgtatggagagatgctggccgtgtccaagctgtaccccacctacagcaccaagagccccttcctggtggagcagttccaggagtacttcctgggcggcctggatgacatggccttctggagcaccaacatctaccacctgaccagcttcatgctggagaatggcaccagtgactgcaacctgcctgagaaccccctcttcatcgcctgtggcggccagcagaaccacacccagggcagcaagatgcagaagaatgacttccacaggaacctgaccaccagcctgacagaatctgtggacaggaacatcaactacacagagcggggcgtcttcttctctgtgaacagctggaccccagacagcatgtccttcatctacaaggccctggagaggaacatccgcaccatgtttattggaggcagccagctgagccagaagcacgtgagcagccccctggccagctacttcctgtccttcccctatgcccggctgggctgggccatgaccagcgctgacctgaaccaggacggccatggagacctggtggtgggcgcccctggctacagccggcccggccacatccacatcggccgggtgtacctgatctatggaaatgacctgggcctgccccctgtggacctggacctggacaaggaggcccaccgcatcctggagggcttccagcccagcggccgcttcggcagcgccctggccgtgctggacttcaacgtggatggagtgcctgacctggccgtgggcgcccccagcgtgggcagcgagcagctgacctacaagggagctgtgtatgtgtacttcggcagcaagcagggcggcatgagcagcagccccaacatcaccatcagctgccaggacatctactgcaacctgggctggaccctgctggccgcagatgtgaatggagacagcgagccagacctggtgattggcagcccctttgcccctgggggcggcaagcagaagggcatcgtggccgccttctacagcggccccagcctgagtgacaaggagaagctgaatgtggaggccgccaactggacagtgcggggggaggaggacttctcctggtttggctacagcctgcatggagtgacagtggacaacagaaccctgctgctggtgggcagccccacctggaagaatgccagccggctgggccacctgctgcacatcagagatgagaagaagagcctgggccgggtgtatggctacttccccccaaatggccagagctggttcaccatcagcggggacaaggccatgggcaagctgggcaccagcctgagcagcggccacgtgctgatgaatggcaccctgaagcaggtgctgctggtgggcgcccccacctatgatgatgtgtccaaggtggccttcctgactgtgaccctgcaccagggcggggccaccaggatgtatgccctgaccagtgatgcccagcccctgctgctgagcaccttcagcggggaccggcgcttcagcagatttggaggagtgctgcacctgagtgacctggatgatgatggcctggatgagatcatcatggccgcccccctgagaattgctgatgtgaccagcggcctgattggaggagaagatggccgggtgtatgtgtacaacgggaaggagaccaccctgggggacatgaccgggaagtgcaagtcctggatcaccccctgcccagaggagaaggcccagtatgtgctgatcagccctgaggccagcagccgcttcggcagcagcctcatcaccgtgcgcagcaaggccaagaaccaggtggtgattgctgctggccgcagcagcctgggcgcccggctgagcggggccctgcacgtgtacagcctgggcagtgactag

SEQ ID NO: 18297 - DNA, 972 bp, synthetic construct
  source 1..972: mol_type = other DNA; note = Synthetic coding sequence
atgaagagcgccctcttcacccgcttcttcatcctgctgccctggatcctgattgtcatcatcatgctggatgtggacacccggcggcctgtgccccccctgaccccccggccctacttcagcccctatgctgtgggccggggcggggcccggctgcccctgcggcggggcggccctgcccacggcacccagaagaggaaccagagccggccccagccccagcctgagccccagctgcccaccatctatgccatcacccccacctacagcaggcctgtgcagaaggccgagctgacccggctggccaacaccttccggcaggtggcccagctgcactggatcctggtggaggatgctgctgcccggtctgagctggtgagccgcttcctggcccgggccggcctgcccagcacccacctgcacgtgcccaccccccggcgctacaagaggcctggcctgccccgggccacagagcagagaaatgccggcctggcctggctgcggcagaggcaccagcaccagagggcccagcccggggtgctcttctttgctgatgatgacaacacctacagcctggagctgttccaggagatgaggaccaccaggaaggtgtctgtgtggcctgtgggcctggtgggcggcagaagatatgagcggcccctggtggagaatggcaaggtggtgggctggtacacaggctggagggctgaccggccctttgccatcgacatggccggctttgctgtgtccctgcaggtgatcctgagcaaccccaaggctgtgttcaagaggcggggcagccagcccggcatgcaggagagtgacttcctgaagcagatcaccaccgtggaggagctggagcccaaggccaacaactgcaccaaggtgctggtgtggcacaccaggacagagaaggtgaacctggccaatgagcccaagtaccacctggacacagtgaagattgaggtgtag

SEQ ID NO: 18298 - DNA, 3213 bp, synthetic construct
  source 1..3213: mol_type = other DNA; note = Synthetic coding sequence
atgggcgccgcccggggcagccctgcccggccccggcggctgcccctgctgtctgtgctgctgctgcccctgctgggcggcacccagacagccatcgtgttcatcaagcagcccagcagccaggatgccctgcagggcagaagagccctgctgcgctgtgaggtggaggcccctggccctgtgcacgtgtactggctgctggatggagcccctgtgcaggacacagaaagaagatttgcccagggcagcagcctgagctttgctgctgtggaccggctgcaggacagcggcaccttccagtgtgtggccagagatgatgtgactggagaggaggcccggagcgccaatgccagcttcaacatcaagtggattgaggccggccctgtggtgctgaagcacccagccagcgaggccgagatccagccccagacccaggtgaccctgcgctgccacattgatggccacccccggcccacctaccagtggttcagagatggcacccccctgagtgatggccagagcaaccacacagtgagcagcaaggagaggaacctgaccctgcggcctgctggccctgagcacagcggcctgtacagctgctgtgcccacagcgccttcggccaggcctgcagcagccagaacttcaccctgagcattgctgatgagagctttgcccgggtggtgctggccccccaggatgtggtggtggcccgctatgaggaggccatgttccactgccagttcagcgcccagcccccacccagcctgcagtggctgtttgaagatgagacccccatcaccaacagaagccggcccccccacctgcggcgggccaccgtgtttgccaacggcagcctgctgctgacccaggtgcggcccagaaatgccggcatctaccgctgcatcggccagggccagaggggcccccccatcatcctggaggccaccctgcacctggccgagattgaggacatgcccctgtttgagcccagggtcttcaccgctggcagcgaggagcgggtgacctgcctgccccccaagggcctgcctgagcccagcgtgtggtgggagcacgccggcgtgcggctgcccacccacggccgggtgtaccagaagggccacgagctggtgctggccaacattgctgagagtgatgctggggtgtacacctgccacgccgccaacctggccggccagaggcggcaggatgtgaacatcaccgtggccaccgtgcccagctggctgaagaagccccaggacagccagctggaggagggcaagccaggctacctggactgcctgacccaggccacccccaagcccaccgtggtgtggtacagaaaccagatgctgatcagcgaggacagcagatttgaggtgttcaagaatggcaccctgcgcatcaacagcgtggaggtgtatgatggcacctggtaccgctgcatgagcagcaccccagctggcagcattgaggcccaggcccgggtgcaggtgctggagaagctgaagttcaccccaccaccccagccccagcagtgcatggagtttgacaaggaggccaccgtgccctgcagcgccaccggccgggagaagcccaccatcaagtgggagcgggcagatggcagcagcctgcctgagtgggtgacagacaatgccggcaccctgcactttgcccgggtgaccagagatgatgctggcaactacacctgcatcgccagcaatggcccccagggccagatccgggcccacgtgcagctgactgtggccgtgttcatcaccttcaaggtggagcctgagaggaccaccgtgtaccagggccacacagccctgctgcagtgtgaggcccagggcgaccccaagcccctcatccagtggaagggcaaggaccgcatcctggaccccaccaagctgggccccaggatgcacatcttccagaatggcagcctggtgattcatgatgtggccccagaagattctggccgctacacctgcatcgccggcaacagctgcaacatcaagcacacagaggcccccctgtatgtggtggacaagcctgtgcctgaggagagcgagggccctggcagccccccaccctacaagatgatccagaccatcggcctgtctgtgggcgctgctgtggcctacatcatcgctgtgctgggcctgatgttctactgcaagaagcgctgcaaggccaagaggctgcagaagcagcctgagggggaggagcctgagatggagtgcctgaatggaggccccctgcagaatggccagcccagcgctgagatccaggaggaggtggccctgaccagcctgggcagcggccctgctgccaccaacaagaggcacagcaccagtgacaagatgcacttccccaggagcagcctgcagcccatcaccaccctgggcaagtcagaatttggagaggtgttcctggccaaggcccagggcctggaggagggcgtggccgagaccctggtgctggtgaagagcctgcagagcaaggatgagcagcagcagctggacttccggcgggagctggagatgtttgggaagctgaaccacgccaacgtggtgcggctgctgggcctgtgccgggaggccgagccccactacatggtgctggagtatgtggacctgggggacctgaagcagttcctgcgcatcagcaagagcaaggatgagaagctgaagagccagcccctgagcaccaagcagaaggtggccctgtgcacccaggtggccctgggcatggagcacctgagcaacaacagatttgtgcacaaggacctggccgccaggaactgcctggtgtctgcccagaggcaggtgaaggtgtctgccctgggcctgagcaaggatgtgtacaacagcgagtactaccacttccggcaggcctgggtgcccctgcgctggatgagccctgaggccatcctggagggggacttcagcaccaagagtgatgtgtgggccttcggcgtgctgatgtgggaggtgttcacccacggggagatgcctcatggaggccaggctgatgatgaggtgctggccgacctgcaggccggcaaggcccggctgccccagcctgagggctgccccagcaagctgtaccgcctgatgcagcgctgctgggccctgagccccaaggaccggcccagcttcagcgagatcgccagcgccctgggggacagcacagtggacagcaagccctag

SEQ ID NO: 18299 - DNA, 1521 bp, synthetic construct
  source 1..1521: mol_type = other DNA; note = Synthetic coding sequence
atgcccctgctgggcctgctgccccggcgggcctgggccagcctgctgagccagctgctgcggcccccctgtgccagctgcaccggggctgtgcgctgccagagccaggtggccgaggccgtgctgaccagccagctgaaggcccaccaggagaagcccaacttcatcatcaagacccccaagggcacccgggacctgagcccccagcacatggtggtgcgggagaagatcctggacctggtgatcagctgcttcaagagacatggagccaagggcatggacaccccagcctttgagctgaaggagaccctgacagagaagtacggggaggacagcggcctgatgtatgacctgaaggaccagggcggggagctgctgagcctgcgctatgacctgactgtgccctttgcccgctacctggccatgaacaaggtgaagaagatgaagcgctaccacgtgggcaaggtgtggaggcgggagagccccaccatcgtgcagggccgctaccgggagttctgccagtgtgactttgatattgctggccagtttgaccccatgatcccagatgctgaatgtctgaagatcatgtgtgagatcctgagcggcctgcagctgggggacttcctgatcaaggtgaatgacagaagaattgtggatggcatgtttgctgtgtgtggggtgcctgagagcaagttccgggccatctgcagcagcattgacaagctggacaagatggcctggaaggatgtgagacatgagatggtggtgaagaagggcctggcccctgaggtggccgaccgcatcggggactatgtgcagtgccacggcggcgtgtccctggtggagcagatgttccaggacccccggctgagccagaacaagcaggccctggagggcctgggggacctgaagctgctgtttgagtacctgaccctgtttggaattgctgacaagatcagctttgacctgagcctggcccggggcctggactactacacaggagtcatctatgaagctgtgctgctgcagacccccacccaggccggggaggagcccctgaatgtgggctctgtggccgccggcggccgctatgatggcctggtgggcatgtttgaccccaagggccacaaggtgccctgtgtgggcctgagcattggagtggagcgcatcttctacatcgtggagcagaggatgaagaccaagggggagaaggtgaggaccacagagacccaggtgtttgtggccaccccccagaagaacttcctgcaggagcggctgaagctgattgctgagctgtgggacagcggcatcaaggccgagatgctgtacaagaacaaccccaagctgctgacccagctgcactactgtgagagcacaggcatccccctggtggtgatcattggagagcaggagctgaaggagggcgtcatcaagatccgctctgtggccagccgggaggaggtggccatcaagagagaaaattttgtggccgagatccagaagaggctgtctgagagctag

SEQ ID NO: 18300 - DNA, 912 bp, synthetic construct
  source 1..912: mol_type = other DNA; note = Synthetic coding sequence
atgagggcctggatcttcttcctgctgtgcctggccggccgggccctggccgccccccagcaggaggccctgcctgatgaaacagaggtggtggaggagaccgtggccgaggtgacagaggtgtctgtgggcgccaaccctgtgcaggtggaggtgggggagtttgatgatggagctgaggagacagaggaggaggtggtggccgagaacccctgccagaaccaccactgcaagcacggcaaggtgtgtgagctggatgagaacaacacccccatgtgtgtgtgccaggaccccaccagctgcccagcccccatcggggagtttgagaaggtgtgcagcaatgacaacaagacctttgacagcagctgccacttctttgccaccaagtgcaccctggagggcaccaagaagggccacaagctgcacctggactacatcggcccctgcaagtacatccccccctgcctggacagcgagctgacagagttccccctgaggatgagggactggctgaagaatgtgctggtgaccctgtatgaaagagatgaggacaacaacctgctgacagagaagcagaagctgcgggtgaagaagatccatgaaaatgagaagaggctggaggccggggaccaccctgtggagctgctggcccgggactttgagaagaactacaacatgtacatcttccctgtgcactggcagtttggccagctggaccagcaccccattgatggctacctgagccacacagagctggcccccctgcgggcccccctcatccccatggagcactgcaccacccgcttctttgagacctgtgacctggacaatgacaagtacatcgccctggatgagtgggccggctgcttcggcatcaagcagaaggacatcgacaaggacctggtgatctag

SEQ ID NO: 18301 - DNA, 2634 bp, synthetic construct
  source 1..2634: mol_type = other DNA; note = Synthetic coding sequence
atggcccggccccggcgggcccgggagcccctgctggtggccctgctgcccctggcctggctggcccaggccggcctggcccgggccgccggctctgtgcggctggccggcggcctgaccctgggcggcctcttccctgtgcacgcccggggagctgctggccgggcctgtggccagctgaagaaggagcagggcgtgcaccggctggaggccatgctgtatgccctggacagagtgaatgctgaccctgagctgctgcccggggtgcggctgggcgcccggctgctggacacctgcagccgggacacctacgccctggagcaggccctgagctttgtgcaggccctgatccggggcagaggagatggagatgaggtgggcgtgcgctgccctggaggagtgccccccctgcggcctgcccctcctgagcgggtggtggccgtggtgggcgccagcgccagctctgtgtccatcatggtggccaacgtgctgcggctgtttgccatcccccagatctcctatgccagcacagcccctgagctgagtgacagcaccaggtatgacttcttcagccgggtggtgcccccagacagctaccaggcccaggccatggtggacatcgtgcgggccctgggctggaactacgtgtccaccctggccagcgagggcaactatggagagagcggcgtggaggcctttgtgcagatcagccgggaggccggcggcgtgtgcatcgcccagagcatcaagatcccccgggagcccaagccaggagagttcagcaaggtgatccggcggctgatggagaccccaaatgcccggggcatcatcatctttgccaatgaagatgacatccggcgggtgctggaggccgcccggcaggccaacctgaccggccacttcctgtgggtgggcagtgacagctggggcgccaagaccagccccatcctgagcctggaggatgtggccgtgggcgccatcaccatcctgcccaagagggccagcattgatggctttgaccagtacttcatgaccaggagcctggagaacaacagaagaaacatctggtttgctgagttctgggaggagaacttcaactgcaagctgaccagcagcggcacccagagtgatgacagcaccaggaagtgcaccggggaggagagaattggccgggacagcacctatgagcaggagggcaaggtgcagtttgtgattgatgctgtgtatgccatcgcccacgccctgcacagcatgcaccaggccctgtgccccggccacacaggcctgtgcccagccatggagcccacagatggccgcatgctgctgcagtacatccgggctgtgcgcttcaatggatctgctggcacccctgtgatgtttaatgaaaatggagatgcccctggccgctatgacatcttccagtaccaggccaccaatggaagtgccagcagcggcggctaccaggccgtgggccagtgggccgagaccctgcggctggatgtggaggccctgcagtggagcggggacccccatgaggtgcccagcagcctgtgcagcctgccctgtggccctggagagaggaagaagatggtgaagggcgtgccctgctgctggcactgtgaggcctgtgatggctaccgcttccaggtggatgagttcacctgtgaggcctgccctggggacatgaggcccacccccaaccacacaggctgccggcccacccctgtggtgcggctgtcctggagcagcccctgggccgccccacccctgctgctggccgtgctgggcatcgtggccaccaccaccgtggtggccacctttgtgcgctacaacaacacccccatcgtgcgggccagcggccgggagctgtcctatgtgctgctgaccggcatcttcctgatctatgccatcaccttcctgatggtggccgagcctggagctgctgtgtgtgccgcccggcggctcttcctgggcctgggcaccaccctgagctacagcgccctgctgaccaagaccaaccgcatctaccgcatctttgagcagggcaagaggtctgtgaccccaccacccttcatcagccccaccagccagctggtgatcaccttcagcctgaccagcctgcaggtggtgggcatgattgcctggctgggcgcccggcccccccacagcgtgattgattatgaggagcagaggacagtggaccctgagcaggcccggggcgtgctgaagtgtgacatgtctgacctgagcctcatcggctgcctgggctacagcctgctgctgatggtgacctgcaccgtgtatgccatcaaggcccggggcgtgcctgagaccttcaatgaggccaagcccatcggcttcaccatgtacaccacctgcatcatctggctggcctttgtgcccatcttcttcggcacagcccagagcgctgagaagatctacatccagaccaccaccctgactgtgtccctgagcctgagcgcctctgtgtccctgggcatgctgtatgtgcccaagacctacgtgatcctcttccaccctgagcagaatgtgcagaagaggaagaggagcctgaaggccaccagcacagtggccgccccacccaagggagaagatgctgaggcccacaagtag

SEQ ID NO: 18302 - DNA, 798 bp, synthetic construct
  source 1..798: mol_type = other DNA; note = Synthetic coding sequence
atggctgctgctgtgcccaagaggatgaggggccctgcccaggccaagctgctgcccggcagcgccatccaggccctggtgggcctggcccggcccctggtgctggccctgctgctggtgtctgctgccctgagctctgtggtgtccaggacagacagccccagccccaccgtgctgaacagccacatcagcaccccaaatgtgaatgccctgacccatgagaaccagaccaagcccagcatcagccagatcagcaccaccctgccccccaccaccagcaccaagaagtctggaggagcctctgtggtgccccaccccagccccacccccctgagccaggaggaggccgacaacaatgaagaccccagcattgaggaggaggacctgctgatgctgaacagcagccccagcacagccaaggacaccctggacaatggagactatggagagccagactatgactggaccaccggccccagagatgatgatgaaagtgatgacaccctggaggagaacagaggctacatggagattgagcagagcgtgaagagcttcaagatgcccagcagcaacatcgaggaggaggacagccacttcttcttccacctgatcatctttgccttctgcatcgctgtggtgtacatcacctaccacaacaagaggaagatcttcctgctggtgcagagcaggaagtggagagatggcctgtgcagcaagacagtggagtaccaccggctggaccagaatgtgaatgaggccatgcccagcctgaagatcaccaatgactacatcttctag

SEQ ID NO: 18303 - DNA, 2349 bp, synthetic construct
  source 1..2349: mol_type = other DNA; note = Synthetic coding sequence
atggcccccagcgcctgggccatctgctggctgctgggcggcctgctgctgcacggcggcagcagcggccccagccctggccccagcgtgccccggctgcggctgagctacagagacctgctgagcgccaacagaagtgccatcttcctgggcccccagggcagcctgaacctgcaggccatgtacctggatgagtacagagacaggctcttcctgggcggcctggatgccctgtacagcctgcggctggaccaggcctggccagacccccgggaggtgctgtggccaccccagcccggccagcgggaggagtgtgtgaggaagggccgggaccccctgacagaatgtgccaactttgtgcgggtgctgcagccccacaacagaacccacctgctggcctgtggcaccggggccttccagcccacctgtgccctgatcaccgtgggccacagaggagagcacgtgctgcacctggagcccggctctgtggagagcggccggggccgctgcccccatgagcccagccggccctttgccagcaccttcattgatggagagctgtacacaggcctgacagctgacttcctgggccgggaggccatgatcttccgcagcggcggccccaggcctgccctgcggagtgacagcgaccagagcctgctgcatgaccccaggtttgtgatggccgcccgcatccctgagaacagcgaccaggacaatgacaaggtgtacttcttcttcagcgagaccgtgcccagcccagatggcggcagcaaccacgtgacagtgtcccgggtgggccgggtgtgtgtgaatgatgctgggggccagagggtgctggtgaacaagtggagcaccttcctgaaggcccggctggtgtgcagcgtgcccggccctggaggagctgagacccactttgaccagctggaggatgtgttcctgctgtggcccaaggccggcaagagcctggaggtgtatgccctcttcagcacagtgtctgctgtgttccagggctttgctgtgtgtgtgtaccacatggctgacatctgggaggtgttcaacggcccctttgcccacagagatggcccccagcaccagtggggcccctacggcggcaaggtgcccttccccaggcctggggtgtgccccagcaagatgacagcccagcccggccggcccttcggcagcaccaaggactacccagatgaggtgctgcagtttgcccgggcccaccccctgatgttctggcctgtgcggcccaggcatggccggcctgtgctggtgaagacccacctggcccagcagctgcaccagatcgtggtggacagagtggaggctgaagatggcacctatgatgtgatcttcctgggcacagacagcggctctgtgctgaaggtgattgccctgcaggccggcggcagcgctgagcctgaggaggtggtgctggaggagctgcaggtgttcaaggtgcccacccccatcacagagatggagatctctgtgaagaggcagatgctgtatgtgggcagccggctgggcgtggcccagctgcggctgcaccagtgtgagacctatggaacagcctgtgccgagtgctgcctggcccgggacccctactgtgcctgggatggagccagctgcacccactaccggcccagcctgggcaagaggcgcttccggcggcaggacatccgccacggcaacccagccctgcagtgcctgggccagagccaggaggaggaggccgtgggcctggtggccgccaccatggtgtatggaacagagcacaacagcaccttcctggagtgcctgcccaagagcccccaggccgctgtgcgctggctgctgcagaggcctggagatgagggccctgaccaggtgaagacagatgagcgggtgctgcacacagagcggggcctgctcttccggcggctgagcagatttgatgctggcacctacacctgcaccaccctggagcacggcttcagccagacagtggtgcggctggccctggtggtgattgtggccagccagctggacaacctcttccccccagagcccaagccagaggagcccccagcccggggcggcctggccagcaccccacccaaggcctggtacaaggacatcctgcagctgattggatttgccaacctgccccgggtggatgagtactgtgagcgggtgtggtgccggggcaccacagagtgcagcggctgcttccgcagccgcagccggggcaagcaggcccggggcaagtcctgggccggcctggagctgggcaagaagatgaagagccgggtgcacgccgagcacaacagaacaccccgggaggtggaggccacctag

SEQ ID NO: 18304 - DNA, 1725 bp, synthetic construct
  source 1..1725: mol_type = other DNA; note = Synthetic coding sequence
atggtggaggatggagctgaggagctggaggacctggtgcacttctctgtgtctgagctgcccagccggggctatggagtgatggaggagatccggcggcagggcaagctgtgtgatgtgaccctgaagatcggggaccacaagttcagcgcccaccgcatcgtgctggccgccagcatcccctacttccacgccatgttcaccaatgacatgatggagtgcaagcaggatgaaattgtgatgcagggcatggaccccagcgccctggaggccctgatcaactttgcctacaacggcaacctggccatcgaccagcagaatgtgcagagcctgctgatgggcgccagcttcctgcagctgcagagcatcaaggatgcctgctgcaccttcctgcgggagcggctgcaccccaagaactgcctgggcgtgcggcagtttgctgagaccatgatgtgtgctgtgctgtatgatgctgccaacagcttcatccaccagcactttgtggaggtgtccatgtctgaggagttcctggccctgcccctggaggatgtgctggagctggtgtccagagatgagctgaatgtgaagtctgaggagcaggtgtttgaggccgccctggcctgggtgcgctatgaccgggagcagaggggcccctacctgcctgagctgctgagcaacatccggctgcccctgtgccggccccagttcctgagtgacagagtgcagcaggatgacctggtgcgctgctgccacaagtgccgggacctggtggatgaggccaaggactaccacctgatgcctgagcggcggccccacctgcctgccttccgcacccggccccgctgctgcaccagcattgctggcctcatctatgctgtgggcggcctgaacagcgctggggacagcctgaatgtggtggaggtgtttgaccccatcgccaactgctgggagcgctgccggcccatgaccacagcccggagccgggtgggcgtggccgtggtgaatggcctgctgtatgccatcggcggctatgatggccagctgcggctgagcacagtggaggcctacaaccctgagacagacacctggaccagggtgggctccatgaacagcaagaggtctgccatgggcaccgtggtgctggatggccagatctacgtgtgtggcggctatgatggcaacagcagcctgagctctgtggagacctacagccctgagacagacaagtggacagtggtgacctccatgagcagcaacagatctgctgctggggtgacagtgtttgagggccgcatctacgtgtctgggggccatgatggcctgcagatcttcagctctgtggagcactacaaccaccacacagccacctggcaccctgctgctggcatgctgaacaagcgctgccgccacggggccgccagcctgggcagcaagatgtttgtgtgtggcggctatgatggcagcggcttcctgagcattgctgagatgtacagctctgtggccgaccagtggtgcctgattgtgcccatgcacaccaggaggagccgggtgtccctggtggccagctgtggccgcctgtatgctgtgggcggctatgatggccagagcaacctgagctctgtggagatgtatgaccctgagacagactgctggaccttcatggcccccatggcctgccacgagggcggcgtgggcgtgggctgcatccccctgctgaccatctag

SEQ ID NO: 18305 - DNA, 486 bp, synthetic construct
  source 1..486: mol_type = other DNA; note = Synthetic coding sequence
atggccaaggaggagccccagagcatcagccgggacctgcaggagctgcagaagaagctgagcctgctgattgacagcttccagaacaacagcaaggtggtggccttcatgaagagccctgtgggccagtacctggacagccaccccttcctggccttcaccctgctggtgttcatcgtgatgtctgctgtgcctgtgggcttcttcctgctgattgtggtgctgaccaccctggccgccctgctgggcgtcatcatcctggagggcctggtgatctctgtgggcggcttcagcctgctgtgcatcctgtgtggcctgggctttgtgtccctggccatgagcggcatgatgattgccagctatgtggtggtgagcagcctcatcagctgctggttcagcccccggcccctgacccagcagaacaccagctgtgacttcctgcctgccatgaagtctgctgagtttgagggcctgtaccaggagtag

SEQ ID NO: 18306 - DNA, 4503 bp, synthetic construct
  source 1..4503: mol_type = other DNA; note = Synthetic coding sequence
atgacccgcatcctgacagccttcaaggtggtgaggaccctgaagacaggcttcggcttcaccaacgtgacagcccaccagaagtggaagttcagccggcccggcatccggctgctgtctgtgaaggcccagacagcccacatcgtgctggaggatggcaccaagatgaagggctacagctttggccaccccagctctgtggccggggaggtggtgttcaacacaggcctgggcggctacccagaggccatcacagatcctgcctacaagggccagatcctgaccatggccaaccccatcattggaaatggaggagccccagacaccacagccctggatgagctgggcctgagcaagtacctggagagcaatggcatcaaggtgtctggcctgctggtgctggactacagcaaggactacaaccactggctggccaccaagagcctgggccagtggctgcaggaggagaaggtgcctgccatctacggcgtggacaccaggatgctgaccaagatcatccgggacaagggcaccatgctgggcaagattgaatttgagggccagcctgtggactttgtggaccccaacaagcagaacctgattgctgaggtgtccaccaaggatgtgaaggtgtatggcaagggcaaccccaccaaggtggtggccgtggactgtggcatcaagaacaacgtcatccggctgctggtgaagagaggagctgaggtgcacctggtgccctggaaccacgacttcaccaagatggagtatgatggcatcctgattgctgggggccctggcaacccagccctggccgagcccctcatccagaatgtgaggaagatcctggagagtgacaggaaggagcccctgtttggcatcagcactggaaacctgatcaccggcctggccgccggggccaagacctacaagatgtccatggccaacagaggccagaaccagcctgtgctgaacatcaccaacaagcaggccttcatcacagcccagaaccacggctacgccctggacaacaccctgcctgctggctggaagcccctgtttgtgaatgtgaatgaccagaccaatgaaggcatcatgcatgagagcaagcccttctttgctgtgcagttccaccctgaggtgaccccaggccccatcgacacagagtacctgtttgacagcttcttcagcctcatcaagaagggcaaggccaccaccatcacctctgtgctgcccaagccagccctggtggccagccgggtggaggtgtccaaggtgctgatcctgggcagcggcggcctgagcatcggccaggccggggagtttgactacagcggcagccaggccgtgaaggccatgaaggaggagaatgtgaagacagtgctgatgaaccccaacatcgcctctgtgcagaccaatgaggtgggcctgaagcaggccgacacagtgtacttcctgcccatcaccccccagtttgtgacagaggtgatcaaggccgagcagccagatggcctcatcctgggcatgggcggccagacagccctgaactgtggggtggagctgttcaagaggggcgtgctgaaggagtatggagtgaaggtgctgggcacctctgtggagagcatcatggccacagaagatcggcagctgttcagtgacaagctgaatgagatcaatgagaagatcgcccccagctttgctgtggagagcattgaagatgccctgaaggctgctgacaccatcggctaccctgtgatgatccgcagcgcctatgccctgggcggcctgggcagcggcatctgccccaaccgggagaccctgatggacctgagcaccaaggcctttgccatgaccaaccagatcctggtggagaagtctgtgacaggctggaaggagattgaatatgaggtggtgagagatgctgatgacaactgtgtgacagtgtgcaacatggagaatgtggatgccatgggcgtgcacactggagacagcgtggtggtggccccagcccagaccctgagcaatgctgagttccagatgctgcggaggaccagcatcaacgtggtgcgccacctgggcatcgtgggggagtgcaacatccagtttgccctgcaccccacctccatggagtactgcatcatcgaggtgaatgcccggctgagccgcagcagcgccctggccagcaaggccaccggctaccccctggccttcatcgccgccaagatcgccctgggcatccccctgcctgagatcaagaatgtggtgtctgggaagaccagcgcctgctttgagcccagcctggactacatggtgaccaagatcccccgctgggacctggaccgcttccacggcaccagcagccgcatcggcagctccatgaagtctgtgggggaggtgatggccatcggccgcacctttgaggagagcttccagaaggccctgaggatgtgccaccccagcattgagggcttcaccccccggctgcccatgaacaaggagtggcccagcaacctggacctgaggaaggagctgtctgagcccagcagcacccgcatctatgccatcgccaaggccattgatgacaacatgagcctggatgaaattgagaagctgacctacatcgacaagtggttcctgtacaagatgagggacatcctgaacatggagaagaccctgaagggcctgaacagcgagagcatgacagaggagaccctgaagagggccaaggagatcggcttcagtgacaagcagatcagcaagtgcctgggcctgacagaggcccagacccgggagctgcggctgaagaagaacatccacccctgggtgaagcagattgacaccctggccgctgagtaccccagcgtgaccaactacctgtatgtgacctacaacggccaggagcatgatgtgaactttgatgaccacggcatgatggtgctgggctgcggcccctaccacatcggcagctctgtggagtttgactggtgtgctgtgagcagcatccgcaccctgcggcagctgggcaagaagacagtggtggtgaactgcaaccctgagaccgtgtccacagactttgatgaatgtgacaagctgtactttgaggagctgagcctggagcgcatcctggacatctaccaccaggaggcctgtggcggctgcatcatctctgtgggcggccagatccccaacaacctggccgtgcccctgtacaagaatggagtgaagatcatgggcaccagccccctgcagattgacagagcagaagatagaagcatcttctctgctgtgctggatgagctgaaggtggcccaggccccctggaaggctgtgaacaccctgaatgaggccctggagtttgccaagtctgtggactacccctgcctgctgcggcccagctatgtgctgagcggcagcgccatgaatgtggtgttttctgaagatgagatgaagaagttcctggaggaggccaccagggtgtcccaggagcaccctgtggtgctgaccaagtttgtggagggcgcccgggaggtggagatggatgctgtgggcaaggatggccgggtcatcagccacgccatcagcgagcacgtggaggatgctggggtgcacagcggagatgccaccctgatgctgcccacccagaccatcagccagggcgccatcgagaaggtgaaggatgccaccaggaagatcgccaaggcctttgccatcagcggccccttcaacgtgcagttcctggtgaagggaaatgatgtgctggtgattgagtgcaacctgcgggccagccgctccttcccctttgtgtccaagaccctgggcgtggacttcattgatgtggccaccaaggtgatgattggagaaaatgtggatgagaagcacctgcccaccctggaccaccccatcatcccagctgactatgtggccatcaaggcccccatgttctcctggccccggctgagagatgctgaccccatcctgcgctgtgagatggccagcactggagaggtggcctgcttcggggagggcatccacacagccttcctgaaggccatgctgagcacaggcttcaagatcccccagaagggcatcctgattggcatccagcagagcttccggccccgcttcctgggcgtggccgagcagctgcacaatgaaggcttcaagctgtttgccacagaggccaccagtgactggctgaatgccaacaacgtgcctgccacccctgtggcctggcccagccaggagggccagaaccccagcctgagcagcatcaggaagctgatcagagatggcagcattgacctggtgatcaacctgcccaacaacaacaccaagtttgtgcatgacaactacgtgatcagaagaacagctgtggacagcggcatccccctgctgaccaacttccaggtgaccaagctgtttgctgaggccgtgcagaagagcaggaaggtggacagcaagagcctcttccactaccggcagtacagcgctgggaaggccgcctag

SEQ ID NO: 18307 - DNA, 846 bp, synthetic construct
  source 1..846: mol_type = other DNA; note = Synthetic coding sequence
atggctgtgaatgtgtacagcacctctgtgaccagcgagaacctgagcagacatgacatgctggcctgggtgaatgacagcctgcacctgaactacaccaagattgagcagctgtgcagcggggccgcctactgccagttcatggacatgctgtttcctggctgtgtgcacctgaggaaggtgaagttccaggccaagctggagcacgagtacatccacaacttcaaggtgctgcaggccgccttcaagaagatgggcgtggacaagatcatccctgtggagaagctggtgaagggcaagttccaggacaactttgagttcatccagtggttcaagaagttctttgatgccaactatgatggcaaggactacaaccccctgctggcccggcagggccaggatgtggcccccccacccaaccctggggaccagatcttcaacaagagcaagaagctgattggaacagctgtgccccagaggaccagccccaccggccccaagaacatgcagaccagcggccgcctgagcaatgtggccccaccctgcatcctgaggaagaacccccccagcgccagaaatggaggccacgagacagatgcccagatcctggagctgaaccagcagctggtggacctgaagctgactgtggatggcctggagaaggagcgggacttctacttcagcaagctgcgggacatcgagctgatctgccaggagcacgagagcgagaacagccctgtgatcagcggcatcatcggcatcctgtatgccacagaggagggctttgcccccccagaagatgatgaaattgaggagcaccagcaggaggaccaggatgagtactag

SEQ ID NO: 18308 - DNA, 531 bp, synthetic construct
  source 1..531: mol_type = other DNA; note = Synthetic coding sequence
atggccctgtggagggcctaccagagggccctggccgcccacccctggaaggtgcaggtgctgacagctggcagcctgatgggcctgggggacatcatcagccagcagctggtggagcggcggggcctgcaggagcaccagaggggccgcaccctgaccatggtgtccctgggctgcggctttgtgggccctgtggtgggcggctggtacaaggtgctggaccgcttcatccctggcaccaccaaggtggatgccctgaagaagatgctgctggaccagggcggctttgccccctgcttcctgggctgcttcctgcccctggtgggcgccctgaatggcctgagcgcccaggacaactgggccaagctgcagagggactacccagatgccctgatcaccaactactacctgtggccagctgtgcagctggccaacttctacctggtgcccctgcactaccgcctggccgtggtgcagtgtgtggccgtcatctggaacagctacctgtcctggaaggcccaccggctgtag

SEQ ID NO: 18309 - DNA, 1143 bp, synthetic construct
  source 1..1143: mol_type = other DNA; note = Synthetic coding sequence
atggccagcctgcctgtgctgcagaaggagagcgtcttccagagcggggcccacgcctaccgcatcccagccctgctgtacctgcccggccagcagagcctgctggcctttgctgagcagagggccagcaagaaggatgagcacgccgagctgattgtgctgcggcggggggactatgatgcccccacccaccaggtgcagtggcaggcccaggaggtggtggcccaggcccggctggatggccaccgctccatgaacccctgccccctgtatgatgcccagacaggcaccctcttcctgttcttcatcgccatccctggccaggtgacagagcagcagcagctgcagacccgggccaacgtgacccggctgtgccaggtgaccagcacagaccacggccgcacctggagcagcccccgggacctgacagatgctgccatcggccctgcctaccgggagtggagcacctttgctgtgggccctggccactgcctgcagctgcatgaccgggcccggagcctggtggtgcctgcctatgcctacaggaagctgcaccccatccagaggcccatccccagcgccttctgcttcctgagccatgaccacggccgcacctgggcccggggccactttgtggcccaggacaccctggagtgccaggtggccgaggtggagaccggggagcagagggtggtgaccctgaatgcccggagccacctgcgggcccgggtgcaggcccagagcaccaatgatggcctggacttccaggagagccagctggtgaagaagctggtggagcccccaccccagggctgccagggcagcgtcatctccttccccagccccaggagcggccctggcagccctgcccagtggctgctgtacacccaccccacccacagctggcagagagctgacctgggcgcctacctgaacccccggcccccagcccctgaggcctggagcgagcctgtgctgctggccaagggcagctgtgcctacagcgacctgcagagcatgggcaccggcccagatggcagccccctgtttggctgcctgtatgaggccaatgactatgaggagatcgtgttcctgatgttcaccctgaagcaggccttccctgctgagtacctgccccagtag

SEQ ID NO: 18310 - DNA, 3165 bp, synthetic construct
  source 1..3165: mol_type = other DNA; note = Synthetic coding sequence
atggctgctgtgaaggagcccctggagttccacgccaagaggccctggaggcctgaggaggccgtggaggaccctgatgaggaggatgaggacaacaccagcgaggctgaaaatggcttcagcctggaggaggtgctgcggctgggcggcaccaagcaggactacctgatgctggccaccctggatgaaaatgaggaggtgattgatggcggcaagaagggggccattgatgacctgcagcagggcgagctggaggccttcatccagaacctgaacctggccaagtacaccaaggccagcctggtggaggaggatgagcctgctgagaaggagaacagcagcaagaaggaggtgaagatccccaagatcaacaacaagaacacagctgagagccagaggacctctgtgaacaaggtgaagaacaagaacagacctgagccccacagtgatgaaaatggcagcaccacccccaaggtgaagaaggacaagcagaacatctttgagttctttgagcggcagaccctgctgctgcggcctgggggcaagtggtatgacctggagtacagcaatgagtacagcctgaagccccagccccaggatgtggtgtccaagtacaagaccctggcccagaagctgtaccagcacgagatcaacctcttcaagagcaagaccaacagccagaagggggccagcagcacctggatgaaggccatcgtgagcagcggcaccctgggggacaggatggccgccatgatcctgctgatccaggatgatgctgtgcacaccctgcagtttgtggagaccctggtgaacctggtgaagaagaagggcagcaagcagcagtgcctgatggccctggacaccttcaaggagctgctgatcacagacctgctgcctgacaacaggaagctgcgcatcttcagccagaggccctttgacaagctggagcagctgagcagcggcaacaaggacagccgggaccggcggctcatcctgtggtactttgagcaccagctgaagcacctggtggccgagtttgtgcaggtgctggagaccctgagccatgacaccctggtgaccaccaagacccgggccctgactgtggcccacgagctgctgtgcaacaagccagaggaggagaaggccctgctggtgcaggtggtgaacaagctgggggacccccagaaccgcatcgccaccaaggccagccacctgctggagaccctgctgtgcaagcaccccaacatgaagggcgtggtgtctggagaggtggagcggctgctcttccgcagcaacatcagcagcaaggcccagtactatgccatctgcttcctgaaccagatggccctgagccatgaggagagcgagctggccaacaagctgatcaccgtgtacttctgcttcttccgcacctgtgtgaagaagaaggatgtggagagcaagatgctgagcgccctgctgactggagtgaacagagcctacccctacagccagacaggagatgacaaggtgcgggagcagattgacaccctcttcaaggtgctgcacatcgtgaacttcaacacctctgtgcaggccctgatgctgctcttccaggtgatgaacagccagcagaccatcagtgaccgctactacacagccctgtacaggaagatgctggaccccggcctgatgacctgcagcaagcaggccatgttcctgaacctggtgtacaagagcctgaaggctgacatcgtgctgcggcgggtgaaggcctttgtgaagaggctgctgcaggtgacctgccagcagatgccacccttcatctgtggggccctgtacctggtgtctgagatcctgaaggccaagccaggcctgcggagccagctggatgaccaccctgagagtgatgatgaggagaacttcattgatgccaatgatgatgaggacatggagaagttcacagatgctgacaaggagacagagatcgtgaagaagctggagacagaggagaccgtgcctgagacagatgtggagaccaagaagccagaggtggcctcctgggtgcactttgacaacctgaagggcggcaagcagctgaacaagtatgaccccttcagcaggaaccccctcttctgtggggctgagaacaccagcctgtgggagctgaagaagctgtctgtgcacttccaccccagcgtggccctgtttgccaagaccatcctgcagggcaactacatccagtacagcggggaccccctgcaggacttcaccctgatgaggttcctggacagatttgtgtacagaaaccccaagccccacaagggcaaggaaaatacagattctgtggtgatgcagcccaagaggaagcacttcatcaaggacatccgccacctgcctgtgaacagcaaggagttcctggccaaggaggagagccagatccctgtggatgaggtgttcttccaccgctactacaagaaggtggccgtgaaggagaagcagaagagagatgctgatgaggagagcattgaagatgtggatgatgaggagtttgaggagctgattgacacctttgaagatgacaactgcttcagcagcggcaaggatgacatggactttgctggaaatgtgaagaagaggaccaagggggccaaggacaacaccctggatgaggacagcgagggcagtgatgatgagctgggcaacctggatgatgatgaggtgtccctgggctccatggatgatgaggagtttgctgaggtggatgaagatggcggcaccttcatggatgtgctggatgatgaaagtgaatctgtgcctgagctggaggtgcacagcaaggtgtccaccaagaagagcaagaggaaaggaacagatgactttgattttgctggcagcttccagggccccaggaagaagaagaggaacctgaatgacagcagcctgtttgtgtctgctgaggagtttggccacctgctggatgagaacatgggcagcaagtttgacaacatcggcatgaatgccatggccaacaaggacaatgccagcctgaagcagctgcgctgggaggccgagagagatgactggctgcacaacagagatgccaagagcatcatcaagaagaagaagcacttcaagaagaagaggatcaagaccacccagaagaccaagaagcagaggaagtag

SEQ ID NO: 18311 - DNA, 1107 bp, synthetic construct
  source 1..1107: mol_type = other DNA; note = Synthetic coding sequence
atggagcccggccagccccgggagccccaggagccccgggagcccggccctggagctgagacagctgctgcccctgtgtgggaggaggccaagatcttctatgacaacctggcccccaagaagaagcccaagagccccaagccccagaatgctgtgaccatcgctgtgagcagccgggccctcttcaggatggatgaggagcagcagatctacacagagcagggcgtggaggagtatgtgcgctaccagctggagcatgaaaatgagcccttcagccctggccctgccttcccctttgtgaaggccctggaggccgtgaacagaaggctgcgggagctgtacccagattctgaagatgtgtttgatattgtgctgatgaccaacaaccacgcccaggtgggcgtgcggctcatcaacagcatcaaccactatgacctcttcatcgagcgcttctgcatgactggaggcaacagccccatctgctacctgaaggcctaccacaccaacctgtacctgtctgcagatgctgagaaggtgcgggaggccattgatgagggcattgctgctgccaccatcttcagccccagcagagatgtggtggtgtcccagagccagctgcgggtggcctttgatggagatgctgtgctcttcagtgatgaaagtgagcgcatcgtgaaggcccacggcctggaccgcttctttgagcacgagaaggcccacgagaacaagcccctggcccagggccccctgaagggcttcctggaggccctgggccgcctgcagaagaagttctacagcaagggcctgcggctggagtgccccatccgcacctacctggtgacagcccggtctgctgccagcagcggggcccgggccctgaagaccctgcgctcctggggcctggagacagatgaggccctcttcctggccggggcccccaagggccccctgctggagaagatccggccccacatcttctttgatgaccagatgtttcatgtggccggggcccaggagatgggcaccgtggccgcccacgtgccctatggagtggcccagacccccaggagaacagccccagccaagcaggcccccagcgcccagtag

SEQ ID NO: 18312 - DNA, 1080 bp, synthetic construct
  source 1..1080: mol_type = other DNA; note = Synthetic coding sequence
atgctgtctgctgccagccgggtggtgtccagagctgctgtgcactgtgccctgcggagccccccacctgaggcccgggccctggccatgagcaggcctcctccaccccgggtggcctctgtgctgggcaccatggagatgggccgcaggatggatgccccagccagcgctgctgctgtgcgggccttcctggagcggggccacacagagctggacacagccttcatgtacagtgatggccagagcgagaccatcctgggcggcctgggcctgggcctgggcggcggggactgccgggtgaagatcgccaccaaggccaacccctgggatggcaagagcctgaagccagacagcgtgcgcagccagctggagaccagcctgaagaggctgcagtgcccccaggtggacctcttctacctgcacgccccagaccacggcacccctgtggaggagaccctgcacgcctgccagaggctgcaccaggagggcaagtttgtggagctgggcctgagcaactatgcctcctgggaggtggccgagatctgcaccctgtgcaagagcaatggctggatcctgcccaccgtgtaccagggcatgtacaatgccaccacccggcaggtggagacagagctgttcccctgcctgcggcacttcggcctgcgcttctacgcctacaaccccctggccggcggcctgctgaccgggaagtacaagtatgaggacaaggatggcaagcagcctgtgggccgcttcttcggcaacagctgggccgagacctacagaaaccgcttctggaaggagcaccactttgaggccatcgccctggtggagaaggccctgcaggccgcctacggggccagcgcccccagcgtgaccagcgctgccctgcgctggatgtaccaccacagccagctgcagggcgcccatggagatgctgtgatcctgggcatgagcagcctggagcagctggagcagaacctggccgccacagaggagggccccctggagcctgctgtggtggatgccttcaaccaggcctggcacctggtggcccatgaatgtcccaactacttcagatag

SEQ ID NO: 18313 - DNA, 561 bp, synthetic construct
  source 1..561: mol_type = other DNA; note = Synthetic coding sequence
atggatgctgacagtgatgtggccctggacatcctgatcaccaacgtggtgtgtgtgttccgcacccgctgccacctgaacctgaggaagatcgccctggagggcgccaacgtcatctacaagagagatgtgggcaaggtgctgatgaagctgaggaagccccgcatcacagccaccatctggagcagcggcaagatcatctgcacaggagccaccagcgaggaggaggccaagtttggagcccggcggctggcccggagcctgcagaagctgggcttccaggtgatcttcacagacttcaaggtggtgaatgtgctggccgtgtgcaacatgccctttgagatccggctgcctgagttcaccaagaacaaccggccccacgccagctatgagcctgagctgcaccctgctgtgtgctaccgcatcaagagcctgcgggccaccctgcagatcttcagcacaggcagcatcaccgtgacaggccccaacgtgaaggctgtggccacagctgtggagcagatctacccctttgtgtttgagagcaggaaggagatcctgtag

SEQ ID NO: 18314 - DNA, 537 bp, synthetic construct
  source 1..537: mol_type = other DNA; note = Synthetic coding sequence
atggccgcccccctgggcggcatgttcagcggccagcccccaggccccccccaggcccctcctggcctgcccggccaggccagcctgctgcaggccgcccctggggccccccggcccagcagcagcaccctggtggatgagctggagagcagctttgaggcctgctttgccagcctggtgtcccaggactatgtgaatggaacagaccaggaggagatcagaactggagtggaccagtgcatccagaagttcctggacatcgcccggcagacagagtgcttcttcctgcagaagaggctgcagctgtctgtgcagaagccagagcaggtgatcaaggaggatgtgtctgagctgagaaatgagctgcagaggaaggatgccctggtgcagaagcacctgaccaagctgcggcactggcagcaggtgctggaggacatcaacgtgcagcacaagaagccagctgacatcccccagggcagcctggcctacctggagcaggccagcgccaacatcccagcccccctgaagcccacctag

SEQ ID NO: 18315 - DNA, 738 bp, synthetic construct
  source 1..738: mol_type = other DNA; note = Synthetic coding sequence
atggagaagacagagctgatccagaaggccaagctggccgagcaggccgagagatatgatgacatggccacctgcatgaaggctgtgacagagcagggcgctgagctgagcaatgaggagaggaacctgctgtctgtggcctacaagaatgtggtgggcggcagaagaagtgcctggagggtcatcagcagcattgagcagaagacagacaccagtgacaagaagctgcagctgatcaaggactaccgggagaaggtggagagcgagctgcggagcatctgcaccaccgtgctggagctgctggacaagtacctgattgccaatgccaccaaccctgagagcaaggtgttctacctgaagatgaagggggactacttccgctacctggccgaggtggcctgtggagatgacaggaagcagaccatcgacaacagccagggcgcctaccaggaggcctttgacatcagcaagaaggagatgcagcccacccaccccatccggctgggcctggccctgaacttctctgtgttctactatgagatcctgaacaaccctgagctggcctgcaccctggccaagacagcctttgatgaggccatcgccgagctggacaccctgaatgaagacagctacaaggacagcaccctcatcatgcagctgctgcgggacaacctgaccctgtggaccagtgacagcgctggggaggagtgtgatgctgctgagggcgctgagaactag

SEQ ID NO: 18316 - DNA, 534 bp, synthetic construct
  source 1..534: mol_type = other DNA; note = Synthetic coding sequence
atgcctggcctgacagcctacttcggcctgctggagatctgtggggtgaagggcggggagaccgtgatggtgaatgctgctgctggagctgtgggctctgtggtgggccagatcgccaagctgaagggctgcaaggtggtgggcgctgtgggcagtgatgagaaggtggcctacctgcagaagctgggctttgatgtggtgttcaactacaagacagtggagagcctggaggagaccctgaagaaggccagcccagatggctatgactgctactttgacaacgtgggcggggagttcagcaacacagtcatcggccagatgaagaagtttggaagaattgccatctgtggggccatcagcacctacaacagaacaggccccctgcccccaggccccccacctgagatcgtcatctaccaggagctgaggatggaggcctttgtggtgtaccgctggcagggagatgcccggcagaaggccctgaaggacctgctgaagtgggtgctggagctgccctacttcgtcatcgactag

SEQ ID NO: 18317 - DNA, 3660 bp, synthetic construct
  source 1..3660: mol_type = other DNA; note = Synthetic coding sequence
atgtttggagctggagatgaagatgacacagacttcctgagccccagcggcggggcccggctggccagcctgtttggcctggaccaggccgccgccggccacggcaatgagttcttccagtacacagcccccaagcagcccaagaagggccagggcacagctgccaccggcaaccaggccacccccaagacagccccagccaccatgagcacccccaccatcctggtggccacagctgtgcacgcctaccgctacaccaacggccagtatgtgaagcagggcaagtttggagctgctgtgctgggcaaccacacagcccgggagtaccgcatcctgctgtacatcagccagcagcagcctgtgacagtggcccgcatccacgtgaactttgagctgatggtgcggcccaacaactacagcaccttctatgatgaccagaggcagaactggagcatcatgtttgagagcgagaaggctgctgtggagttcaacaagcaggtgtgcatcgccaagtgcaacagcaccagcagcctggatgctgtgctgagccaggacctgattgtggctgatggccctgctgtggaggtgggggacagcctggaggtggcctacacaggctggctgttccagaaccacgtgctgggccaggtgtttgacagcacagccaacaaggacaagctgctgcggctgaagctgggcagcggcaaggtgatcaagggctgggaggatggcatgctgggcatgaagaagggcggcaagaggctgctgattgtgcccccagcctgtgctgtgggcagcgagggcgtcatcggctggacccaggccacagacagcatcctggtgtttgaggtggaggtgagaagagtgaagtttgcccgggacagcggcagtgatggccacagcgtgagcagccgggacagcgctgcccccagccccatccctggagctgacaacctgtctgctgaccctgtggtgtccccacccaccagcatccccttcaagtctggagagcccgccctgcggaccaagagcaacagcctgtctgagcagctggccatcaacaccagcccagatgctgtgaaggccaagctgatcagcaggatggccaagatgggccagcccatgctgcccatcctgcccccccagctggacagcaatgacagcgagattgaagatgtgaacaccctgcagggcggcggccagcctgtggtgaccccatctgtgcagcccagcctgcacccagcccacccagccctgccccagatgaccagccaggccccccagcccagcgtgacaggcctgcaggcccccagcgctgccctgatgcaggtgagcagcctggacagccacagcgctgtgtctggaaatgcccagagcttccagccctatgccggcatgcaggcctatgcctacccccaggccagcgctgtgaccagccagctgcagcctgtgcggcccctgtacccagcccccctgagccagcccccccacttccagggcagcggggacatggccagcttcctgatgacagaggcccggcagcacaacacagagatccgcatggctgtgtccaaggtggccgacaagatggaccacctgatgaccaaggtggaggagctgcagaagcacagcgctggcaacagcatgctgatccccagcatgtctgtgaccatggagacctccatgatcatgagcaacatccagaggatcatccaggagaatgaaaggctgaagcaggagatcctggagaagagcaaccgcatcgaggagcagaatgacaagatcagcgagctgattgaaagaaaccagagatatgtggagcagagcaacctgatgatggagaagaggaacaacagcctgcagacagccacagagaacacccaggcccgggtgctgcacgccgagcaggagaaggccaaggtgacagaggagctggccgccgccacagcccaggtgagccacctgcagctgaagatgacagcccaccagaagaaggagacagagctgcagatgcagctgacagagagcctgaaggagacagacctgctgcggggccagctgaccaaggtgcaggccaagctgtctgagctgcaggagaccagcgagcaggcccagagcaagttcaagtctgagaagcagaacaggaagcagctggagctgaaggtgaccagcctggaggaggagctgacagacctgcgggtggagaaggagagcctggagaagaacctgtctgagaggaagaagaagagcgcccaggagaggagccaggccgaggaggagattgatgagatcaggaagagctaccaggaggagctggacaagctgcggcagctgctgaagaagaccagggtgtccacagaccaggccgctgctgagcagctgagcctggtgcaggccgagctgcagacccagtgggaggccaagtgtgagcacctgctggccagcgccaaggatgagcacctgcagcagtaccaggaggtgtgtgcccagagagatgcctaccagcagaagctggtgcagctgcaggagaagtgcctggccctgcaggcccagatcacagccctgaccaagcagaatgagcagcacatcaaggagctggagaagaacaagagccagatgtctggagtggaggccgccgccagtgaccccagcgagaaggtgaagaagatcatgaaccaggtgttccagagcctgcggcgggagtttgagctggaggagagctacaatggaagaaccatcctgggcaccatcatgaacaccatcaagatggtgaccctgcagctgctgaaccagcaggagcaggagaaggaggagagcagcagcgaggaggaggaggagaaggccgaggagcggccccggcggcccagccaggagcagagcgccagcgccagcagcggccagccccaggcccccctgaaccgggagaggcctgagagccccatggtgcccagcgagcaggtggtggaggaggccgtgcccctgcccccccaggccctgaccaccagccaggacggccacagaagaaaaggagacagcgaggccgaggccctgtctgagatcaaggatggcagcctgcccccagagctgagctgcatccccagccaccgggtgctgggcccccccaccagcatccccccagagcccctgggccctgtgtccatggacagtgaatgtgaggagagcctggccgccagccccatggccgccaagccagacaaccccagcggcaaggtgtgtgtgcgggaggtggccccagatggccccctgcaggagagcagcacccggctgagcctgaccagtgaccctgaggagggggaccccctggccctgggccctgagagccctggagagccccagcccccccagctgaagaaggatgatgtgaccagcagcacaggcccccacaaggagctgagcagcacagaagctggcagcacagtggccggggccgccctgcggcccagccaccacagccagaggagcagcctgtctggagatgaggaggatgagctgttcaagggggccaccctgaaggccctgcggcccaaggcccagcctgaggaggaggatgaagatgaggtgtccatgaagggccggcccccacccacccccctgtttggagatgatgatgatgatgatgacatcgactggctgggctag

SEQ ID NO: 18318 - DNA, 6978 bp, synthetic construct
  source 1..6978: mol_type = other DNA; note = Synthetic coding sequence
atgaagaagggcagccagcagaagatcttcagcaaggccaagatccccagcagcagccacagccccatccccagctccatgagcaacatgaggagccgcagcctgagccccctgattggcagcgagaccctgcccttccacagcggcggccagtggtgtgagcaggtggagattgctgatgagaacaacatgctgctggactaccaggaccacaagggagctgacagccacgccggcgtgcgctacatcacagaggccctgatcaagaagctgaccaagcaggacaacctggccctgatcaagagcctgaacctgagcctgagcaaggatggcggcaagaagttcaagtacatcgagaacctggagaagtgtgtgaagctggaggtgctgaacctgagctacaacctgattggcaagattgagaagctggacaagctgctgaagctgcgggagctgaacctgagctacaacaagatcagcaagattgagggcatcgagaacatgtgcaacctgcagaagctgaacctggccggaaatgaaattgagcacatccctgtgtggctgggcaagaagctgaagagcctgcgggtgctgaacctgaagggcaacaagatcagcagcctgcaggacatcagcaagctgaagcccctgcaggacctgatcagcctcatcctggtggagaaccctgtggtgaccctgccccactacctgcagttcaccatcttccacctgcggagcctggagagcctggagggccagcctgtgaccacccaggaccggcaggaggcctttgagcgcttcagcctggaggaggtggagcggctggagcgggacctggagaagaagatgattgaaacagaggagctgaagagcaagcagacccgcttcctggaggagatcaagaaccaggacaagctgaacaagagcctgaaggaggaggccatgctgcagaagcagagctgtgaggagctgaagagtgacctgaacaccaagaatgagctgctgaagcagaagaccatcgagctgacccgggcctgccagaagcagtatgagctggagcaggagctggccttctacaagattgatgccaagtttgagcccctgaactactaccccagtgaatatgcagaaattgacaaggccccagatgagagcccctacatcggcaagagccgctacaagaggaacatgtttgccacagagagctacatcattgattctgcccaggccgtgcagatcaagaagatggagccagatgagcagctgagaaatgaccacatgaacctgcggggccacacccccctggacacccagctggaggacaaggagaagaagatctctgctgcccagacccggctgtctgagctgcatgatgaaattgagaaggccgagcagcagatcctgcgggccacagaggagttcaagcagctggaggaggccatccagctgaagaagatcagcgaggccggcaaggacctgctgtacaagcagctgagcggccgcctgcagctggtgaacaagctgcggcaggaggccctggacctggagctgcagatggagaagcagaagcaggagattgctgggaagcagaaggagatcaaggacctgcagatcgccatcgacagcctggacagcaaggaccccaagcacagccacatgaaggcccagaagagcggcaaggagcagcagctggacatcatgaacaagcagtaccagcagctggagagccggctggatgagatcctgagcagaattgccaaggagacagaggagatcaaggacctggaggagcagctgacagagggccagattgctgccaatgaggccctgaagaaggacctggagggcgtcatcagcggcctgcaggagtacctgggcaccatcaagggccaggccacccaggcccagaatgaatgtaggaagctgagagatgagaaggagaccctgctgcagaggctgacagaggtggagcaggagcgggaccagctggagatcgtggccatggatgctgagaacatgaggaaggagctggccgagctggagagcgccctgcaggagcagcacgaggtgaatgccagcctgcagcagacccagggcgacctgagcgcctatgaggccgagctggaggcccggctgaacctgagagatgctgaggccaaccagctgaaggaggagctggagaaggtgacccggctgacccagctggagcagagcgccctgcaggccgagctggagaaggagcggcaggccctgaagaatgccctgggcaaggcccagttcagcgaggagaaggagcaggagaacagcgagctgcacgccaagctgaagcacctgcaggatgacaacaacctgctgaagcagcagctgaaggacttccagaaccacctgaaccacgtggtggatggcctggtgcggcctgaggaggtggccgcccgggtggatgagctgcggaggaagctgaagctgggcaccggggagatgaacatccacagccccagtgatgtgctgggcaagagcctggccgacctgcagaagcagttcagcgagatcctggcccggagcaagtgggagagagatgaggcccaggtgcgggagaggaagctgcaggaggagatggccctgcagcaggagaagctggccaccggccaggaggagttccggcaggcctgtgagcgggccctggaggccaggatgaactttgacaagaggcagcacgaggcccgcatccagcagatggagaatgagatccactacctgcaggagaacctgaagtccatggaggagatccagggcctgacagacctgcagctgcaggaggctgatgaggagaaggagcgcatcctggcccagctgcgggagctggagaagaagaagaagctggaggatgccaagagccaggagcaggtgtttggcctggacaaggagctgaagaagctgaagaaggctgtggccaccagtgacaagctggccacagctgagctgaccatcgccaaggaccagctgaagagcctgcatggaacagtgatgaagatcaaccaggagcgggcagaggagctgcaggaggccgagcgcttcagcaggaaggccgcccaggccgcccgggacctgaccagggctgaggccgagattgagctgctgcagaacctgctgcggcagaagggggagcagttccggctggagatggagaagacaggagtgggcaccggggccaacagccaggtgctggagattgagaagctgaatgagaccatggagcggcagaggacagaaattgcccggctgcagaatgtgctggacctgactggaagtgacaacaagggcggctttgaaaatgtgctggaggagattgctgagctgcggcgggaggtgtcctaccagaatgactacatcagctccatggctgaccccttcaagagaagaggctactggtacttcatgcctcctccacccagcagcaaggtgagcagccacagcagccaggccaccaaggacagcggcgtgggcctgaagtacagcgccagcacccctgtgaggaagccccggcccggccagcaggacggcaaggagggcagccagcccccaccagccagcggctactgggtgtacagccccatccgcagcggcctgcacaagctgttccccagcagagatgctgacagcggcggggacagccaggaggagagcgagctggatgaccaggaggagcccccatttgtgcccccacctggctacatgatgtacacagtgctgcctgatggcagccctgtgccccagggcatggccctgtatgcccctcctccacccctgcccaacaacagccggcccctgaccccaggcaccgtggtgtatggccccccacctgctggggcccccatggtgtatggccccccaccacccaacttcagcatccccttcatccccatgggcgtgctgcactgcaatgtgcctgagcaccacaacctggagaatgaggtgtcccggctggaggacatcatgcagcacctgaagagcaagaagcgggaggagcgctggatgagggccagcaagaggcagagcgagaaggagatggaggagctgcaccacaacattgatgacctgctgcaggagaagaagagcctggagtgtgaggtggaggagctgcacaggacagtgcagaagaggcagcagcagaaggacttcattgatggaaatgtggagagcctgatgacagagctggagattgagaagagcctgaagcaccatgaagatattgtggatgaaattgagtgcatcgagaagaccctgctgaagagaagaagtgagctgcgggaggccgaccggctgctggccgaggccgagagcgagctgagctgcaccaaggagaagaccaagaatgctgtggagaagttcacagatgccaagaggagcctgctgcagacagaaagtgatgctgaggagctggagcggcgggcccaggagacagctgtgaacctggtgaaggctgaccagcagctgcggagcctgcaggctgatgccaaggacctggagcagcacaagatcaagcaggaggagatcctgaaggagatcaacaagatcgtggccgccaaggacagcgacttccagtgcctgagcaagaagaaggagaagctgacagaggagctgcagaagctgcagaaggacatcgagatggccgagagaaatgaagaccaccacctgcaggtgctgaaggagagcgaggtgctgctgcaggccaagagagctgagctggagaagctgaagagccaggtgaccagccagcagcaggagatggctgtgctggaccggcagctgggccacaagaaggaggagctgcacctgctgcagggctccatggtgcaggccaaggctgacctgcaggaggccctgcggctgggggagacagaggtgacagagaagtgcaaccacatccgggaggtgaagagcctgctggaggagctgtccttccagaagggggagctgaatgtgcagatcagcgagaggaagacccagctgaccctcatcaagcaggagattgagaaggaggaggagaacctgcaggtggtgctgcggcagatgagcaagcacaagacagagctgaagaacatcctggacatgctgcagctggagaaccacgagctgcagggcctgaagctgcagcacgaccagagggtgtctgagctggagaagacccaggtggccgtgctggaggagaagctggagctggagaacctgcagcagatcagccagcagcagaagggggagattgagtggcagaagcagctgctggagcgggacaagcgggagattgaaagaatgacagctgagagccgggccctgcagagctgtgtggagtgcctgagcaaggagaaggaggacctgcaggagaagtgtgacatctgggagaagaagctggcccagaccaagagggtgctggccgctgctgaggagaacagcaagatggagcagagcaacctggagaagctggagctgaatgtgaggaagctgcagcaggagctggaccagctgaacagagacaagctgagcctgcacaatgacatcagcgccatgcagcagcagctgcaggagaagcgggaggccgtgaacagcctgcaggaggagctggccaacgtgcaggaccacctgaacctggccaagcaggacctgctgcacaccaccaagcaccaggatgtgctgctgtctgagcagacccggctgcagaaggacatcagcgagtgggccaacagatttgaggactgccagaaggaggaggagaccaagcagcagcagctgcaggtgctgcagaatgaaattgaggagaacaagctgaagctggtgcagcaggagatgatgttccagaggctgcagaaggagcgggagagcgaggagagcaagctggagaccagcaaggtgaccctgaaggagcagcagcaccagctggagaaggagctgacagaccagaagagcaagctggaccaggtgctgagcaaggtgctggccgctgaggagcgggtgaggaccctgcaggaggaggagcgctggtgtgagagcctggagaagaccctgagccagaccaagaggcagctgtctgagcgggagcagcagctggtggagaagagcggggagctgctggccctgcagaaggaggccgacagcatgagagctgacttcagcctgctgaggaaccagttcctgacagagaggaagaaggccgagaagcaggtggccagcctgaaggaggccctgaagatccagaggagccagctggagaagaacctgctggagcagaagcaggagaacagctgcatccagaaggagatggccaccatcgagctggtggcccaggacaaccacgagcgggcccggcggctgatgaaggagctgaaccagatgcagtatgagtacacagagctgaagaagcagatggccaaccagaaggacctggagcggcggcagatggagatcagtgatgccatgaggaccctgaagtctgaggtgaaggatgagatccgcaccagcctgaagaacctgaaccagttcctgcctgagctgcctgctgacctggaggccatcctggagagaaatgaaaacctggagggggagctggagagcctgaaggagaacctgcccttcaccatgaatgaaggcccctttgaggagaagctgaacttcagccaggtgcacatcatggatgagcactggagaggagaggccctgcgggagaagctgcggcacagagaagatcggctgaaggcccagctgcggcactgcatgagcaagcaggccgaggtgctgatcaagggcaagaggcagacagagggcaccctgcacagcctgcggcggcaggtggatgccctgggggagctggtgaccagcaccagcgctgacagcgccagcagccccagcctgagccagctggagagcagcctgacagaggacagccagctgggccagaaccaggagaagaatgccagcgccaggtag

SEQ ID NO: 18319 - DNA, 2811 bp, synthetic construct
  source 1..2811: mol_type = other DNA; note = Synthetic coding sequence
atggagccagacatcatccgcatgtacagcagcagccccccacccctggacaacggggctgaagatgatgatgatgatgaatttggagaatttggaggcttcagcgaggtgagccccagcggcgtgggctttgtggactttgacaccccagactacacccggcccaaggaggagtttgtgcccagcaaccacttcatgcccatccacgagttctctgaaaatgtggacagcctgaccagcttcaagagcatcaagaatggaaatgacaaggacatcacagctgagctgagcgcccctgtgaagggccagagtgatgtgctgctgagcaccaccagcaaggagatcatcagcagcgagatgctggccaccagcattgatggcatggagaggcctggcaacctgaacaaggtggtggagcagaggcagaatgtgggcaccctggagagcttcagccctggggacttccgcaccaacatgaatgtggtgcaccagaacaagcagctggagagctgcaatggagagaagccaccctgcctggagatcctgaccaacggctttgctgtgctggagaccgtgaacccccagggcacagatgacctggacaacgtggccgacagcaaaggaaggaagcccctgagcacccacagcacagagtacaacctggacagcgtgcccagccctgctgaggagtttgctgactttgccaccttcagcaagaaggagcgcatccagctggaggagattgaatgtgctgtgctgaatgaccgggaggccctgaccatccgggagaacaacaagatcaacagagtgaatgagctgaacagcgtgaaggaggtggccctgggccgcagcctggacaacaagggggacacagatggagaggaccaggtgtgtgtgtctgagatcagcatcgtgaccaacagaggcttctctgtggagaagcagggcctgcccaccctgcagcaggatgagttcctgcagagcggcgtgcagagcaaggcctggagcctggtggacagcgctgacaacagcgaggccatccggcgggagcagtgcaagacagaggagaagctggacctgctgaccagcaaatgtgcccacctgtgcatggacagcgtgaagaccagtgatgatgaggtgggcagccccaaggaggagagcaggaagttcaccaacttccagagccccaacatcgaccccacagaagaaaatgacctggatgacagcctgtctgtgaagaatggagacagcagcaatgactttgtgacctgcaatgacatcaatgaagatgactttggagactttggagactttggcagcgccagcggcagcaccccaccatttgtgacaggcacccaggacagcatgtctgatgccacctttgaggagagcagcgagcacttcccccacttcagcgagcctggagatgactttggagaatttggagacatcaatgctgtgtcctgccaggaggagaccatcctgaccaagagtgacctgaagcagaccagtgacaacctgtctgaggagtgccagctggccaggaagagcagcggcaccggcacagagcctgtggccaagctgaagaatggccaggagggggagatcggccactttgattctgtgcccaacatccaggatgactgcaatggcttccaggacagtgatgactttgctgacttcagcagcgctggccccagccaggtggtggactggaatgcctttgaagatgagcagaaggacagctgctcctgggccgccttcggggaccagcaggccacagagagccaccacaggaaggaggcctggcagagccacaggacagatgagaacatcgacaccccaggcacccccaagacccacagcgtgcccagcgccaccagcaaaggagctgtggccagcggccacctgcaggagagcgccacctctgtgcagacagccctgctgaaccggctggagcgcatctttgaggcctgcttccccagcatcctggtgcctgatgctgaggaggaggtgaccagcctgaagcacctgctggagaccagcaccctgcccatcaagacccgggaggccctgcctgagagcggggagctgctggatgtgtggacagagctgcaggacatccatgatgcccacggcctgcgctaccagtggggcggcagccacagcaacaagaagctgctgagcagcctgggcatcgacaccaggaacatcctcttcaccggcaacaagaagcagcctgtgattgtgcccatgtatgctgctggcctgggcatgctggagcccaccaaggagcccctgaagcccctgtctgctgctgagaagatcgccagcatcggccagacagccaccatgagcccagacatgaacacctgcaccagtgaccagttccaggagagcctgccccctgtgcagtttgactggagcagcagcggcctgaccaaccccctggatgccagcggcggcagcaccctgctgaacctggacttctttggacctgtggatgacagcagcagcagcagcagcaccaccatccctggggtggaccctgagctgtatgagctgaccaccagcaagctggagatcagcaccagcagcctgaaggtgacagatgcctttgcccggctgatgagcacagtggagaagaccagcaccagcaccaggaagcccaagcgggaggagcacctgtctgaggaggccatcaaggtgattgctggcctgcctgacctgaccttcatgcacgccaaggtgctgatgtttcctgccaccctgacccccagcaccagcagccaggagaaggcagatggatag

SEQ ID NO: 18320 - DNA, 2730 bp, synthetic construct
  source 1..2730: mol_type = other DNA; note = Synthetic coding sequence
atggagccagacatcatccgcatgtacagcagcagccccccacccctggacaacggggctgaagatgatgatgatgatgaatttggagaatttggaggcttcagcgaggtgagccccagcggcgtgggctttgtggactttgacaccccagactacacccggcccaaggaggagtttgtgcccagcaaccacttcatgcccatccacgagttctctgaaaatgtggacagcctgaccagcttcaagagcatcaagaatggaaatgacaaggacatcacagctgagctgagcgcccctgtgaagggccagagtgatgtgctgctgagcaccaccagcaaggagatcatcagcagcgagatgctggccaccagcattgatggcatggagaggcctggcaacctgaacaaggtggtggagcagaggcagaatgtgggcaccctggagagcttcagccctggggacttccgcaccaacatgaatgtggtgcaccagaacaagcagctggagagctgcaatggagagaagccaccctgcctggagatcctgaccaacggctttgctgtgctggagaccgtgaacccccagggcacagatgacctggacaacgtggccgacagcaaaggaaggaagcccctgagcacccacagcacagagtacaacctggacagcgtgcccagccctgctgaggagtttgctgactttgccaccttcagcaagaaggagcgcatccagctggaggagattgaatgtgctgtgctgaatgaccgggaggccctgaccatccgggagaacaacaagatcaacagagtgaatgagctgaacagcgtgaaggaggtggccctgggccgcagcctggacaacaagggggacacagatggagaggaccaggtgtgtgtgtctgagatcagcatcgtgaccaacagaggcttctctgtggagaagcagggcctgcccaccctgcagcaggatgagttcctgcagagcggcgtgcagagcaaggcctggagcctggtggacagcgctgacaacagcgaggccatccggcgggagcagtgcaagacagaggagaagctggacctgctgaccagcaaatgtgcccacctgtgcatggacagcgtgaagaccagtgatgatgaggtgggcagccccaaggaggagagcaggaagttcaccaacttccagagccccaacatcgaccccacagaagaaaatgacctggatgacagcctgtctgtgaagaatggagacagcagcaatgactttgtgacctgcaatgacatcaatgaagatgactttggagactttggagactttggcagcgccagcggcagcaccccaccatttgtgacaggcacccaggacagcatgtctgatgccacctttgaggagagcagcgagcacttcccccacttcagcgagcctggagatgactttggagaatttggagacatcaatgctgtgtcctgccaggaggagaccatcctgaccaagagtgacctgaagcagaccagtgacaacctgtctgaggagtgccagctggccaggaagagcagcggcaccggcacagagcctgtggccaagctgaagaatggccaggagggggagatcggccactttgattctgtgcccaacatccaggatgactgcaatggcttccaggacagtgatgactttgctgacttcagcagcgctggccccagccaggtggtggactggaatgcctttgaagatgagcagaaggacagctgctcctgggccgccttcggggaccagcaggccacagagagccaccacaggaaggaggcctggcagagccacaggacagatgagaacatcgacaccccaggcacccccaagacccacagcgtgcccagcgccaccagcaaaggagctgtggccagcggccacctgcaggagagcgccacctctgtgcagacagccctgctgaaccggctggagcgcatctttgaggcctgcttccccagcatcctggtgcctgatgctgaggaggaggtgaccagcctgaagcacctgctggagaccagcaccctgcccatcaagacccgggaggccctgcctgagagcggggagctgctggatgtgtggacagagctgcaggacatccatgatgcccacggcctgcgctaccagtggggcggcagccacagcaacaagaagctgctgagcagcctgggcatcgacaccaggaacatcctcttcaccggcaacaagaagcagcctgtgattgtgcccatgtatgctgctggcctgggcatgctggagcccaccaaggagcccctgaagcccctgtctgctgctgagaagatcgccagcatcggccagacagccaccatgagcccagacatgaacacctgcaccagtgaccagttccaggagagcctgccccctgtgcagtttgactggagcagcagcggcctgaccaaccccctggatggagtggaccctgagctgtatgagctgaccaccagcaagctggagatcagcaccagcagcctgaaggtgacagatgcctttgcccggctgatgagcacagtggagaagaccagcaccagcaccagcaggaagcccaagcgggaggagcacctgtctgaggaggccatcaaggtgattgctggcctgcctgacctgaccttcatgcacgccaaggtgctgatgtttcctgccaccctgacccccagcaccagcagccaggagaaggcagatggatag

SEQ ID NO: 18321 - DNA, 306 bp, synthetic construct
  source 1..306: mol_type = other DNA; note = Synthetic coding sequence
atggtgtgtgagaagtgtgagaagaagctgggcaccgtcatcaccccagacacctggaaggatggagccaggaacaccacagaaagtggcggcaggaagctgaatgaaaacaaggccctgaccagcaagaaggccaggtttgacccctacggcaagaacaagttcagcacctgccgcatctgcaagagctctgtgcaccagcccggcagccactactgccagggctgtgcctacaagaagggcatctgtgccatgtgtgggaagaaggtgctggacaccaagaactacaagcagacctctgtgtag

SEQ ID NO: 18322 - DNA, 1467 bp, synthetic construct
  source 1..1467: mol_type = other DNA; note = Synthetic coding sequence
atgaacttcacccccacccacacccctgtgtgcaggaagaggacagtggtgtccaagaggggcgtggccgtgtctggccccaccaagaggcggggcatggctgacagcctggagagcacccccctgcccagccctgaggaccggctggccaagctgcaccccagcaaggagctgctggagtactaccagaagaagatggccgagtgtgaggccgagaatgaagacctgctgaagaagctggagctgtacaaggaggcctgtgagggccagcacaagctggagtgtgacctgcagcagcgggaggaggagattgctgagctgcagaaggccctgagtgacatgcaggtgtgcctcttccaggagcgggagcacgtgctgcggctgtacagtgaaaatgaccggctgcgcatccgggagctggaggacaagaagaagatccagaacctgctggccctggtgggcacagatgctggggaggtgacctacttctgcaaggagcccccccacaaggtgaccatcctgcagaagaccatccaggccgtgggagaatgtgagcagagcgagagcagcgccttcaaggctgaccccaagatcagcaagagaagacccagccgggagaggaaggagagcagcgagcactaccagagggacatccagaccctcatcctgcaggtggaggccctgcaggcccagctgggggagcagaccaagctgagccgggagcagatcgagggcctgattgaggaccggcgcatccacctggaggagatccaggtgcagcaccagaggaaccagaacaagatcaaggagctgaccaagaacctgcaccacacccaggagctgctgtatgagagcaccaaggacttcctgcagctgcggtctgagaaccagaacaaggagaagtcctggatgctggagaaggacaacctgatgagcaagatcaagcagtacagagtgcagtgcaagaagaaggaggacaagattggcaaggtgctgcctgtgatgcatgagagccaccacgcccagagcgagtacatcaagagcctgaaggacaagctggtgcaggagaagaagctgagcaacatgtaccaggagcagtgcatcagcctggaggaggagctggcccgcatccgggaggaggagggcatgaggcgggagatcttcaaggacaggaccaacaagatgggcaagaggctgcagatcatgaccaagagatatgaggccctggagcggcggcgcatcctggaggtggagggcttcaagacagacatcaaggtgctgcggcagaagctgaaggacctggagcagatgctgtacaaggccaccgtgaatgcccgggccaaccaggacctggccctgctgtgtgaggtgcgggacagcaacagaagagcccacaagatccagggcgagctgaagaacctgaagagcaaggtgtttggcctggagaatgagctgcggctgtgctag

SEQ ID NO: 18323 - DNA, 258 bp, synthetic construct
  source 1..258: mol_type = other DNA; note = Synthetic coding sequence
atgagcaaggtgtccttcaagatcaccctgaccagtgacccccggctgccctacaaggtgctgtctgtgcctgagagcacccccttcaccgctgtgctgaagtttgctgctgaggagttcaaggtgcctgctgccaccagcgccatcatcaccaatgatggcatcggcatcaacccagcccagacagctggaaatgtgttcctgaagcacggcagcgagctgcgcatcatcccccgggacagagtgggcagctgctag

SEQ ID NO: 18324 - DNA, 585 bp, synthetic construct
  source 1..585: mol_type = other DNA; note = Synthetic coding sequence
atggatgaagatggcctgcccctgatgggcagcggcatcgacctgaccaaggtgcctgccatccagcagaagaggacagtggccttcctgaaccagtttgtggtgcacacagtgcagttcctgaaccgcttcagcacagtgtgtgaggagaagctggccgacctgagcctgcgcatccagcagatcgagaccaccctgaacatcctggatgccaagctgagcagcatccctggcctggatgatgtgacagtggaggtgagccccctgaatgtgacctctgtgaccaacggggcccaccctgaggccaccagcgagcagccccagcagaacagcacccaggacagcggcctgcaggagagcgaggtgtctgctgagaacatcctgactgtggccaaggaccccaggtatgcccgctacctgaagatggtgcaggtgggcgtgcctgtgatggccatccggaacaagatgatcagcgagggcctggaccctgacctgctggagaggccagatgcccctgtgcctgatggagagagcgagaagacagtggaggagagcagtgacagcgagagcagcttcagtgactag

SEQ ID NO: 18325 - DNA, 2226 bp, synthetic construct
  source 1..2226: mol_type = other DNA; note = Synthetic coding sequence
atgggccccccaggccctgccctgcctgccaccatgaacaacagcagcagcgagacccggggccacccccacagcgccagcagccccagcgagagggtcttccccatgcccctgcccaggaaggcccccctgaacatccctggcacccctgtgctggaggacttcccccagaatgatgatgagaaggagcggctgcagaggcggcgcagccgggtgtttgacctgcagttcagcacagacagcccccggctgctggccagccccagcagccgcagcattgacatcagcgccaccatccccaagttcaccaacacccagatcacagagcactacagcacctgcatcaagctgagcacagagaacaagatcaccaccaagaatgccttcggcctgcacctgattgacttcatgtctgagatcctgaagcagaaggacacagagcccaccaacttcaaggtggccgccggcaccctggatgccagcaccaagatctatgctgtgcgggtggatgctgtgcatgctgatgtgtacagagtgctgggcggcctgggcaaggatgcccccagcctggaggaggtggagggccacgtggctgatggcagcgccacagagatgggcaccaccaagaaggctgtgaagcccaagaagaagcacctgcacaggaccatcgagcagaacatcaacaacctgaatgtgtctgaggccgacagaaaatgtgaaattgaccccatgttccagaagacagctgccagctttgatgagtgcagcacagctggggtcttcctgagcaccctgcactgccaggactacagaagtgagctgctcttccccagtgatgtgcagaccctgagcactggagagcccctggagctgcctgagctgggctgtgtggagatgacagacctgaaggcccccctgcagcagtgtgctgaagatcggcagatctgccccagcctggccggcttccagttcacccagtgggacagcgagacccacaatgaatctgtgtctgccctggtggacaagttcaagaagaatgaccaggtgtttgacatcaatgctgaggtggatgaaagtgactgtggggacttcccagatggcagcctgggagatgactttgatgccaatgatgagccagaccacacagctgtgggggaccacgaggagttccgctcctggaaggagccctgccaggtgcagagctgccaggaggagatgatcagcctgggagatggagacatccgcaccatgtgccccctgctgtccatgaagccaggagagtacagctacttcagccccaggaccatgtccatgtgggccggccctgaccactggaggttccggcccaggaggaagcaggatgcccccagccagagcgagaacaagaagaagagcaccaagaaggactttgaaattgactttgaagatgacatcgactttgatgtgtacttcaggaagaccaaggccgccaccatcctgaccaagagcaccctggagaaccagaactggagggccaccaccctgcccacagacttcaactacaacgtggacaccctggtgcagctgcacctgaagccaggcacccggctgctgaagatggcccagggccaccgggtggagacagagcactatgaggagattgaggactatgactacaacaaccccaatgacaccagcaacttctgccccggcctgcaggccgctgacagtgatgatgaggacctggatgacctgtttgtgggccctgtgggcaacagcgacctgagcccctacccctgccacccccccaagacagcccagcagaatggagacaccccagaggcccagggcctggacatcaccacctacggggagagcaacctggtggccgagccccagaaggtgaacaagattgagatccactacgccaagacagccaagaagatggacatgaagaagctgaagcagagcatgtggagcctgctgacagccctgagcggcaaggaggctgatgctgaggccaaccaccgggaggccggcaaggaggccgccctggccgaggtggctgatgagaagatgctgagcggcctgaccaaggacctgcagaggagcctgccccctgtgatggcccagaacctgagcatccccctggcctttgcctgcctgctgcacctggccaatgagaagaacctgaagctggagggcacagaggacctgagtgatgtgctggtgcggcagggcgactag

SEQ ID NO: 18326 - DNA, 510 bp, synthetic construct
  source 1..510: mol_type = other DNA; note = Synthetic coding sequence
atgaagggcagccgcatcgagctgggagatgtgaccccccacaacatcaagcagctgaagaggctgaaccaggtgatcttccctgtgtcctacaatgacaagttctacaaggatgtgctggaggtgggggagctggccaagctggcctacttcaatgacattgctgtgggcgctgtgtgctgccgggtggaccacagccagaaccagaagaggctgtacatcatgaccctgggctgcctggccccctaccgccgcctgggcatcggcaccaagatgctgaaccacgtgctgaacatctgtgagaaggatggcacctttgacaacatctacctgcacgtgcagatcagcaatgaaagtgccatcgacttctacaggaagtttggatttgagatcatcgagaccaagaagaactactacaagagaattgaaccagcagatgcccacgtgctgcagaagaacctgaaggtgcccagcggccagaatgctgatgtgcagaagacagacaactag

SEQ ID NO: 18327 - DNA, 1245 bp, synthetic construct
  source 1..1245: mol_type = other DNA; note = Synthetic coding sequence
atggctgctgcccctccttcctactgctttgtggccttccccccccgggccaaggatggcctggtggtgtttgggaagaacagcgcccggcccagagatgaggtgcaggaggtggtgtacttctctgctgctgaccacgagcctgagagcaaggtggagtgcacctacatcagcattgaccaggtgcccaggacctacgccatcatgatcagcaggcctgcctggctgtggggcgctgagatgggcgccaatgagcacggcgtgtgcatcgccaatgaggccatcaacacccgggagcctgctgctgagattgaggccctgctgggcatggacctggtgcggctgggcctggagcggggggagacagccaaggaggccctggatgtgattgtgtccctgctggaggagcacggccagggcggcaactactttgaagatgccaacagctgccacagcttccagagcgcctacctgattgtggacagagatgaggcctgggtgctggagaccatcggcaagtactgggccgctgagaaggtgacagaaggagtgcgctgcatctgcagccagctgagcctgaccaccaagatggatgctgagcaccctgagctgcggagctatgcccagagccagggctggtggacaggagagggggagttcaacttcagcgaggtgttcagccctgtggaggaccacctggactgtggggccggcaaggacagcctggagaagcaggaggagagcatcaccgtgcagaccatgatgaacaccctgcgggacaaggccagcggcgtgtgcattgattctgagttcttcctgaccacagccagcggcgtgtctgtgctgccccagaacagaagcagcccctgcatccactacttcaccggcaccccagaccccagccgcagcatcttcaagcccttcatctttgtggatgatgtgaagctggtgcccaagacccagagcccctgctttggagatgatgatcctgccaagaaggagccccgcttccaggagaagccagacagaagacatgagctgtacaaggcccacgagtgggcccgggccatcatcgagagtgaccaggagcagggcaggaagctgcggagcaccatgctggagctggagaagcagggcctggaggccatggaggagatcctgaccagcagcgagcccctggaccctgctgaggtgggggacctcttctatgactgtgtggacacagagatcaagttcttcaagtag

SEQ ID NO: 18328 - DNA, 2031 bp, synthetic construct
  source 1..2031: mol_type = other DNA; note = Synthetic coding sequence
atgtctgaccagatcaagttcatcatggacagcctgaacaaggagcccttcaggaagaactacaacctgatcacctttgacagcctggagcccatgcagctgctgcaggtgctgagtgatgtgctggccgagattgaccccaagcagctggtggacatccgggaggagatgcctgagcagacagccaagaggatgctgagcctgctgggcatcctgaagtacaagcccagcggaaatgccacagacatgagcaccttccggcagggcctggtgattggcagcaagcctgtgatctaccctgtgctgcactggctgctgcagaggaccaatgagctgaagaagagggcctacctggcccgcttcctgatcaagctggaggtgcccagcgagttcctgcaggatgagaccgtggccgacaccaacaagcagtatgaggagctgatggaggccttcaagaccctgcacaaggagtatgagcagctgaagatcagcggcttcagcacagctgagatcaggaaggacatcagcgccatggaggaggagaaggaccagctgatcaagagggtggagcacctgaagaagagggtggagacagcccagaaccaccagtggatgctgaagatcgcccggcagctgcgggtggagaaggagcgggaggagtacctggcccagcagaagcaggagcagaagaaccagctgttccacgctgtgcagaggctgcagagggtgcagaaccagctgaagtccatgaggcaggccgctgctgatgccaagccagagagcctgatgaagaggctggaggaggagatcaagttcaacctgtacatggtgacagagaagttccccaaggagctggagaacaagaagaaggagctgcacttcctgcagaaggtggtgtctgagcccgccatgggccacagcgacctgctggagctggagagcaagatcaatgagatcaacacagagatcaaccagctgattgagaagaagatgatgagaaatgagcccatcgagggcaagctgagcctgtaccggcagcaggccagcatcatcagcaggaagaaggaggccaaggccgaggagctgcaggaggccaaggagaagctggccagcctggagcgggaggcctctgtgaagaggaaccagacccgggagtttgatggaacagaggtgctgaagggagatgagttcaagcgctacgtgaacaagctgcggagcaagagcacagtgttcaagaagaagcaccagatcatcgccgagctgaaggccgagtttggcctgctgcagaggacagaggagctgctgaagcagagacatgagaacatccagcagcagctgcagaccatggaggagaagaagggcatcagcggctacagctacacccaggaggagctggagcgggtgtctgccctgaagtctgaggtggatgagatgaagggccgcaccctggatgacatgtctgagatggtgaagaagctgtacagcctggtgtctgagaagaagagcgccctggccagcgtcatcaaggagctgcggcagctgcggcagaagtaccaggagctgacccaggagtgtgatgagaagaagagccagtatgacagctgtgccgccggcctggagagcaacagaagcaagctggagcaggaggtgcggcggctgcgggaggagtgcctgcaggaggagagccgctaccactacaccaactgcatgatcaagaacctggaggtgcagctgcggcgggccacagatgagatgaaggcctacatcagcagtgaccagcaggagaagaggaaggccatccgggagcagtacaccaagaacacagctgagcaggagaacctgggcaagaagctgcgggagaagcagaaggtgatccgggagagccacggccccaacatgaagcaggccaagatgtggagggacctggagcagctgatggagtgcaagaagcagtgcttcctgaagcagcagagccagaccagcatcggccaggtgatccaggagggcggagaagatagactcatcctgtag

SEQ ID NO: 18329 - DNA, 948 bp, synthetic construct
  source 1..948: mol_type = other DNA; note = Synthetic coding sequence
atggccttccctgagcccaagccccggcccccagagctgccccagaagaggctgaagaccctggactgtggccagggcgctgtgcgggctgtgcgcttcaacgtggatggcaactactgcctgacctgtggcagtgacaagaccctgaagctgtggaaccccctgcggggcaccctgctgcggacctacagcggccacggctatgaggtgctggatgctgctggcagctttgacaacagcagcctgtgcagcggcggcggggacaaggctgtggtgctgtgggatgtggccagcggccaggtggtgaggaagttccggggccatgctgggaaggtgaacacagtgcagttcaatgaggaggccaccgtcatcctgagcggcagcattgacagcagcatccgctgctgggactgccgcagcagaagacctgagcctgtgcagaccctggatgaggccagagatggagtgtcctctgtgaaggtgtctgaccacgagatcctggccggctctgtggatggccgggtgcggcgctatgacctgaggatgggccagctgttcagtgactatgtgggcagccccatcacctgcacctgcttcagcagagatggccagtgcaccctggtgagcagcctggacagcaccctgcggctgctggacaaggacaccggggagctgctgggggagtacaagggccacaagaaccaggagtacaagctggactgctgcctgtctgagcgggacacccacgtggtgtcctgcagtgaagatggcaaggtgttcttctgggacctggtggagggcgccctggccctggccctgcctgtgggcagcggcgtggtgcagagcctggcctaccaccccacagagccctgcctgctgacagccatgggcggctctgtgcagtgctggagggaggaggcctatgaagcagaagatggagctggatag

SEQ ID NO: 18330 - DNA, 1803 bp, synthetic construct
  source 1..1803: mol_type = other DNA; note = Synthetic coding sequence
atggtgctgatcctgggccgccgcctgaaccgggaggacctgggcgtgcgggacagccctgccaccaagaggaaggtgtttgagatggaccccaagagcctgactggacatgagttctttgacttcagcagcggcagcagccatgctgagaacatcctgcagatcttcaatgagttccgggacagccgcctcttcacagatgtgatcatctgtgtggagggcaaggagttcccctgccacagagctgtgctgagcgcctgcagcagctacttccgggccatgttctgcaatgaccaccgggagagccgggagatgctggtggagatcaatggcatcctggccgaggccatggagtgcttcctgcagtatgtgtacaccgggaaggtgaagatcaccacagaaaatgtgcagtacctgtttgagaccagcagcctcttccagatctctgtgctgagagatgcctgtgccaagttcctggaggagcagctggacccctgcaactgcctgggcatccagagatttgctgacacccacagcctgaagaccctcttcaccaagtgcaagaactttgccctgcagacctttgaagatgtgtcccagcacgaggagttcctggagctggacaaggatgagctgattgactacatctgcagtgatgagctggtgattggcaaggaggagatggtgtttgaggccgtgatgcgctgggtgtacagagctgtggacctgcggcggcccctgctgcacgagctgctgacccacgtgcggctgcccctgctgcaccccaactactttgtgcagacagtggaggtggaccagctgatccagaacagccctgagtgctaccagctgctgcacgaggcccggcgctaccacatcctgggcaatgagatgatgagccccaggacccggccccggcgcagcacaggctacagcgaggtgattgtggtggtgggcggctgtgagcgggtgggcggcttcaacctgccctacacagaatgttatgaccctgtgactggagagtggaagagcctggccaagctgcctgagttcaccaagtcagaatatgctgtgtgtgccctgagaaatgacatcctggtgtctgggggccgcatcaacagcagagatgtgtggatctacaacagccagctgaacatctggatccgggtggccagcctgaacaagggccgctggaggcacaagatggctgtgctgctgggcaaggtgtatgtggtgggcggctatgatggccagaaccggctgagctctgtggagtgctatgacagcttcagcaaccgctggacagaggtggcccccctgaaggaggccgtgagcagccctgctgtgaccagctgtgtgggcaagctgtttgtgattggaggcggcccagatgacaacacctgcagcgacaaggtgcagagctatgaccctgagaccaacagctggctgctgcgggccgccatccccatcgccaagcgctgcatcacagctgtgtccctgaacaacctgatctacgtggccggcggcctgaccaaggccatctactgctatgaccctgtggaggactactggatgcacgtgcagaacaccttcagccggcaggagaactgtggcatgtctgtgtgcaatggcaagatctacatcctgggcggccggcgggagaatggagaggccacagacaccatcctgtgctatgaccctgccaccagcatcatcactggagtggccgccatgcccaggcctgtgtcctaccacggctgtgtgaccatccaccgctacaatgagaagtgcttcaagctgtag

SEQ ID NO: 18331 - DNA, 810 bp, synthetic construct
  source 1..810: mol_type = other DNA; note = Synthetic coding sequence
atgaaccaggaggacctggaccctgacagcaccacagatgtgggagatgtgaccaacacagaggaggagctgatcagagaatgtgaggagatgtggaaggacatggaggagtgccagaacaagctgagcctgattggaacagagaccctgacagacagcaatgcccagctgagcctgctgatcatgcaggtgaagtgcctgacagctgagctgagccagtggcagaagaagaccccagagaccatccccctgacagaagatgtgctgatcaccctgggcaaggaggagttccagaagctgcggcaggacctggagatggtgctgagcaccaaggagagcaagaatgagaagctgaaggaggacctggagcgggagcagcgctggctggatgagcagcagcagatcatggagagcctgaatgtgctgcacagcgagctgaagaacaaggtggagaccttcagcgagagccgcatcttcaatgagctgaagaccaagatgctgaacatcaaggagtacaaggagaagctgctgagcaccctgggggagttcctggaggaccacttccccctgcctgacagatctgtgaagaagaagaagaagaacatccaggagagctctgtgaacctgatcaccctgcacgagatgctggagatcctgatcaacagactctttgatgtgccccatgacccctacgtgaagatcagtgacagcttctggccaccctacgtggagctgctgctgagaaatggaattgccctgcggcaccctgaggaccccacccgcatccggctggaggccttccaccagtag

SEQ ID NO: 18332 - DNA, 1041 bp, synthetic construct
  source 1..1041: mol_type = other DNA; note = Synthetic coding sequence
atgtgtgagggccccagccgcatcagcggccccatccccccagaccccaccctgtgcccagacaactaccgccggcccaccagcgcccagggccgcctggagggcaatgccctgaagctggacctgctgaccagtgaccgggccctggacaccacagccccccggggcccctgcatcggccctggagctggggagatcctggagcggggccagaggggcgtgggagatgtgctgctgcagctggagggcatcagcctgggccctggggccagcctgaagaggaaggaccccaaggaccacgagaaggagaacctgcggcgcatccgggagatccagaagcgcttccgggagcaggagaggagccgggagcagggccagccccggcccctgaaggccctgtggaggagccccaagtatgacaaggtggagagccgggtgaaggcccagctgcaggagcccggccctgccagcggcacagaaagtgcccacttcctgcgggcccacagccgctgtggccctggcctgcccccacctcatgtgagcagcccccagcccaccccacctggccctgaggccaaggagcccggcctgggcgtggacttcatccgccacaatgcccgggccgccaagagggccccccggcggcacagctgcagcctgcaggtgctggcccaggtgctggagcagcagaggcaggcccaggagcactacaatgccacccagaagggccacgtgccccactacctgctggagcggcgggacctgtggaggcgggaggccgaggccaggaagcagagccagcctgaccctgccatgcctcctggccacaccaggatgcctgagaaccagaggctggagaccctgaccaagctgctgcagagccagagccagctgctgcgggagctggtgctgctgcctgctggagctgacagcctgcgggcccagagccacagagctgagctggacaggaagctggtgcaggtggaggaggccatcaagatcttcagccggcccaaggtgtttgtgaagatggatgactag

SEQ ID NO: 18333 - DNA, 1824 bp, synthetic construct
  source 1..1824: mol_type = other DNA; note = Synthetic coding sequence
atggccgccaacgtgttccccttcagagatgcccgggccgccccagaccctgtgctggaggccggccctgtggcccacggccccctgcctgtgcccctggtgctggacaatggcagcttccaggtgcgggccggctgggcctgccccggccaggaccccggccctgagccccggctgcagttccgggctgtgtgtgcccggggccggggcggggcccggggggccagcggcccccaggtgggcaatgccctgggcagcctggagcccctgcgctggatgctgcggagcccctttgacagaaatgtgcctgtgaacctggagctgcaggagctgctgctggactacagcttccagcacctgggcgtgagcagccagggctgtgtggaccaccccatcgtgctgacagaagctgtgtgcaaccccctgtacagccggcagatgatgtctgagctgctgtttgagtgctacggcatccccaaggtggcctatggaattgacagcctcttctccttctaccacaacaagcccaagaacagcatgtgcagcggcctcatcatcagcagcggctaccagtgcacccacgtgctgcccatcctggagggccgcctggatgccaagaactgcaagaggatcaacctgggcggcagccaggccgccggctacctgcagaggctgctgcagctgaagtacccaggccacctggccgccatcaccctgagcaggatggaggagatcctgcacgagcacagctacatcgccgaggactatgtggaggagctgcacaagtggcgctgcccagactactatgagaacaacgtgcacaagatgcagctgcccttcagcagcaagctgctgggcagcaccctgaccagcgaggagaagcaggagcggcggcagcagcagctgcggcggctgcaggagctgaatgcccggcggcgggaggagaagctgcagctggaccaggagcggctggaccggctgctgtatgtgcaggagctgctggaggatggccagatggaccagttccacaaggccctgattgagctgaacatggacagccctgaggagctgcagagctacatccagaagctgagcattgctgtggagcaggccaagcagaagatcctgcaggccgaggtgaacctggaggtggatgtggtggacagcaagccagagaccccagacctggagcagctggagcccagcctggaggatgtggagagcatgaatgactttgaccccctcttcagcgaggagaccccaggagtggagaagcctgtgaccaccgtgcagcccgtcttcaacctggccgcctaccaccagctgtttgtgggcacagagcgcatccgggcccctgagatcatcttccagcccagcctgattggagaggagcaggccggcattgctgagaccctgcagtacatcctggaccgctaccccaaggacatccaggagatgctggtgcagaatgtgttcctgaccggcggcaacaccatgtacccaggcatgaaggccaggatggagaaggagctgctggagatgaggcccttccgcagcagcttccaggtgcagctggccagcaaccctgtgctggatgcctggtatggagcccgggactgggccctgaaccacctggatgacaatgaggtgtggatcaccaggaaggagtatgaggagaagggcggggagtacctgaaggagcactgtgccagcaacatctacgtgcccatccggctgcccaagcaggccagccgcagcagtgatgcccaggccagcagcaagggcagcgctgctgggggcggcggggccggggagcaggcctag

SEQ ID NO: 18334 - DNA, 1383 bp, synthetic construct
  source 1..1383: mol_type = other DNA; note = Synthetic coding sequence
atggccagccgggaggaggtgctggccctgcaggccgaggtggcccagcgggaggaggagctgaacagcctgaagcagaagctggccagcgccctgctggccgagcaggagccccagcctgagcggctggtgcctgtgagccccctgccccccaaggccgccctgagcagagatgagatcctgcgctacagccggcagctggtgctgcctgagctgggcgtgcacggccagctgcggctgggcacagcctgtgtgctgattgtgggctgcggcggcctgggctgccccctggcccagtacctggccgccgccggcgtgggccgcctgggcctggtggactatgatgtggtggagatgagcaacctggcccggcaggtgctgcacggggaggccctggccggccaggccaaggccttctctgctgctgccagcctgcggcggctgaacagcgctgtggagtgtgtgccctacacccaggccctgaccccagccacagccctggacctggtgagaagatatgatgtggtggccgactgcagcgacaacgtgcccacccgctacctggtgaatgatgcctgtgtgctggccggccggcccctggtgtctgccagcgccctgcgctttgagggccagatcaccgtgtaccactatgatggcggcccctgctaccgctgcatcttcccccagcccccacctgctgagaccgtgaccaactgtgctgatggaggagtgctgggcgtggtgactggagtgctgggctgcctgcaggccctggaggtgctgaagattgctgctggcctgggccccagctacagcggcagcctgctgctgtttgatgccctgcggggccacttccgcagcatccggctgcggagccggcggctggactgtgccgcctgtggggagcggcccaccgtgacagacctgctggactatgaggccttctgtggcagcagcgccacagacaagtgccgcagcctgcagctgctgagccctgaggagcgggtgtctgtgacagactacaagaggctgctggacagcggggccttccacctgctgctggatgtgcggccccaggtggaggtggacatctgccgcctgccccacgccctgcacatccccctgaagcacctggagaggagagatgctgagagcctgaagctgctgaaggaggccatctgggaggagaagcagggcacccaggagggcgctgctgtgcccatctacgtgatctgcaagctgggcaatgacagccagaaggctgtgaagatcctgcagagcctgtctgctgcccaggagctggaccccctgactgtgagagatgtggtgggcggcctgatggcctgggccgccaagattgatggcaccttcccccagtactag

SEQ ID NO: 18335 - DNA, 1041 bp, synthetic construct
  source 1..1041: mol_type = other DNA; note = Synthetic coding sequence
atggagagcgtgtcctgcagcgctgctgctgtgaggactggagacatggagagccagagggacctgagcctggtgcctgagcggctgcagaggcgggagcaggagcggcagctggaggtggagaggaggaagcagaagaggcagaaccaggaggtggagaaggagaacagccacttctttgtggccacctttgtgcgggagagagctgctgtggaggagctgctggagcgggcagagagcgtggagcggctggaggaggccgccagccggctgcagggcctgcagaagctgatcaatgattctgtgttcttcctggccgcctatgacctgcggcagggccaggaggccctggcccggctgcaggccgccctggccgagcggcggcggggcctgcagcccaagaagagatttgccttcaagacccggggcaaggatgctgccagcagcaccaaggtggatgctgcccctggcatccccccagctgtggagagcatccaggacagccccctgcccaagaaggccgagggggacctgggccccagctgggtgtgtggcttcagcaacctggagagccaggtgctggagaagagggccagcgagctgcaccagagagatgtgctgctgacagagctgagcaactgcaccgtgcggctgtatggcaaccccaacaccctgcggctgaccaaggcccacagctgcaagctgctgtgtggccctgtgtccacctctgtgttcctggaggactgcagcgactgtgtgctggccgtggcctgccagcagctgcgcatccacagcaccaaggacacccgcatcttcctgcaggtgaccagccgggccatcgtggaggactgcagcggcatccagtttgccccctacacctggagctacccagaaattgacaaggactttgagagcagcggcctggacaggagcaagaacaactggaatgatgtggatgacttcaactggctggcccgggacatggccagccccaactggagcatcctgcctgaggaggagaggaacatccagtgggactag

SEQ ID NO: 18336 - DNA, 747 bp, synthetic construct
  source 1..747: mol_type = other DNA; note = Synthetic coding sequence
atgacccccaagggccctgccatgtgcagcatgcccctgaccagcgctgactgcttcagcaatgacatccacaagctggacaccagcaccatgacctggaccctcatctgcaccaagggcagccctgcccgctggagggacttccacagcgccaccatgctgggcagccacatgtatgtgtttggaggccgggctgaccgcttcggccccttccacagcaacaatgagatctactgcaaccgcatccgggtgtttgacaccaggacagaggcctggctggactgcccccccacccctgtgctgcctgagggcagaagaagccacagcgccttcggctacaacggggagctgtacatctttggaggctacaatgcccggctgaacagacacttccatgacctgtggaagttcaaccctgtgtccttcacctggaagaagattgagcccaagggcaagggcccctgcccccggcggcggcagtgctgctgcatcgtgggggacaagatcgtgctgtttggaggcaccagccccagccctgaggagggcctgggagatgaatttgacctgattgaccacagcgacctgcacatcctggacttcagccccagcctgaagaccctgtgcaagctggccgtcatccagtacaacctggaccagagctgcctgccccatgacatccgctgggagctgaatgccatgaccaccaacagcaacatcagccggcccatcgtgagcagccatggatag

SEQ ID NO: 18337 - DNA, 1401 bp, synthetic construct
  source 1..1401: mol_type = other DNA; note = Synthetic coding sequence
atggagtatgagagctactactttgtgaagttccagaagtaccccaagatcgtgaagaagagcagtgacacagctgagaacaacctgccccagaggagccggggcaagaccaggaggatgatgaatgacagctgccagaacctgcccaagatcaaccagcagaggcccaggagcaagaccacagctgggaagacaggagacaccaagagcctgaacaaggagcaccccaaccaggaggtggtggacaacacccggctggagagcgccaactttggcctgcacatcagccgcatcaggaaggacagcggggaggagaatgcccacccccggcggggccagatcatcgacttccagggcctgctgacagatgccatcaagggggccaccagcgagctggccctgaacacctttgaccacaacccagaccccagcgagcggctgctgaagcccctgagcgccttcatcggcatgaacagcgagatgagggagctggccgctgtggtgtcccgggacatctacctgcacaaccccaacatcaagtggaatgacatcatcggcctggatgctgccaagcagctggtgaaggaggccgtggtgtaccccatccgctacccccagctgttcaccggcatcctgagcccctggaagggcctgctgctgtatggccccccaggcaccgggaagaccctgctggccaaggctgtggccacagagtgcaagaccaccttcttcaacatcagcgccagcaccatcgtgtccaagtggaggggggacagcgagaagctggtgcgggtgctgtttgagctggcccgctaccacgcccccagcaccatcttcctggatgagctggagagcgtgatgagccagaggggcacagccagcggcggggagcacgagggcagcctgaggatgaagacagagctgctggtgcagatggatggcctggcccggtctgaggacctggtgtttgtgctggccgccagcaacctgccctgggagctggactgtgccatgctgcggcggctggagaagaggatcctggtggacctgcccagccgggaggcccggcaggccatgatctaccactggctgccccctgtgtccaagagccgggccctggagctgcacacagagctggagtacagcgtgctgagccaggagacagagggctacagcggcagtgacatcaagctggtgtgccgggaggccgccatgaggcctgtgaggaagatctttgatgccctggagaaccaccagagcgagagcagtgacctgccccgcatccagctggacatcgtgaccacagctgacttcctggatgtgctgacccacaccaagcccagcgccaagaacctggcccagcgctacagcgactggcagcgggagtttgaatctgtgtag

SEQ ID NO: 18338 - DNA, 6402 bp, synthetic construct
  source 1..6402: mol_type = other DNA; note = Synthetic coding sequence
atggatgaggtggagcaggaccagcacgaggcccggctgaaggagctgtttgacagctttgacaccactggaacaggcagcctgggccaggaggagctgacagacctgtgccacatgctgagcctggaggaggtggcccctgtgctgcagcagaccctgctgcaggacaacctgctgggccgggtgcactttgaccagttcaaggaggccctgatcctgatcctgagcaggaccctgagcaatgaggagcacttccaggagccagactgcagcctggaggcccagcccaagtatgtgcggggcggcaagagatatggaagaagaagcctgcctgagttccaggagagcgtggaggagttccctgaggtgaccgtcatcgagcccctggatgaggaggcccggcccagccacatcccagctggggactgcagcgagcactggaagacccagaggtctgaggagtatgaagctgagggccagctgcgcttctggaacccagatgacctgaatgccagccagagcggcagcagccccccccaggactggattgaggagaagctgcaggaggtgtgtgaggacctgggcatcaccagagatggccacctgaacaggaagaagctggtgtccatctgtgagcagtatggcctgcagaatgtggatggagagatgctggaggaggtgttccacaacctggaccctgatggcaccatgtctgtggaggacttcttctacggcctcttcaagaatggcaagagcctgacccccagcgccagcaccccctaccggcagctgaagaggcacctgtccatgcagagctttgatgagagcggccgccgcaccaccaccagcagcgccatgaccagcaccatcggcttccgggtcttcagctgcctggatgatggcatgggccacgcctctgtggagcgcatcctggacacctggcaggaggagggcatcgagaacagccaggagatcctgaaggccctggacttcagcctggatggcaacatcaacctgacagagctgaccctggccctggagaatgagctgctggtgaccaagaacagcatccaccaggccgccctggccagcttcaaggccgagatccgccacctgctggagcgggtggaccaggtggtgcgggagaaggagaagctgcggagtgacctggacaaggccgagaagctgaagagcctgatggccagcgaggtggatgaccaccacgccgccattgaaagaagaaatgagtacaacctgaggaagctggatgaggagtacaaggagagaattgctgccctgaagaatgagctgaggaaggagcgggagcagatcctgcagcaggccggcaagcagaggctggagctggagcaggagattgagaaggccaagacagaggagaactacatccgggaccggctggccctgagcctgaaggagaacagccggctggagaatgagctgctggagaatgctgagaagctggccgagtatgagaacctgaccaacaagctgcagaggaacctggagaatgtgctggccgagaagtttggagacctggaccccagcagcgctgagttcttcctgcaggaggagcggctgacccagatgagaaatgaatatgaaaggcagtgccgggtgctgcaggaccaggtggatgagctgcagagcgagctggaggagtaccgggcccagggccgggtgctgcggctgcccctgaagaacagccccagcgaggaggtggaggccaacagcggcggcatcgagcctgagcacggcctgggcagcgaggagtgcaaccccctgaacatgagcattgaagctgagctggtgattgagcagatgaaggagcagcaccaccgggacatctgctgcctgcggctggagctggaggacaaggtgcgccactatgagaagcagctggatgaaacagtggtgtcctgcaagaaggcccaggagaacatgaagcagagacatgaaaatgagacccacaccctggagaagcagatcagtgacctgaagaatgaaattgctgagctgcagggccaggccgctgtgctgaaggaggcccaccacgaggccacctgcagacatgaggaggagaagaagcagctgcaggtgaagctggaggaggagaagacccacctgcaggagaagctgcggctgcagcacgagatggagctgaaggcccggctgacccaggcccaggccagctttgagcgggagcgggagggcctgcagagcagcgcctggacagaggagaaggtgcggggcctgacccaggagctggagcagttccaccaggagcagctgaccagcctggtggagaagcacaccctggagaaggaggagctgaggaaggagctgctggagaagcaccagcgggagctgcaggagggccgggagaagatggagacagagtgcaacagaaggaccagccagatcgaggcccagttccagagcgactgccagaaggtgacagagcgctgtgagagcgccctgcagagcctggagggccgctaccggcaggagctgaaggacctgcaggagcagcagcgggaggagaagagccagtgggagtttgagaaggatgagctgacccaggagtgtgccgaggcccaggagctgctgaaggagaccctgaagcgggagaagaccaccagcctggtgctgacccaggagcgggagatgctggagaagacctacaaggagcacctgaacagcatggtggtggagcggcagcagctgctgcaggacctggaggacctgagaaatgtgtctgagacccagcagagcctgctgagtgaccagatcctggagctgaagagcagccacaagcgggagctgcgggagcgggaggaggtgctgtgccaggccggggccagcgagcagctggccagccagaggctggagcggctggagatggagcatgaccaggagcggcaggagatgatgagcaagctgctggccatggagaacatccacaaggccacctgtgaaacagctgaccgggagcgggcagagatgagcacagagatcagccggctgcagagcaagatcaaggagatgcagcaggccaccagccccctgtccatgctgcagagcggctgccaggtgattggagaggaggaggtggagggagatggagccctgagcctgctgcagcagggcgagcagctgctggaggagaatggagatgtgctgctgagcctgcagagggcccacgagcaggccgtgaaggaaaatgtgaagatggccacagagatcagccggctgcagcagaggctgcagaagctggagcccggcctggtgatgagcagctgcctggatgagcccgccacagagttcttcggcaacacagctgagcagacagagcagttcctgcagcagaacagaaccaagcaggtggagggcgtgacccggcggcacgtgctgagtgacctggaggatgatgaggtgcgggacctgggcagcacaggcaccagctctgtgcagaggcaggaggtgaagattgaggagagcgaggcctctgtggagggcttcagcgagctggagaacagcgaggagaccaggacagagagctgggagctgaagaaccagatcagccagctgcaggagcagctgatgatgctgtgtgccgactgtgaccgggccagcgagaagaagcaggacctgctgtttgatgtgtctgtgctgaagaagaagctgaagatgctggagcgcatccctgaggccagccccaagtacaagctgctgtatgaagatgtgtcccgggagaatgactgcctgcaggaggagctgaggatgatggagaccaggtatgatgaggccctggagaacaacaaggagctgacagctgaggtgttccggctgcaggatgagctgaagaagatggaggaggtgacagagaccttcctgagcctggagaagagctatgatgaggtgaagattgaaaatgaaggcctgaatgtgctggtgctgcggctgcagggcaagattgagaagctgcaggagagcgtggtgcagagatgtgactgctgcctgtgggaggccagcctggagaacctggagattgaaccagatggcaacatcctgcagctgaaccagaccctggaggagtgtgtgccccgggtgcgctctgtgcaccacgtgattgaggagtgcaagcaggagaaccagtacctggagggcaacacccagctgctggagaaggtgaaggcccatgaaattgcctggctgcacggcaccatccagacccaccaggagcggccccgggtgcagaaccaggtgatcctggaggagaacaccaccctgctgggcttccaggacaagcacttccagcaccaggccaccatcgccgagctggagctggagaagaccaagctgcaggagctgaccaggaagctgaaggagcgggtgaccatcctggtgaagcagaaggatgtgctgagccacggggagaaggaggaggagctgaaggccatgatgcatgacctgcagatcacctgcagcgagatgcagcagaaggtggagctgctgcgctatgagagcgagaagctgcagcaggagaacagcatcctgagaaatgagatcaccaccctgaatgaggaggacagcatcagcaacctgaagctgggcaccctgaatggcagccaggaggagatgtggcagaagacagagaccgtgaagcaggagaatgctgctgtgcagaagatggtggagaacctgaagaagcagatcagcgagctgaagatcaagaaccagcagctggacctggagaacacagagctgagccagaagaacagccagaaccaggagaagctgcaggagctgaaccagaggctgacagagatgctgtgccagaaggagaaggagcccggcaacagcgccctggaggagcgggagcaggagaagttcaacctgaaggaggagctggagcgctgcaaggtgcagagcagcaccctggtgagcagcctggaggccgagctgtctgaggtgaagatccagacccacatcgtgcagcaggagaaccacctgctgaaggatgagctggagaagatgaagcagctgcaccgctgcccagacctgagtgacttccagcagaagatcagctctgtgctgagctacaatgagaagctgctgaaggagaaggaggccctgtctgaggagctgaacagctgtgtggacaagctggccaagagcagcctgctggagcaccgcatcgccaccatgaagcaggagcagaagtcctgggagcaccagagcgccagcctgaagagccagctggtggccagccaggagaaggtgcagaacctggaggacacagtgcagaatgtgaacctgcagatgagcaggatgaagagtgacctgcgggtgacccagcaggagaaggaggccctgaagcaggaggtgatgagcctgcacaagcagctgcagaatgccggcggcaagtcctgggcccctgagatcgccacccaccccagcggcctgcacaaccagcagaagaggctgtcctgggacaagctggaccacctgatgaatgaggagcagcagctgctgtggcaggagaatgaaaggctgcagaccatggtgcagaacaccaaggccgagctgacccacagccgggagaaggtgcggcagctggagagcaacctgctgcccaagcaccagaagcacctgaaccccagcggcaccatgaaccccacagagcaggagaagctgagcctgaagagagaatgtgaccagttccagaaggagcagagccctgccaacaggaaggtgtcccagatgaacagcctggagcaggagctggagaccatccacctggagaatgaaggcctgaagaagaagcaggtgaagctggatgagcagctgatggagatgcagcacctgcggagcacagccacccccagccccagcccccacgcctgggacctgcagctgctgcagcagcaggcctgccccatggtgccccgggagcagttcctgcagctgcagaggcagctgctgcaggccgagcgcatcaaccagcacctgcaggaggagctggagaacagaaccagcgagaccaacaccccccagggcaaccaggagcagctggtgacagtgatggaggagaggatgattgaggtggagcagaagctgaagctggtgaagaggctgctgcaggagaaggtgaaccagctgaaggagcagctgtgcaagaacaccaaggcagatgccatggtgaaggacctgtatgtggagaatgcccagctgctgaaggccctggaggtgacagagcagaggcagaagacagctgagaagaagaactacctgctggaggagaagatcgccagcctgagcaacatcgtgaggaacctgaccccagcccccctgaccagcaccccacccctgcggagctag

SEQ ID NO: 18339 - DNA, 1713 bp, synthetic construct
  source 1..1713: mol_type = other DNA; note = Synthetic coding sequence
atggccggcggggcccgggaggtgctgaccctgcagctgggccactttgctggctttgtgggcgcccactggtggaaccagcaggatgctgccctgggccgggccacagacagcaaggagcccccaggagagctgtgcccagatgtgctgtacagaactggaagaaccctgcacggccaggagacctacacccccaggctcatcctgatggacctgaagggcagcctgagcagcctgaaggaggagggcggcctgtacagagacaagcagctggatgctgccatcgcctggcagggcaagctgaccacccacaaggaggagctgtaccccaagaacccctacctgcaggacttcctgtctgctgagggcgtgctgagcagtgatggagtgtggagggtgaagagcatccccaacgggaagggcagcagccccctgcccacagccaccacccccaagcccctcatccccacagaggccagcatccgggtgtggagcgacttcctgcgggtgcacctgcaccccaggagcatctgcatgatccagaagtacaaccatgatggagaggccggccgcctggaggccttcggccagggcgagagcgtgctgaaggagcccaagtaccaggaggagctggaggaccggctgcacttctacgtggaggagtgtgactacctgcagggcttccagatcctgtgtgacctgcatgatggcttctctggagtgggcgccaaggctgctgagctgctgcaggatgagtacagcggccggggcatcatcacctggggcctgctgcccggcccctaccacagaggagaggcccagaggaacatctaccgcctgctgaacacagccttcggcctggtgcacctgacagcccacagcagcctggtgtgccccctgagcctgggcggcagcctgggcctgcggcctgagccccctgtgtccttcccctacctgcactatgatgccaccctgcccttccactgcagcgccatcctggccacagccctggacacagtgacagtgccctaccgcctgtgcagcagccctgtgtccatggtgcacctggccgacatgctgtccttctgtgggaagaaggtggtgacagctggggccatcatccccttccccctggcccctggccagagcctgcctgacagcctgatgcagtttggaggagccaccccctggacccccctgagcgcctgtggggagcccagcggcacccgctgctttgcccagagcgtggtgctgcggggcatcgaccgggcctgccacaccagccagctgaccccaggcaccccaccacccagcgccctgcacgcctgcaccactggagaggagatcctggcccagtacctgcagcagcagcagcccggggtgatgagcagcagccacctgctgctgaccccctgccgggtggccccaccctacccccacctgttcagcagctgcagccccccaggcatggtgctggatggcagccccaagggagctgctgtggagagcatccctgtgtttggagccctgtgcagcagcagcagcctgcaccagaccctggaggccctggcccgggacctgaccaagctggacctgcggcgctgggccagcttcatggatgctggggtggagcatgatgatgtggccgagctgctgcaggagctgcagagcctggcccagtgctaccagggcggggacagcctggtggactag

SEQ ID NO: 18340 - DNA, 1791 bp, synthetic construct
  source 1..1791: mol_type = other DNA; note = Synthetic coding sequence
atgaacagaacctggccccggcgcatctggggcagcagccaggatgaagctgagctgatccgggaggacatccagggcgccctgcacaactacagaagtggccgcggggagcggcgggctgctgccctgcgggccacccaggaggagctgcagagggacaggagccctgctgctgagaccccacccctgcagaggcggcccagcgtgcgggctgtgatcagcacagtggagcggggggccggccggggccggccccaggccaagcccatccctgaggccgaggaggcccagaggcctgagcctgtgggcaccagcagcaatgctgacagcgccagcccagacctgggcccccggggccctgacctggccgtgctgcaggccgagcgggaggtggacatcctgaaccacgtgtttgatgatgtggagagctttgtgtcccggctgcagaagtctgctgaggccgcccgggtgctggagcaccgggagcggggcagaagaagcagaagaagagctgctggggagggcctgctgaccctgcgggccaagcccccatctgaggccgagtacacagatgtgctgcagaagatcaagtatgccttcagcctgctggcccggctgcggggcaacattgctgaccccagcagccctgagctgctgcacttcctgtttggccccctgcagatgattgtgaacaccagcggcggccctgagtttgccagctctgtgagaagaccccacctgaccagtgatgctgtggccctgctgcgggacaacgtgaccccaagagaaaatgagctgtggaccagcctgggggacagctggaccaggcctggcctggagctgagccctgaggagggccccccctacagacctgagttcttcagcggctgggagccccctgtgacagacccccagagccgggcctgggaggaccctgtggagaagcagctgcagcatgaaagaagaagacggcagcagagcgccccccaggtggccgtgaatggccaccgggacctggagcctgagagcgagccccagctggagagcgagacagctgggaagtgggtgctgtgcaactatgacttccaggccaggaacagcagcgagctgtctgtgaagcagagagatgtgctggaggtgctggatgacagcaggaagtggtggaaggtgcgggaccctgctggccaggagggctacgtgccctacaacatcctgaccccctacccaggcccccggctgcaccacagccagagccctgcccggagcctgaacagcaccccacctcctcctccagccccagccccagcccctcctccagccctggcccggccccgctgggaccggccccgctgggacagctgtgacagcctgaatggcctggaccccagcgagaaggagaagttcagccagatgctgattgtgaatgaggagctgcaggcccggctggcccagggccgcagcggccccagcagagctgtgcccggcccccgggcccctgagccccagctgagccctggcagtgatgccagcgaggtgcgggcctggctgcaggccaagggcttcagcagcggcaccgtggatgccctgggcgtgctgactggagcccagctgttcagcctgcagaaggaggagctgcgggctgtgtccccagaggagggcgcccgggtgtacagccaggtgacagtgcagaggagcctgctggaggacaaggagaaggtgtctgagctggaggccgtgatggagaagcagaagaagaaggtggagggggaggtggagatggaggtgatctag

SEQ ID NO: 18341 - DNA, 1950 bp, synthetic construct
  source 1..1950: mol_type = other DNA; note = Synthetic coding sequence
atgagcagctttggagctgggaagaccaaggaggtgatcttctctgtggaggatggctctgtgaagatgttcctgcggggccggcctgtgcccatgatgatcccagatgagctggcccccacctacagcctggacaccaggtctgagctgcccagctgccgcctgaagctggagtgggtgtatggctaccggggccgggactgccgggccaacctgtacctgctgcccactggagagatcgtgtactttgtggcctctgtggccgtgctgtacagcgtggaggagcagaggcagaggcactacctgggccacaatgatgacatcaagtgcctggccatccacccagacatggtgaccatcgccaccggccaggtggccggcaccaccaaggagggcaagcccctgcccccccacgtgcgcatctgggacagcgtgtccctgagcaccctgcacgtgctgggcctgggcgtgtttgacagagctgtgtgctgcgtgggcttcagcaagagcaatggaggcaacctgctgtgtgctgtggatgagagcaatgaccacatgctgtctgtgtgggactgggccaaggagaccaaggtggtggatgtgaagtgcagcaatgaagctgtgctggtggccaccttccaccccacagaccccaccgtgctgatcacctgtgggaagagccacatctacttctggaccctggagggcggcagcctgagcaagaggcagggcctgtttgagaagcatgagaagcccaagtatgtgctgtgtgtgaccttcctggagggcggagatgtggtgactggagacagcggcggcaacctgtatgtgtggggcaagggcggcaaccgcatcacccaggccgtgctgggcgcccatgatggcggcgtgtttggcctgtgtgccctgagagatggcaccctggtgtctgggggcggccgggaccggcgggtggtgctgtggggcagtgactacagcaagctgcaggaggtggaggtgcctgaagattttggacctgtgaggacagtggccgagggccatggagacaccctgtatgtgggcaccaccagaaattccatcctgcagggctctgtgcacacaggcttcagcctgctggtgcagggccacgtggaggagctgtggggcctggccacccaccccagccgggcccagtttgtgacctgtggccaggacaagctggtgcacctgtggagcagtgacagccaccagcccctgtggagccgcatcatcgaggaccctgcccggtctgctggcttccaccccagcggctctgtgctggccgtgggcaccgtgacaggccgctggctgctgctggacacagagacccatgacctggtggccatccacacagatggaaatgagcagatctctgtggtgtccttctccccagatggagcctacctggccgtgggcagccatgacaacctggtgtatgtgtacacagtggaccagggcggcaggaaggtgtcccggctgggcaaatgttctggccacagcagcttcatcacccacctggactgggcccaggacagcagctgctttgtgaccaacagcggggactatgagatcctgtactgggaccctgccacctgcaagcagatcaccagcgcagatgctgtgaggaacatggagtgggccacagccacctgtgtgctgggctttggagtgtttggcatctggagcgagggcgcagatggaacagacatcaatgctgtggcccggagccatgatggcaagctgctggccagcgcagatgactttgggaaggtgcacctgttctcctacccctgctgccagccccgggccctgagccacaagtatggaggccacagcagccacgtgaccaacgtggccttcctgtgggatgacagcatggccctgaccaccggcggcaaggacacctctgtgctgcagtggagggtggtgtag

SEQ ID NO: 18342 - DNA, 792 bp, synthetic construct
  source 1..792: mol_type = other DNA; note = Synthetic coding sequence
atggccggcctggaggtgctgtttgccagcgctgccccagccatcacctgccggcaggatgccctggtgtgcttcctgcactgggaggtggtgacccacggctacttcggcctgggcgtgggggaccagcccggccccaatgacaagaagtctgagctgctgcctgctggctggaacaacaacaaggacctgtatgtgctgcgctatgagtacaaggatggcagcaggaagctgctggtgaaggccatcaccgtggagagctccatgatcctgaatgtgctggagtatggcagccagcaggtggccgacctgaccctgaacctggatgactacattgatgctgagcacctgggggacttccacaggacctacaagaacagcgaggagctgcggagccgcatcgtgtctggcatcatcacccccatccacgagcagtgggagaaggccaacgtgagcagcccccaccgggagttccccccagccacagcccgggaggtggaccccctgcgcatccccccccaccacccccacaccagccggcagcccccctggtgtgaccccctgggcccctttgtggtgggcggggaggacctggaccccttcggcccccggcggggcggcatgattgtggaccccctgcggagcggcttcccccgggccctgattgaccccagcagcggcctgcccaaccggctgcccccaggagctgtgcccccaggggccaggtttgaccccttcggccccatcggcaccagccccccaggccccaggccagaccggcggggccagtag

SEQ ID NO: 18343 - DNA, 273 bp, synthetic construct
  source 1..273: mol_type = other DNA; note = Synthetic coding sequence
atggacaacatgagcccccggctgcgggccttcctgtctgagcccatcggggagaaggatgtgtgctgggtggatggcatcagccatgagctggccatcaacctggtgaccaagggcatcaacaaggcctacatcctgctgggccagttcctgctgatgcacaagaatgaggccgagttccagcgctggctgatctgctgcttcggggccacagaatgtgaggcccagcagaccagccactgcctgaaggagtggtgtgcctgcttcctgtag

SEQ ID NO: 18344 - DNA, 888 bp, synthetic construct
  source 1..888: mol_type = other DNA; note = Synthetic coding sequence
atgcctgtgcacaccctgagccctggggcccccagcgccccagccctgccctgccgcctgcggaccagggtgcccggctacctgctgcggggccctgcagatggaggagccaggaagcccagcgctgtggagcggctggaggccgacaaggccaagtatgtgaagagcctgcacgtggccaacacccggcaggagcctgtgcagcccctgctgagcaagcagcccctcttcagccctgagaccaggagaacagtgctgacccccagccggcgggccctgcccggcccctgccggcggccccagctggacctggacatcctgagcagcctgattgacctgtgtgacagccctgtgtccccagctgaggccagcaggaccccaggccgggcagagggcgccggccggcccccaccagccaccccaccccggcccccacccagcaccagcgctgtgcggcgggtggatgtgcggcccctgcctgccagccctgcccggccctgccccagccctggccctgctgctgccagcagccctgcccggcccccaggcctgcagaggagcaagagtgacctgtctgagcgcttcagcagagctgctgctgacctggagcgcttcttcaacttctgtggcctggaccctgaggaggcccggggcctgggcgtggcccacctggcccgggccagcagtgacatcgtgtccctggccggccccagcgctggccctggcagcagcgagggcggctgcagccgccgcagctctgtgacagtggaggagcgggcccgggagcgggtgccctacggcgtgtctgtggtggagagaaatgcccgggtcatcaagtggctgtatggcctgcggcaggcccgggagagccctgctgctgagggctag

SEQ ID NO: 18345 - DNA, 582 bp, synthetic construct
  source 1..582: mol_type = other DNA; note = Synthetic coding sequence
atgcccaccaccagcaggcctgccctggatgtgaagggcggcaccagccctgccaaggaggatgccaaccaggagatgagctctgtggcctacagcaacctggccgtgaaggacaggaaggctgtggccatcctgcactacccaggagtggccagcaatggcaccaaggccagcggggcccccaccagcagcagcggcagccccatcggcagccccaccaccaccccacccaccaagccacccagcttcaacctgcacccagccccccacctgctggcctccatgcacctgcagaagctgaacagccagtaccagggcatggctgctgccaccccaggccagcctggagaggccggccccctgcagaactgggactttggagcccaggccggcggcgctgagagcctgagccccagcgctggggcccagagccctgccatcatcgacagcgaccctgtggatgaggaggtgctgatgagcctggtggtggagctgggcctggaccgggccaatgagctgcctgagctgtggctgggccagaatgaatttgacttcaccgctgacttccccagcagctgctag

SEQ ID NO: 18346 - DNA, 1077 bp, synthetic construct
  source 1..1077: mol_type = other DNA; note = Synthetic coding sequence
atggctgctgtgctgaagcctgtgctgctgggcctgagagatgcccctgtgcacggcagccccaccggccctggggcctggacagccagcaagctgggcggcatcccagatgccctgcccaccgtggccgcccccaggcctgtgtgccagagatgtggccagcccctggccctggtggtgcaggtgtactgccccctggagggcagccccttccaccggctgctgcacgtgtttgcctgtgcctgccccggctgcagcactggaggagcccgctcctggaaggtgttccgcagccagtgcctgcaggtgcctgagcgggaggcccaggatgcccagaagcagggcaacagcctggccgctgaggactggtgtgagggcgcagatgactggggcagtgacacagaggagggccccagcccccagttcaccctggactttggaaatgatgccagcagcgccaaggatgtggactggacagcccggctgcaggacctgcggctgcaggatgctgtgctgggcgccgcccaccctgtgcccccaggcctgcccctcttcctgccctactacatctgtgtggctgatgaagatgactacagagactttgtgaacctggaccacgcccacagcctgctgcgggactaccagcagcgggagggcatcgccatggaccagctgctgagccagagcctgcccaatgatggagatgagaagtatgagaagaccatcatcaagagcggggaccagaccttctacaagttcatgaagagaattgctgcctgccaggagcagatcctgcgctacagctggagcggggagcccctcttcctgacctgccccaccagcgaggtgacagagctgcctgcctgcagccagtgtggcggccagaggatctttgagttccagctgatgcctgccctggtgtccatgctgaagagcgccaacctgggcctgtctgtggagtttggcaccatcctggtgtacacctgtgagaagagctgctggccacccaaccaccagacccccatggaggagttctgcatcatccaggaggaccctgatgagctgctcttcaagtag

SEQ ID NO: 18347 - DNA, 1779 bp, synthetic construct
  source 1..1779: mol_type = other DNA; note = Synthetic coding sequence
atggcctctgtggtggtgaagaccatctggcagagcaaggagatccacgaggccggggacacccccactggagtggagagctgcagccagctggtgcctgaggcccccaggagagtgaccagccgggccaagggcatccccaagaagaagaaggctgtgtccttccacggcgtggagccccagatgagccaccagcccatgcactggtgcctgaacctgaagaggagcagcgcctgcaccaacgtgtccctgctgaacctggccgccatggagcccacagacagcactggaacagacagcacagtggaggacctgagcggccagctgaccctggccggccccccagccagccccaccctgccctgggaccctgatgatgctgacatcacagagatcctgagcggcgtgaacagcggcctggtgcgggccaaggacagcatcaccagcctgaaggagaagaccaacagagtgaaccagcacgtgcagagcctgcagagtgaatgttctgtgctgtctgagaacctggagcggcggcggcaggaggccgaggagctggagggctactgcatccagctgaaggagaactgctggaaggtgaccaggtctgtggaggatgctgagatcaagaccaacgtgctgaagcagaacagcgccctgctggaggagaagctgcgctacctgcagcagcagctgcaggatgagaccccccggcggcaggaggccgagctgcaggagcctgaggagaagcaggagcctgaggagaagcaggagcctgaggagaagcagaagccagaggccggcctgtcctggaacagcctgggccctgctgccaccagccagggctgccccggccccccaggcagcccagacaagcccagccggccccacggcctggtgcctgctggctggggcatgggccccagggctggggagggcccctacgtgtctgagcaggagctgcagaagctgttcaccggcatcgaggagctgcggcgggaggtgagcagcctgacagcccgctggcaccaggaggagggcgctgtgcaggaggccctgcggctgctgggcggcctgggcggccgggtggatggcttcctgggccagtgggagcgggcccagcgggagcaggcccagacagcccgggacctgcaggagctgcggggccgggcagatgagctgtgcaccatggtggagaggtctgctgtgtctgtggccagcctgcggtctgagctggagggcctgggccccctgaagcccatcctggaggagtttggccggcagttccagaacagccggcggggccctgacctgtccatgaacctggacaggagccaccagggcaactgtgcccgctgtgccagccagggcagccagctgagcacagagagcctgcagcagctgctggaccgggccctgaccagcctggtggatgaggtgaagcagaggggcctgaccccagcctgccccagctgccagaggctgcacaagaagatcctggagctggagcggcaggccctggccaagcacgtgcgggcagaggccctgagcagcaccctgcggctggcccaggatgaggccctgcgggccaagaacctgctgctgacagacaagatgaagccagaggagaagatggccaccctggaccacctgcacctgaagatgtgcagcctgcatgaccacctgagcaacctgcccctggagggcagcacaggcaccatgggcggcggcagcagcgctggcaccccacccaagcagggcggcagcgcccctgagcagtag

SEQ ID NO: 18348 - DNA, 2541 bp, synthetic construct
  source 1..2541: mol_type = other DNA; note = Synthetic coding sequence
atgagcagcagccactttgccagccgccacaggaaggacatcagcacagagatgatccgcaccaagatcgcccacaggaagagcctgagccagaaggaaaatagacacaaggagtatgaaagaaacagacacttcggcctgaaggatgtgaacatccccaccctggagggccgcatcctggtggagctggatgagaccagccagggcctggtgcctgagaagaccaacgtgaagccccgggccatgaagaccatcctgggggaccagaggaagcagatgctgcagaagtacaaggaggagaagcagctgcagaagctgaaggagcagcgggagaaggccaagaggggcatcttcaaggtgggccgctacagaccagacatgccctgcttcctgctgagcaaccagaatgctgtgaaggccgagcccaagaaggccatccccagctctgtgcgcatcaccaggagcaaggccaaggaccagatggagcagaccaagattgacaatgaaagtgatgtgcgggccatccggcccggcccccggcagaccagcgagaagaaggtgtctgacaaggagaagaaggtggtgcagcctgtgatgcccaccagcctgaggatgaccaggtctgccacccaggccgccaagcaggtgcccaggacagtgagcagcaccacagccaggaagcctgtgacccgggccgccaatgaaaatgaacctgagggcaaggtgcccagcaagggccggcctgccaagaatgtggagaccaagccagacaagggcatcagctgcaaggtggacagcgaggagaacaccctgaacagccagaccaatgccaccagcggcatgaacccagatggagtgctgagcaagatggagaacctgcctgagatcaacacagccaagatcaagggcaagaacagctttgcccccaaggacttcatgttccagcccctggatggcctgaagacctaccaggtgacccccatgacccccaggtctgccaatgccttcctgacccccagctacacctggacccccctgaagacagaggtggatgagagccaggccaccaaggagatcctggcccagaagtgcaagacctacagcaccaagaccatccagcaggacagcaacaagctgccctgccccctgggccccctgactgtgtggcatgaggagcacgtgctgaacaagaatgaggccaccaccaagaacctgaatggcctgcccatcaaggaggtgcccagcctggagagaaatgaaggaagaattgcccagccccaccacggcgtgccctacttcaggaacatcctgcagagcgagacagagaagctgaccagccactgctttgagtgggacaggaagctggagctggacatcccagatgatgccaaggacctgatcagaacagctgtgggccagacccggctgctgatgaaggagcgcttcaagcagtttgagggcctggtggatgactgtgagtacaagaggggcatcaaggagaccacctgcacagacctggatggcttctgggacatggtgtccttccagattgaagatgtgatccacaagttcaacaacctgatcaagctggaggagagcggctggcaggtgaacaacaacatgaaccacaacatgaacaagaatgtgttcaggaagaaggtggtgtctggcatcgccagcaagcccaagcaggatgatgctggaagaattgctgccaggaaccggctggccgccatcaagaatgccatgagggagcgcatccggcaggaggagtgtgccgagacagctgtgtctgtcatccccaaggaggtggacaagatcgtgtttgatgctggcttcttccgggtggagagccctgtgaagctgttcagcggcctgtctgtgagcagcgagggccccagccagaggctgggcacccccaagtctgtgaacaaggctgtgtcccagagcagaaatgagatgggcatcccccagcagaccaccagcccagaaaatgccggcccccagaacaccaagtcagaacatgtgaagaagaccctcttcctgagcatccctgagagccgcagcagcattgaagatgcccagtgccccggcctgcctgacctgattgaagaaaatcatgtggtgaacaagacagacctgaaggtggactgcctgagcagcgagaggatgagcctgcccctgctggccggcggcgtggctgatgacatcaacaccaacaagaaggagggcatcagtgatgtggtggagggcatggagctgaacagcagcatcaccagccaggatgtgctgatgagcagccctgagaagaacacagccagccagaacagcatcctggaggagggggagaccaagatcagccagagcgagctgtttgacaacaagagcctgaccacagagtgccacctgctggacagccctggcctgaactgcagcaaccccttcacccagctggagcggcggcaccaggagcacgcccggcacatcagctttggaggcaacctgatcaccttcagccccctgcagcctggagagttctag

SEQ ID NO: 18349 - DNA, 1128 bp, synthetic construct
  source 1..1128: mol_type = other DNA; note = Synthetic coding sequence
atggccagcgccccctggccagagcgggtgccccggctgctggccccccggctgcccagctacccacctcctccacccaccgtgggcctgcgctccatggagcaggaggagacctacctggagctgtacctggaccagtgtgccgcccaggacggcctggccccacccaggagccccctcttcagccctgtggtgccctatgacatgtacatcctgaatgccagcaacccagacacagccttcaacagcaaccctgaggtgaaggagaccagcggggacttcagctctgtggacctgtccttcctgcctgatgaggtgacccaggagaacaaggaccagcccgtcatcagcaagcatgaaacagaagaaaattctgagagccagagcccccagagccggctgcccagccccagcgagcaggatgtgggcctgggcctgaacagcagcagcctgagcaacagccacagccagctgcaccctggggacacagattctgtgcagcccagccctgagaagcccaacagcgacagcctgagcctggccagcatcacccccatgacccccatgacccccatcagcgagtgctgcggcatcgtgccccagctgcagaacatcgtgtccacagtgaacctggcctgcaagctggacctgaagaagatcgccctgcacgccaagaatgctgagtacaaccccaagagatttgctgctgtgatcatgaggatccgggagcccaggaccacagccctgatcttcagcagcggcaagatggtgtgcacaggagccaagtctgaggagcagagccggctggccgccaggaaatatgcccgggtggtgcagaagctgggcttccctgcccgcttcctggacttcaagatccagaacatggtgggcagctgtgatgtgcgcttccccatccggctggagggcctggtgctgacccaccagcagttcagcagctatgagcctgagctgtttcctggcctcatctacaggatggtgaagcccagaattgtgctgctgatctttgtgtctgggaaggtggtgctgaccggggccaaggagaggtctgagatctatgaggcctttgagaacatctaccccatcctgaagggcttcaagaaggcctag

SEQ ID NO: 18350 - DNA, 633 bp, synthetic construct
  source 1..633: mol_type = other DNA; note = Synthetic coding sequence
atgcaggccgagggccagggcaccggcggcagcactggagatgctgatggccctgggggccctggcatcccagatggccctggaggaaatgccggcggccctggagaggccggggccaccggcggccggggccccaggggggccggggccgcccgggccagcggcccccggggcggggccccccggggcccccatggaggagctgccagcgcccaggacggccgctgcccctgtggggcccggcggccagacagccggctgctgcagctgcacatcaccatgcccttcagcagccccatggaggccgagctggtgcggcgcatcctgagcagagatgctgcccccctgcccaggcctggagctgtgctgaaggacttcaccgtgtctggcaacctgctcttcatgtctgtgcgggaccaggaccgggagggcgccggccgcatgagggtggtgggctggggcctgggcagcgccagccctgagggccagaaggcccgggacctgcggacccccaagcacaaggtgtctgagcagaggcctggcaccccaggccccccacctcctgagggcgcccagggagatggctgccggggcgtggccttcaacgtgatgttcagcgccccccacatctag

SEQ ID NO: 18351 - DNA, 582 bp, synthetic construct
  source 1..582: mol_type = other DNA; note = Synthetic coding sequence
atggtggtgctgcgggccggcaagaagaccttcctgccccccctgtgccgggcctttgcctgccggggctgccagctggcccctgagagaggagctgagcggcgggacacagcccccagcggcgtgagccgcttctgcccccccaggaagagctgccacgactggattggccccccagacaagtacagcaacctgcggcctgtgcacttctacatcccagaaaatgaaagccccctggagcagaagctgaggaagctgcggcaggagacccaggagtggaaccagcagttctgggccaaccagaacctgaccttcagcaaggagaaggaggagttcatccacagccggctgaagaccaagggcctgggcctgaggacagagagcggccagaaggccaccctgaatgctgaggagatggctgacttctacaaggagttcctgagcaagaacttccagaagcacatgtactacaacagagactggtacaagaggaactttgccatcaccttcttcatgggcaaggtggccctggagcgcatctggaacaagctgaagcagaagcagaagaagaggagcaactag

SEQ ID NO: 18352 - DNA, 1383 bp, synthetic construct
  source 1..1383: mol_type = other DNA; note = Synthetic coding sequence
atggccaatgaccccctggagggcttccacgaggtgaacctggccagccccaccagcccagacctgctgggcgtgtatgagagcggcacccaggagcagaccaccagccccagcgtcatctaccggccccaccccagcgccctgagctctgtgcccatccaggccaatgccctggatgtgtctgagctgcccacccagcctgtgtacagcagcccccggcggctgaactgtgccgagatcagcagcatctccttccacgtgacagatcctgccccctgcagcaccagcggcgtgacagctggcctgaccaagctgaccaccaggaaggacaactacaatgctgagcgggagttcctgcagggcgccaccatcacagaggcctgtgatggcagtgatgacatcttcggcctgagcacagacagcctgagccggctgcggagccccagcgtgctggaggtgcgggagaagggctatgaaaggctgaaggaggagctggccaaggcccagcgggagctgaagctgaaggatgaggagtgtgagcggctgagcaaggtgcgggaccagctgggccaggagctggaggagctgacagccagcctgtttgaggaggcccacaagatggtgcgggaggccaacatcaagcaggccacagctgagaagcagctgaaggaggcccagggcaagattgatgtgctgcaggccgaggtggccgccctgaagaccctggtgctgagcagcagccccaccagccccacccaggagcccctgcccggcggcaagacccccttcaagaagggccacaccaggaacaagagcaccagcagcgccatgagcggcagccaccaggacctgagcgtcatccagcccatcgtgaaggactgcaaggaggccgacctgagcctgtacaatgagttccggctgtggaaggatgagcccaccatggacaggacctgccccttcctggacaagatctaccaggaggacatcttcccctgcctgaccttcagcaagtctgagctggccagcgctgtgctggaggccgtggagaacaacaccctgagcattgagcctgtgggcctgcagcccatccgctttgtgaaggccagcgctgtggagtgtggcggccccaagaagtgtgccctgaccggccagagcaagagctgcaagcaccgcatcaagctgggggacagcagcaactactactacatcagccccttctgccgctaccgcatcacctctgtgtgcaacttcttcacctacatccgctacatccagcagggcctggtgaagcagcaggatgtggaccagatgttctgggaggtgatgcagctgaggaaggagatgagcctggccaagctgggctacttcaaggaggagctgtag

SEQ ID NO: 18353 - DNA, 981 bp, synthetic construct
  source 1..981: mol_type = other DNA; note = Synthetic coding sequence
atggccaccctggtggagctgcctgacagcgtgctgctggagatcttctcctacctgcctgtgcgggaccgcatccgcatcagccgggtgtgccaccgctggaagaggctggtggatgaccgctggctgtggaggcatgtggacctgaccctgtacaccatgaggcccaaggtgatgtggcacctgctgcggcgctacatggccagccggctgcacagcctgaggatgggcggctacctgttcagcggcagccaggccccccagctgagccctgccctgctgcgggccctgggccagaagtgccccaacctgaagaggctgtgcctgcacgtggccgacctgtccatggtgcccatcaccagcctgcccagcaccctgcggaccctggagctgcacagctgtgagatctccatggcctggctgcacaagcagcaggaccccaccgtgctgcccctgctggagtgcatcgtgctggacagagtgcctgccttcagagatgagcacctgcagggcctgacccgcttccgggccctgcggagcctggtgctgggcggcacctacagagtgacagagaccggcctggatgctggcctgcaggagctgagctacctgcagaggctggaggtgctgggctgcaccctgtctgctgacagcaccctgctggccatcagccgccacctgagagatgtgaggaagatccggctgactgtgcggggcctgagcgcccctggcctggccgtgctggagggcatgcctgccctggagagcctgtgcctgcagggccccctggtgaccccagagatgcccagccccacagagatcctgagcagctgcctgaccatgcccaagctgcgggtgctggagctgcagggcctgggctgggagggccaggaggccgagaagatcctgtgcaagggcctgccccactgcatggtgattgtgcgggcctgccccaaggagagcatggactggtggatgtag

SEQ ID NO: 18354 - DNA, 3090 bp, synthetic construct
  source 1..3090: mol_type = other DNA; note = Synthetic coding sequence
atggccagcgaggccgtgaaggtggtggtgcgctgccggcccatgaaccagcgggagcgggagctgcgctgccagcctgtggtgacagtggactgtgcccgggcccagtgctgcatccagaaccctggagctgctgatgagccccccaagcagttcacctttgatggagcctaccacgtggaccacgtgacagagcagatctacaatgaaattgcctaccccctggtggagggcgtgacagagggctacaacggcaccatctttgcctacggccagacaggcagcggcaagagcttcaccatgcagggcctgcctgacccccccagccagaggggcatcatcccccgggcctttgagcacgtgtttgagagcgtgcagtgtgccgagaacaccaagttcctggtgcgggccagctacctggagatctacaatgaagatgtgcgggacctgctgggcgctgacaccaagcagaagctggagctgaaggagcaccctgagaagggcgtgtatgtgaagggcctgtccatgcacacagtgcacagcgtggcccagtgtgagcacatcatggagaccggctggaagaacagatctgtgggctacaccctgatgaacaaggacagcagccgcagccacagcatcttcaccatcagcattgagatgtctgctgtggatgagcggggcaaggaccacctgcgggccggcaagctgaacctggtggacctggccggcagcgagcggcagagcaagacaggagccactggagagcggctgaaggaggccaccaagatcaacctgagcctgagcgccctgggcaatgtcatcagcgccctggtggatggccgctgcaagcacgtgccctacagagacagcaagctgacccggctgctgcaggacagcctgggcggcaacaccaagaccctgatggtggcctgcctgagccctgctgacaacaactatgatgagaccctgagcaccctgcgctatgccaacagagccaagaacatccggaacaagccccgcatcaatgaagaccccaaggatgccctgctgcgggagtaccaggaggagatcaagaagctgaaggccatcctgacccagcagatgagccccagcagcctgagcgccctgctgagccggcaggtgcccccagaccctgtgcaggtggaggagaagctgctgccccagcccgtcatccagcatgatgtggaggccgagaagcagctgatccgggaggagtatgaggagcggctggcccggctgaaggctgactacaaggccgagcaggagagccgggcccggctggaggaggacatcacagccatgaggaacagctatgatgtgcggctgagcaccctggaggagaacctgaggaaggagacagaggccgtgctgcaggtgggcgtgctgtacaaggccgaggtgatgagcagagctgagtttgccagcagcgctgagtaccccccagccttccagtatgagaccgtggtgaagcccaaggtgttcagcaccacagacaccctgcccagtgatgatgtgtccaagacccaggtgagcagcagatttgctgagctgcccaaggtggagcccagcaagtctgagatcagcctgggcagcagcgagagcagcagcctggaggagacctctgtgtctgaggccttccctggccctgaggagcccagcaatgtggaggtgtccatgcccacagaggagagccgcagccgctacttcctggatgaatgtctgggccaggaggccgccggccacctgctgggggagcagaactacctgccccaggaggagccccaggaggtgcccctgcagggcctgctgggcctgcaggacccctttgctgaggtggaggccaagctggcccggctgagcagcacagtggccaggacagatgccccccaggctgatgtgcccaaggtgcctgtgcaggtgcctgcccccacagacctgctggagcccagtgatgcccggcctgaggccgaggccgcagatgacttcccccccaggcctgaggtggacctggccagcgaggtggccctggaggtggtgaggacagctgagcccggggtgtggctggaggcccaggcccctgtggccctggtggcccagcctgagcccctgcctgccacagctggggtgaagcgggagagcgtgggcatggaggtggccgtgctgacagatgaccccctgcctgtggtggaccagcagcaggtgctggcccggctgcagctgctggagcagcaggtggtgggcggggagcaggccaagaacaaggacctgaaggagaagcacaagaggaggaagagatatgcagatgaaagaaggaagcagctggtggccgccctgcagaacagtgatgaggacagcggggactgggtgctgctgaatgtgtatgacagcatccaggaggaggtgcgggccaagagcaagctgctggagaagatgcagaggaagctgcgggctgctgaggtggagatcaaggacctgcagagcgagttccagctggagaagattgactacctggccaccatccggcggcaggagcgggacagcatgctgctgcagcagctgctggagcaggtgcagcccctcatcagaagagactgcaactacagcaacctggagaagatcctgcgggagagctgctgggatgaggacaatggcttctggaagatcccccaccctgtgatcaccaagaccagcctgcctgtggccgtgtccacaggcccccagaacaagccagccaggaagaccagcgctgctgacaacggggagcccaacatggaggatgaccgctaccgcctgatgctgagccgcagcaacagcgagaacatcgccagcaactacttccgcagcaagagggccagccagatcctgagcacagatgccaggaagagcctgacccaccacaacagccccccaggcctgagctgccccctgagcaacaacagcgccatcccccccacccaggcccctgagatgccccagccccggcccttccggctggagagcctggacatccccttcaccaaggccaagaggaagaagagcaagagcaactttggcagcgagcccctgtag

SEQ ID NO: 18355 - DNA, 417 bp, synthetic construct
  source 1..417: mol_type = other DNA; note = Synthetic coding sequence
atgatcctgcagcagcccctgcagaggggcccccagggcggggcccagaggctgcccagggctgccctgggcgtgacctggggcctggatgccagcagccccctgcggggagctgtgcccatgagcaccaagaggcggctggaggaggagcaggagcccctgaggaagcagttcctgtctgaggagaacatggccacccacttcagccagctgagcctgcacaatgaccacccctactgcagcccccccatgaccttcagccctgccctgccccccctgcggagcccctgcagcgagctgctgctgtggagatacccaggcagcctcatccctgaggccctgcggctgctgcggctgggggacacccccagccccccctacccagccaccccagctggggacatcatggagctgtag

SEQ ID NO: 18356 - DNA, 573 bp, synthetic construct
  source 1..573: mol_type = other DNA; note = Synthetic coding sequence
atgttccaggtgcctgattctgagggcggccgggccggcagccgggccatgaagcccccaggaggagagagcagcaacctgtttggcagccctgaggaggccacccccagcagccggcccaacaggatggccagcaacatcttcggccccacagaggagccccagaacatccccaagaggaccaaccccccaggcggcaaaggaagtggcatctttgatgagagcacccctgtgcagacccggcagcacctgaaccccccaggcggcaagaccagtgacatcttcggcagccctgtgacagccaccagccggctggcccaccccaacaagcccaaggaccacgtgttcctgtgtgagggggaggagcccaagagtgacctgaaggccgcccggagcatcccagctggagctgagcctggagagaagggcagcgccaggaaggccggccctgccaaggagcaggagcccatgcccaccgtggacagccatgagccccggctgggcccccggcccaggagccacaacaaggtgctgaaccccccaggcggcaagagcagcatctccttctactag

SEQ ID NO: 18357 - DNA, 690 bp, synthetic construct
  source 1..690: mol_type = other DNA; note = Synthetic coding sequence
atgacctgctgcagccaggtgccccccaggagaagacccagcctggccctgagcccccggctggactgcaatggcctgaatggagtgcccggcagcatctgggactttgtgtctggcagcttcagccccagccccagccccatcctgtctgctggcccccccagcagcagcagcgccagccccaacggggctgagctggcccgggtgcggcggcagctggatgaggccaagaggaagatccggcagtgggaggagagctggcagcaggtgaagcaggtgtgtgatgcctggcagcgggaggcccaggaggccaaggagcgggcccgggtggccgacagcgaccggcagctggccctgcagaagaaggaggaggtggaggcccaggtgaagcagctgcaggaggagctggagggcctgggcgtggccagcaccctgcccggcctgcggggctgtggggacatcggcaccatccccctgcccaagctgcacagcctgcagagccagctgcggctggacctggaggccgtggatggagtcatcttccagctgcgggccaagcagtgtgtggcctgccgggagcgggcccacggggctgtgctgcggccctgccagcaccacatcctgtgtgagccctgtgccgccacagcccctgagtgcccctactgcaagggccagcccctgcagtggtag

SEQ ID NO: 18358 - DNA, 5460 bp, synthetic construct
  source 1..5460: mol_type = other DNA; note = Synthetic coding sequence
atggccagcatcacccagctgtttgatgacctgtgtgaggccctgctgcctgctgccaagacccacctgggccagaggtctgtgaacaggaagagggccaagaggagcctgaagaaggtggcctacaatgccctcttcaccaacctcttccaggatgagacccagcagctgcagcctgacatgagcaagctgcctgccaggaacaagatcctgatgctgagctttgacctgcgggtgggcggcctgggccccaaggctgaccggctggaggagctggtggaggagctggaggccgccccctgctgccccctgctggaggtgggctctgtgctggacctgctggtgcagctggccggcagcggccccccccaggtgctgcccaggaagagggactacttcctgaacaacaagcacgtgggcagaaatgtgccctacagcggctatgactgtgatgacctgtctgtgtttgagatggatgtgcagagcctcatcagccgggaggagtgcctgtgccacagcatgatccaggagaccctgcaggtgatggaggccgcccctggcaccggcctgcccaccgtgggcctcttctcctttggagacccctgtggggacagatttgagcgggacaccagggtgtccctgtttggagccctggtgcacagcaggacctatgacatggatgtgcggctgggcctgccccctgtgcctgacaatgctgacctgagcggcctggccatcaaggtgcccccatctgtggaccagtgggaggatgagggcttccagagcgccagcaacctgaccccagacagccagagcgagcccagcgtgaccccagatgtggacctgtgggaggccgccctgacctatgaggccagcaagaggcgctgctgggagcgggtgggctgccccccaggccaccgggaggagccctacctgacagaagctggaagagatgcctttgacaagttctgccgcctgcaccagggcgagctgcagctgctggccggcggcgtgctgcaggccccccagcctgtgctggtgaaggaatgtgagctggtgaaggatgtgctgaatgtgctgattggagtggtgtctgccaccttcagcctgtgccagcctgcccaggcctttgtggtgaagaggggcgtgcacgtgtctggggccagccctgagagcatcagcagcctgctgtctgaggtggccgagtatggcacctgctacacccggctgagccacttcagcctgcagcctgtgctggacagcctgtacagcaagggcctggtgttccaggccttcaccagcggcctgcggcgctacctgcagtactaccgggcctgtgtgctgagcaccccacccaccctgagcctgctgaccatcggcttcctgttcaagaagctgggccggcagctgcgctacctggccgagctgtgtggggtgggcgctgtgctgcccggcacctgtggcggcggccccagggctgccttccccactggagtgaagctgctgagctacctgtaccaggaggccctgcacaactgcagcaatgagcactaccctgtgctgctgagcctgctgaagaccagctgtgagccctacacccgcttcatccatgactgggtgtacagcggggtcttcagagatgcctatggagagttcatgatccaggtgaaccacgagtacctgtccttccgggacaagctgtactggacccacggctacgtgctgatcagcaaggaggtggaggactgtgtgcctgtgttcctgaagcacatcgcccatgacatctacgtgtgtgggaagaccatcaacctgctgaagctgtgctgccccaggcactacctgtgctggagcgatgtgcctgtgccccgcatcagcgtcatcttcagcctggaggagctgaaggagattgagaaggactgtgctgtgtatgtgggccgcatggagcgggtggcccggcacagctctgtgtccaaggaggagaaggagctgaggatggagatcgccaagcaggagctgattgcccacgcccgggaggccgccagccgggtgctgagcgccctgagtgaccggcagatgtctgagaggatggccctggatgccaggaagcgggagcagttccagaggctgaaggagcagtttgtgaaggaccaggagcggcggcaggccgcccggcaggaggagctggatgatgacttctcctatgcccgggagctgcgggaccgggagcggcggctgaagagcctggaggaggagctggagaggaaggcccggcaggccctggtggaccactacagcaagctgtctgctgaggccgcccggcgggagcagaaggccctgtggaggatccagaggcaccggctggagagcgcccggctgcgcttcctgctggaggatgagaagcacatccaggagatgctgaaggctgtgtctgaggcccaccagccccaggagcccccagatgtgctgctgtctgtgcacccccaggtgaccagccctggccctgagcaccctgagggcggccagggctgtgacagcggcagcgctgagcagcacagccctgcctgggatggctggaacagacctggcctgctgaccccccagcccctgaagcccctggccgtgggcgctgggggccggggcctgcagcaggccgagggcgcccggcccttcagtgacagcctgagcatcggggacttcctgcctgtgggccctggagctgagcccagcgtgcagacaggcatggtgcccctgctggaggtggccctgcagaccatcaacctggacctgccccccagcgcccctggagaggccccagctgctgccagcacccagcccagccggccccaggagtatgacttcagcacagtgctgcggcctgctgtggccaccagccctgcccctggccccctgcaggccgctgagtgcagcctgggcagcagcggcctgcagctgtgggaggacagctgtgggaagatggatgcctgtggcagcgccagccgggagaccctgctgcccagccaccccccccggcgggccgccctggaggagggcagcagccagcccacagagcggctgtttggccaggtgtctgggggcggcctgcccaccggggactatgccagcgagatcgcccccacccggccccgctggaacacccacggccacgtgtctgatgccagcatccgggtgggagaaaatgtgtctgatgtggcccccacccagccccgctggaacacccacggccacgtgtccaatgccagcatcagcctgggggagagcgtgtctgatgtggcccccacccggccccgctggaacatccacggccacgtgtccaatgccagcatccgggtgggagaaaatgtgtctgatgtggcccccacccggccccgctggaacacccacggccacgtgtccaatgccagcatccgggtgggggagaatgtgtctgatgtggcccccacccggccccgctggaacacccacggccacgtgtctgatgccagcatcagcctgggggagagcgtgtctgacatggccccagcccggccccgctggaacacccacggccacgtgtctgatgccagcatcagcctgggggagagcgtgtctgacatggcccccacccggccccgctggaacacccacggccacgtgtctgacaccagcatccgggtgggagaaaatgtgtctgatgtggcccccatccgcagccgctgcaacacccacggccacgtgtctgatgccagcatcagcctgggggagcctgtgtctgatgtggtgtccacccggccccgctggaacacccacgtgcccatccccccaccccacatggtgctgggcgccctgagccctgaggccgagcccaacaccccccggccccagcagagccccccaggccacaccagccagagcgccctgagcctgggcgcccagagcacagtgctggactgtggcccccggctgcctgtggaggtgggccccagcctgagcagccccagcagcggctgtggggagggcagcatctctgtgggagaaaatgtgtctgatgtggcccccacccagccctggtggcccaacacccctggggacagcgtgtctgaggagctgggccctggccgcagcggggacacagaggacctgagccccaactggcccctgaacagccaggaggacacagctgcccagagcagccctggccgcggggaggaggccgaggccagcgctgctgaggcccagggcggggagcaggcctacctggccggcctggccggccagtaccacctggagcgctacccagacagctatgaatccatgtctgagccccccatcgcccacctgctgcggcctgtgctgccccgggcctttgccttccctgtggacccccaggtgcagagcgctgctgatgaaacagctgtgcagctgtctgagctgctgaccctgcctgtgctgatgaagaggagcatcacagcccccctggccgcccacatcagcctggtgaacaaggctgctgtggactacttctttgtggagctgcacctggaggcccactatgaggccctgcggcacttcctgctgatggaggatggagaatttgcccagagcctgagtgacctgctgtttgagaagctgggcgccggccagaccccaggagagctgctgaaccccctggtgctgaacagcgtgctgagcaaggccctgcagtgcagcctgcatggagacaccccccacgccagcaacctgagcctggccctgaagtacctgcctgaggtgtttgccccaaatgccccagatgtgctgagctgcctggagctgcgctacaaggtggactggcccctgaacatcgtcatcacagagggctgtgtgtccaagtacagcggggtcttctccttcctgctgcagctgaagctgatgatgtgggccctgaaggatgtgtgcttccacctgaagaggacagccctgctgagccacatggccggctctgtgcagttccggcagctgcagctgttcaagcatgagatgcagcactttgtgaaggtgatccagggctacatcgccaaccagatcctgcacgtgacctggtgtgagttccgggcccggctggccaccgtgggggacctggaggagatccagagggcccacgccgagtacctgcacaaggctgtgttccggggcctgctgacagagaaggccgcccctgtgatgaatgtcatccacagcatcttcagcctggtgctgaagttccgcagccagctgatcagccaggcctggggccccccaggcggccccagaggagctgagcaccccaactttgccctgatgcagcagagctacaacaccttcaagtactacagccacttcctgttcaaggtggtgaccaagctggtgaacagaggctaccagccccacctggaggacttcctgctgcgcatcaacttcaacaactactaccaggatgcctag

SEQ ID NO: 18359 - DNA, 2250 bp, synthetic construct
  source 1..2250: mol_type = other DNA; note = Synthetic coding sequence
atgagcggcagccacaccccagcctgtggccccttcagcgccctgacccccagcatctggccccaggagatcctggccaagtacacccagaaggaggagagcgctgagcagcctgagttctactatgatgaatttggcttccgggtgtacaaggaggagggagatgagcccggcagcagcctgctggccaacagccccctgatggaggatgccccccagaggctgcgctggcaggcccacctggagttcacccacaaccatgatgtgggggacctgacctgggacaagattgctgtgtccctgcccaggtctgagaagctgcggagcctggtgctggccggcatcccccacggcatgaggccccagctgtggatgaggctgagcggggccctgcagaagaagagaaattctgagctgagctaccgggagatcgtgaagaacagcagcaatgatgagaccatcgccgccaagcagatcgagaaggacctgctgcggaccatgcccagcaatgcctgctttgcctccatgggcagcattggagtgccccggctgcggcgggtgctgcgggccctggcctggctgtacccagagatcggctactgccagggcaccggcatggtggccgcctgcctgctgctcttcctggaggaggaggatgccttctggatgatgtctgccatcatcgaggacctgctgcctgccagctacttcagcaccaccctgctgggcgtgcagacagaccagagggtgctgcggcacctgattgtgcagtacctgccccggctggacaagctgctgcaggagcatgacatcgagctgagcctcatcaccctgcactggttcctgacagcctttgcctctgtggtggacatcaagctgctgctgcgcatctgggacctcttcttctatgagggcagccgggtgctcttccagctgaccctgggcatgctgcacctgaaggaggaggagctgatccagagcgagaacagcgccagcatcttcaacaccctgagtgacatccccagccagatggaggatgctgagctgctgctgggcgtggccatgaggctggccggcagcctgacagatgtggccgtggagacccagaggaggaagcacctggcctacctgattgctgaccagggccagctgctgggcgccggcaccctgaccaacctgagccaggtggtgagaagaaggacccagaggaggaagagcaccatcacagccctgctgtttggagaagatgacctggaggccctgaaggccaagaacatcaagcagacagagctggtggccgacctgcgggaggccatcctgcgggtggcccggcacttccagtgcacagaccccaagaactgcagcgtggagctgaccccagactacagcatggagagccaccagagggaccacgagaactacgtggcctgcagccgcagccacagaagaagagccaaggccctgctggactttgaaagacatgatgatgatgagctgggcttcaggaagaatgacatcatcaccatcgtgtcccagaaggatgagcactgctgggtgggggagctgaatggcctgcggggctggttccctgccaagtttgtggaggtgctggatgagaggagcaaggagtacagcattgctggagatgattctgtgacagaaggagtgacagacctggtgcggggcaccctgtgcccagccctgaaggccctgtttgagcacggcctgaagaagcccagcctgctgggcggggcctgccacccctggctgttcatcgaggaggccgccggccgggaggtggagcgggactttgcctctgtgtacagccggctggtgctgtgcaagaccttccggctggatgaagatggcaaggtgctgaccccagaggagctgctgtacagagctgtgcagagcgtgaatgtgacccatgatgctgtgcacgcccagatggatgtgaagctgcggagcctcatctgtgtgggcctgaatgagcaggtgctgcacctgtggctggaggtgctgtgcagcagcctgcccaccgtggagaagtggtaccagccctggagcttcctgcggagccctggctgggtgcagatcaagtgtgagctgcgggtgctgtgctgctttgccttcagcctgagccaggactgggagctgcctgccaagcgggaggcccagcagcccctgaaggagggcgtgcgggacatgctggtgaagcaccacctgttctcctgggatgtggatggatag

SEQ ID NO: 18360 - DNA, 2097 bp, synthetic construct
  source 1..2097: mol_type = other DNA; note = Synthetic coding sequence
atgctgagccccaagatccggcaggcccggcgggcccggagcaagagcctggtgatgggagagcagagccgcagccctggccgcatgccctgcccccaccggctgggccctgtgctgaaggccggctggctgaagaagcagaggagcatcatgaagaactggcagcagcgctggtttgtgctgcggggggaccagctgttctactacaaggacaaggatgagatcaagccccagggcttcatcagcctgcagggcacccaggtgacagagctgcccccaggccctgaggaccccgggaagcacctgtttgagatcagccctggaggagctggggagcgggagaaggtgcctgccaaccctgaggccctgctgctgatggccagcagccagagggacatggaggactgggtgcaggccatcagaagagtcatctgggcccccctgggcggcggcatcttcggccagaggctggaggagaccgtgcaccacgagaggaaatatggcccccggctggcccccctgctggtggagcagtgtgtggacttcatccgggagcggggcctgacagaggagggcctcttcaggatgcctggccaggccaacctggtgcgggacctgcaggacagctttgactgtggggagaagcccctgtttgacagcaccacagatgtgcacacagtggccagcctgctgaagctgtacctgcgggagctgcctgagcctgtggtgccctttgcccgctatgaggacttcctgagctgtgcccagctgctgaccaaggatgaaggagagggcaccctggagctggccaagcaggtgagcaacctgccccaggccaactacaacctgctgcgctacatctgcaagttcctggatgaggtgcaggcctacagcaatgtgaacaagatgtctgtgcagaacctggccaccgtgtttggccccaacatcctgcggccccaggtggaggaccctgtgaccatcatggagggcaccagcctggtgcagcacctgatgacagtgctgatcaggaagcacagccagctgttcaccgcccctgtgcctgagggccccaccagcccccggggcggcctgcagtgtgctgtgggctggggcagcgaggaggtgacccgggacagccagggcgagcccggcggccctggcctgcctgcccacaggaccagcagcctggatggagctgctgtggccgtgctgagcaggacagcccccaccggccctggcagccgctgcagccctgggaagaaggtgcagaccctgcccagctggaagagcagcttccggcagcccaggagcctgagcggcagccccaagggcggcggcagcagcctggaggtgcccatcatcagcagcggcggcaactggctgatgaatggcctgagcagcctgcggggccaccggcgggccagcagcggggaccggctgaaggacagcggctctgtgcagaggctgagcacctatgacaacgtgcctgcccctggcctggtgcccggcatccccagcgtggcctccatggcctggagcggggccagcagcagcgagagctctgtgggcggcagcctgagcagctgcacagcctgccgggccagtgacagcagcgcccggagcagcctgcacacagactgggccctggagcccagccccctgcccagcagcagcgaggaccccaagagcctggacctggaccacagcatggatgaagctggagctggggccagcaacagcgagcccagcgagccagacagccccacccgggagcacgcccggcgctctgaggccctgcagggcctggtgacagagctgcgggcagagctgtgccggcagaggacagaatatgaaagatctgtgaagagaattgaggagggcagcgctgacctgaggaagaggatgagccggctggaggaggagctggaccaggagaagaagaagtacatcatgctggagatcaagctgagaaattctgagcgggcccgggaggatgctgagaggaggaaccagctgctgcagcgggagatggaggagttcttcagcaccctgggcagcctgactgtgggcgccaagggggcccgggcccccaagtag

SEQ ID NO: 18361 - DNA, 180 bp, synthetic construct
  source 1..180: mol_type = other DNA; note = Synthetic coding sequence
atgacccggggcaaccagcgggagctggcccggcagaagaacatgaagaagcagagcgacagcgtgaagggcaagagaagagatgatggcctgtctgctgctgccaggaagcagagggacagcgagatcatgcagcagaagcagaagaaggccaatgagaagaaggaggagcccaagtag

SEQ ID NO: 18362 - DNA, 372 bp, synthetic construct
  source 1..372: mol_type = other DNA; note = Synthetic coding sequence
atggcccgctatgaggaggtgtctgtgtctggctttgaggagttccacagagctgtggagcagcacaacgggaagaccatctttgcctacttcaccggcagcaaggatgctgggggcaagtcctggtgcccagactgtgtgcaggccgagcctgtggtgcgggagggcctgaagcacatcagcgagggctgtgtgttcatctactgccaggtgggggagaagccctactggaaggaccccaacaatgacttcaggaagaacctgaaggtgacagctgtgcccaccctgctgaagtatggcaccccccagaagctggtggagagtgaatgtctgcaggccaacctggtggagatgctgttcagcgaggactag

SEQ ID NO: 18363 - DNA, 1401 bp, synthetic construct
  source 1..1401: mol_type = other DNA; note = Synthetic coding sequence
atgggctggatcacagaggacctgatcagaagaaatgctgagcacaatgactgtgtgatcttcagcctggaggagctgagcctgcaccagcaggagattgagcggctggagcacatcgacaagtggtgccgggacctgaagatcctgtacctgcagaacaacctgattggcaagattgaaaatgtgtccaagctgaagaagctggagtacctgaacctggccctgaacaacatcgagaagattgagaacctggagggctgtgaggagctggccaagctggacctgactgtgaacttcatcggggagctgagcagcatcaagaacctgcagcacaacatccacctgaaggagctgttcctgatgggcaacccctgtgccagctttgaccactaccgggagtttgtggtggccaccctgccccagctgaagtggctggatggcaaggagattgagcccagcgagcgcatcaaggccctgcaggactacagcgtgattgagccccagatccgggagcaggagaaggaccactgcctgaagagggccaagctgaaggaggaggcccagaggaagcaccaggaggaggacaagaatgaagacaagaggagcaatgccggctttgatggccgctggtacacagacatcaatgccaccctgagcagcctggagagcaaggaccacctgcaggccccagacacagaggagcacaacaccaagaagctggacaacagtgaagatgacctggagttctggaacaagccctgcctcttcaccccagagagccggctggagaccctgcggcacatggagaagcagaggaagaagcaggagaagctgtctgagaagaagaagaaggtgaagccacccaggaccctcatcacagaagatggcaaggccctgaatgtgaatgagcccaagattgacttcagcctgaaggacaatgagaagcagatcatcctggacctggccgtgtaccgctacatggacaccagcctgattgatgtggatgtgcagcccacctacgtgcgggtgatgatcaagggcaagcccttccagctggtgctgcctgctgaggtgaagccagacagcagcagcgccaagaggagccagaccaccggccacctggtgatctgcatgcccaaggtgggggaggtgatcaccggcggccagagggccttcaagtccatgaagaccaccagtgacaggagccgggagcagaccaacaccaggagcaagcacatggagaagctggaggtggaccccagcaagcacagcttcccagatgtgaccaacatcgtgcaggagaagaagcacacccccaggagaagacctgagcccaagatcatccccagcgaggaggaccccacctttgaggacaaccctgaggtgcccccactcatctag

SEQ ID NO: 18364 - DNA, 1050 bp, synthetic construct
  source 1..1050: mol_type = other DNA; note = Synthetic coding sequence
atggaggacccccagagcaaggagcctgctggggaggccgtggccctggccctgctggagagccccaggcctgagggcggggaggagcccccccggcccagccctgaggagacccagcagtgcaagtttgatggccaggagaccaagggcagcaagttcatcaccagcagcgccagtgacttcagtgaccctgtgtacaaggagatcgccatcaccaacggctgcatcaacaggatgagcaaggaggagctgcgggccaagctgtctgagttcaagctggagacccggggcgtgaaggatgtgctgaagaagaggctgaagaactactacaagaagcagaagctgatgctgaaggagagcaactttgctgacagctactatgactacatctgcatcatcgactttgaggccacctgtgaggagggcaaccccccagagtttgtgcatgagatcatcgagttccctgtggtgctgctgaacacccacaccctggagattgaggacaccttccagcagtatgtgcggcctgagatcaacacccagctgagtgacttctgcatcagcctgaccggcatcacccaggaccaggtggacagagctgacaccttcccccaggtgctgaagaaggtgattgactggatgaagctgaaggagctgggcaccaagtacaagtacagcctgctgacagatggctcctgggacatgagcaagttcctgaacatccagtgccagctgagccggctgaagtaccccccatttgccaagaagtggatcaacatcaggaagagctatggcaacttctacaaggtgcccaggagccagaccaagctgaccatcatgctggagaagctgggcatggactatgatggccggccccactgcggcctggatgacagcaagaacatcgccagaattgctgtgaggatgctgcaggacggctgtgagctgcgcatcaatgagaagatgcacgccggccagctgatgtctgtgagcagcagcctgcccatcgagggcaccccaccaccccagatgccccacttcaggaagtag

SEQ ID NO: 18365 - DNA, 843 bp, synthetic construct
  source 1..843: mol_type = other DNA; note = Synthetic coding sequence
atgctgtctgctgtggcccggggctaccagggctggttccacccctgtgcccggctgtctgtgaggatgagcagcacaggcatcgacagaaaaggagtgctggccaacagagtggccgtggtgacaggcagcaccagcggcatcggctttgccatcgcccggcggctggccagagatggagcccacgtggtgatcagcagcaggaagcagcagaatgtggaccgggccatggccaagctgcagggcgagggcctgtctgtggccggcatcgtgtgccacgtgggcaaggccgaggaccgggagcagctggtggccaaggccctggagcactgcggcggcgtggacttcctggtgtgcagcgctggggtgaaccccctggtgggcagcaccctgggcaccagcgagcagatctgggacaagatcctgtctgtgaatgtgaagagccctgccctgctgctgagccagctgctgccctacatggagaacagaagaggagctgtgatcctggtgagcagcattgctgcctacaaccctgtggtggccctgggcgtgtacaacgtgtccaagacagccctgctgggcctgaccaggaccctggccctggagctggcccccaaggacatccgggtgaactgtgtggtgcccggcatcatcaagacagacttcagcaaggtgttccatggaaatgaaagcctgtggaagaacttcaaggagcaccaccagctgcagagaattggagagagcgaggactgtgccggcatcgtgtccttcctgtgcagcccagatgccagctatgtgaatggagaaaatattgctgtggccggctacagcacccggctgtag

SEQ ID NO: 18366 - DNA, 909 bp, synthetic construct
  source 1..909: mol_type = other DNA; note = Synthetic coding sequence
atggtgacagagcaggaggtggatgccatcggccagaccctggtggaccccaagcagcccctgcaggcccgcttccgggccctcttcaccctgcggggcctgggcggccctggggccatcgcctggatcagccaggcctttgatgatgattctgccctgctgaagcatgagctggcctactgcctgggccagatgcaggatgcccgggccatccccatgctggtggatgtgctgcaggacacccggcaggagcccatggtgagacatgaagctggggaggccctgggcgccatcggggaccctgaggtgctggagatcctgaagcagtacagcagtgaccccgtcatcgaggtggccgagacctgccagctggccgtgcggcggctggagtggctgcagcagcacggcggggagcctgctgctggcccctacctgtctgtggaccctgcccctcctgctgaggagagagatgtgggccgcctgcgggaggccctgctggatgagagccggcccctgtttgagcgctaccgggccatgtttgccctgagaaatgccggcggggaggaggccgccctggccctggccgagggcctgcactgcggcagcgccctcttcagacatgaggtgggctacgtgctgggccagctgcagcacgaggccgctgtgccccagctggccgccgccctggcccgctgcacagagaaccccatggtgagacatgaatgtgccgaggccctgggcgccatcgcccggcctgcctgcctggccgccctgcaggcccacgcagatgatcctgagcgggtggtgcgggagagctgtgaggtggccctggacatgtatgagcacgagaccggccgggccttccagtatgcagatggcctggagcagctgcggggggcccccagctag

SEQ ID NO: 18367 - DNA, 3384 bp, synthetic construct
  source 1..3384: mol_type = other DNA; note = Synthetic coding sequence
atggaggtgcaggtgtcccaggccagcctgggctttgagctgacctctgtggagaagagcctgcgggagtggagccggctgagccgggaggtgattgcctggctgtgccccagcagccccaacttcatcctgaacttccccccacctccttctgccagctctgtgtccatggtgcagctgttcagcagccccttcggctaccagagccccagcggccacagcgaggaggagcgggagggcaacatgaagagcgccaagccccaggtgaaccacagccagcacggggagagccagagggccctgagccccctgcagagcaccctgagcagcgctgccagccccagccaggcctatgagacctacattgaaaatggcctcatctgcctgaagcacaagatccggaacatcgagaagaagaagctgaagctggaggactacaaggaccggctgaagagcggggagcacctgaacccagaccagctggaggccgtggagaagtatgaggaggtgctgcacaacctggagtttgccaaggagctgcagaagaccttcagcggcctgagcctggacctgctgaaggcccagaagaaggcccagaggcgggagcacatgctgaagctggaggccgagaagaagaagctgcggaccatcctgcaggtgcagtatgtgctgcagaacctgacccaggagcacgtgcagaaggacttcaagggcggcctgaatggagctgtgtacctgcccagcaaggagctggactacctgatcaagttcagcaagctgacctgcccagagagaaatgaaagcctgtctgtggaggaccagatggagcagagcagcctgtacttctgggacctgctggagggcagcgagaaggctgtggtgggcaccacctacaagcacctgaaggacctgctgagcaagctgctgaacagcggctactttgagagcatccctgtgcccaagaatgccaaggagaaggaggtgcccctggaggaggagatgctgatccagagcgagaagaagacccagctgagcaagacagaatctgtgaaggagagcgagagcctgatggagtttgcccagcctgagatccagccccaggagttcctgaacagacgctacatgacagaggtggactacagcaacaagcagggcgaggagcagccctgggaggccgactatgccaggaagcccaacctgcccaagcgctgggacatgctgacagagccagatggccaggagaagaagcaggagagcttcaagtcctgggaggccagcggcaagcaccaggaggtgtccaagccagctgtgtccctggagcagaggaagcaggacaccagcaagctgcggagcaccctgcctgaggagcagaagaagcaggagatcagcaagagcaagcccagccccagccagtggaagcaggacacccccaagagcaaggccggctacgtgcaggaggagcagaagaagcaggagacccccaagctgtggcctgtgcagctgcagaaggagcaggaccccaagaagcagacccccaagtcctggacccccagcatgcagagcgagcagaacaccaccaagtcctggaccacccccatgtgtgaggagcaggacagcaagcagcctgagacccccaagtcctgggagaacaacgtggagagccagaagcacagcctgaccagccagagccagatcagccccaagtcctggggcgtggccacagccagcctcatccccaatgaccagctgctgcccaggaagctgaacacagagcccaaggatgtgcccaagcctgtgcaccagcctgtgggcagcagcagcaccctgcccaaggaccctgtgctgaggaaggagaagctgcaggacctgatgacccagatccagggcacctgcaacttcatgcaggagagcgtgctggactttgacaagcccagcagcgccatccccaccagccagcccccatctgccaccccaggcagccctgtggccagcaaggagcagaacctgagcagccagagcgacttcctgcaggagcccctgcaggccaccagcagccctgtgacctgcagcagcaatgcctgcctggtgaccacagaccaggccagcagcggcagcgagacagagttcatgaccagcgagaccccagaggccgccatccccccaggcaagcagcccagcagcctggccagccccaacccccccatggccaagggcagcgagcagggcttccagagccccccagccagcagcagctctgtgaccatcaacacagcccccttccaggccatgcagacagtgttcaacgtgaatgcccccctgccccccaggaaggagcaggagatcaaggagagcccctacagccctggctacaaccagagcttcaccacagccagcacccagaccccaccccagtgccagctgcccagcatccacgtggagcagacagtgcacagccaggagacagctgccaactaccacccagatggcaccatccaggtgtccaatggcagcctggccttctacccagcccagaccaacgtgttcccccggcccacccagccctttgtgaacagccggggctctgtgcggggctgcacccggggcggccgcctcatcaccaacagctaccgcagccctgggggctacaagggctttgacacctaccggggcctgcccagcatcagcaatggaaactacagccagctgcagttccaggcccgggagtacagcggggccccctacagccagagggacaacttccagcagtgctacaagagaggaggcaccagcggcggcccccgggccaacagcagagctggctggagcgacagcagccaggtgagcagccctgagcgggacaatgagaccttcaacagcggggacagcggccagggcgacagccgctccatgacccctgtggatgtgcctgtgaccaacccagctgccaccatcctgcctgtgcacgtgtaccccctgccccagcagatgagggtggccttctctgctgcccggaccagcaacctggcccctggcaccctggaccagcccatcgtgtttgacctgctgctgaacaacctgggggagacctttgacctgcagctgggccgcttcaactgccctgtgaatggcacctacgtgttcatcttccacatgctgaagctggccgtgaatgtgcccctgtatgtgaacctgatgaagaatgaggaggtgctggtgtctgcctatgccaatgatggagccccagaccatgaaacagccagcaaccacgccatcctgcagctgttccagggcgaccagatctggctgcggctgcacagaggagccatctacggcagctcctggaagtacagcaccttcagcggctacctgctgtaccaggactag

SEQ ID NO: 18368 - DNA, 2448 bp, synthetic construct
  source 1..2448: mol_type = other DNA; note = Synthetic coding sequence
atggaggtgcgggccagcctgcagaaggtgtctggcagcagtgacagcgtggccaccatgaacagcgaggagtttgtgctggtgccccagtatgcagatgacaacagcaccaagcatgaggagaagccccagctgaagatcgtgtccaatggagatgagcagctggagaaggccatggaggagatcctgcgggacagcgagaagaggcccagcagcctgctggtggactgccagagcagcagcgagatcagtgaccacagctttggagacatcccagccagccagaccaacaagcccagcctgcagctgatcctggaccccagcaacacagagatcagcaccccccggcccagcagccctgggggcctgcctgaggaggacagcgtgctcttcaacaagctgacctacctgggctgcatgaaggtgagcagccccagaaatgaggtggaggccctgcgggccatggccaccatgaagagcagcagccagtaccccttccctgtgaccctgtatgtgcccaacgtgcctgagggctctgtgcgcatcatcgaccagagcagcaatgtggagatcgccagcttccccatctacaaggtgctcttctgtgcccggggccatgatggcaccacagagagcaactgctttgccttcacagagagcagccacggcagcgaggagttccagatccacgtgttcagctgtgagatcaaggaggccgtgagccgcatcctgtacagcttctgcacagccttcaagaggagcagccggcaggtgtctgatgtgaaggacagcgtcatccccaccccagacagtgatgtgttcaccttctctgtgtccctggaggtgaaggaggatgatggcaagggcaacttcagccctgtgcccaaggaccgggacaagttctacttcaagctgaagcagggcatcgagaagaaggtggtgatcaccgtgcagcagctgagcaacaaggagctggccatcgagcgctgcttcggcatgctgctgagccctggaagaaatgtgaagaacagcgacatgcacctgctggacatggagagcatgggcaagagctatgatggccgggcctacgtgatcaccggcatgtggaaccccaatgcccctgtgttcctggccctgaatgaggagacccccaaggacaagcaggtgtacatgacagtggccgtggacatggtggtgacagaggtggtggagcctgtgcgcttcctgctggagaccgtggtgcgggtgtacccagccaatgaacgcttctggtacttcagcaggaagaccttcacagagaccttcttcatgaggctgaagcagagcgagggcaagggccacaccaatgctggagatgccatctatgaggtggtgtccctgcagcgggagagtgacaaggaggagcctgtgacccccaccagcggcggcggccccatgagcccccaggatgatgaggccgaggaggagagtgacaatgagctgagcagcggcactggagatgtgtccaaggactgcccagagaagatcctgtacagctggggcgagctgctgggcaagtggcacagcaacctgggcgcccggcccaagggcctgagcaccctggtgaagtctggagtgcctgaggccctgcgggcagaggtgtggcagctgctggccggctgccacgacaaccaggccatgctggaccgctaccgcatcctgatcaccaaggacagcgcccaggagagcgtcatcacccgggacatccacaggaccttccctgcccatgactacttcaaggacacaggaggagatggccaggagagcctgtacaagatctgcaaggcctacagcgtgtatgatgaagatattggctactgccagggccagagcttcctggccgctgtgctgctgctgcacatgcctgaggagcaggccttctgtgtgctggtgaagatcatgtatgactatggcctgcgggacctgtacagaaacaactttgaggacctgcactgcaagttctaccagctggagcggctgatgcaggagcagctgcctgacctgcacagccacttcagtgacctgaacctggaggcccacatgtatgccagccagtggttcctgaccctcttcaccgccaagttccccctgtgcatggtgttccacatcatcgacctgctgctgtgtgagggcctgaacatcatcttccacgtggccctggccctgctgaagaccagcaaagaagacctgctgcaggccgactttgagggcgccctgaagttcttccgggtgcagctgcccaagcgctacagagcagaagaaaatgcccggcggctgatggagcaggcctgcaacatcaaggtgcccaccaagaagctgaagaagtatgagaaggagtaccagaccatgagggagagccagctgcagcaggaggaccccatggaccgctacaagtttgtgtacctgtag

SEQ ID NO: 18369 - DNA, 639 bp, synthetic construct
  source 1..639: mol_type = other DNA; note = Synthetic coding sequence
atggcccagacagacaagcccacctgcatccccccagagctgcccaagatgctgaaggagtttgccaaggccgccatccgggcccagccccaggacctgatccagtggggcgctgactactttgaggccctgagcagaggagagaccccacctgtgcgggagaggtctgagcgggtggccctgtgcaactgggccgagctgaccccagagctgctgaagatcctgcacagccaggtggccggccgcctcatcatccgggcagaggagctggcccagatgtggaaggtggtgaacctgcccacagacctcttcaacagcgtgatgaatgtgggccgcttcacagaggagattgagtggctgaagttcctggccctggcctgcagcgccctgggcgtgaccatcaccaagaccctgaagatcgtgtgtgaggtgctgagctgtgaccacaacggcggcctgccccgcatccccttcagcaccttccagttcctgtacacctacatcgccgaggtggatggagagatctgtgccagccacgtgtccaggatgctgaactacatcgagcaggaggtgattggaccagatggcctcatcaccgtgaatgacttcacccagaacccccgggtgtggctggagtag

SEQ ID NO: 18370 - DNA, 1938 bp, synthetic construct
  source 1..1938: mol_type = other DNA; note = Synthetic coding sequence
atggccagcctgctgcaggaccagctgaccacagaccaggacctgctgctgatgcaggagggcatgcccatgaggaaggtgcgcagcaagtcctggaagaagctgcgctacttccggctgcagaatgatggcatgacagtgtggcacgcccggcaggcccggggcagcgccaagcccagcttcagcatcagtgatgtggagaccatcagaaatggacatgattctgagctgctgcggagcctggccgaggagctgcccctggagcagggcttcaccatcgtgttccacggccgccgcagcaacctggacctgatggccaacagcgtggaggaggcccagatctggatgaggggcctgcagctgctggtggacctggtgacctccatggaccaccaggagcggctggaccagtggctgagtgactggttccagagaggagacaagaaccaggacggcaagatgtccttccaggaggtgcagaggctgctgcacctgatgaatgtggagatggaccaggagtatgccttcagcctcttccaggccgctgacaccagccagagcggcaccctggagggggaggagtttgtgcagttctacaaggccctgaccaagagagctgaggtgcaggagctgtttgagagcttcagcgcagatggccagaagctgaccctgctggagttcctggacttcctgcaggaggagcagaaggagcgggactgcaccagcgagctggccctggagctgattgacagatatgagcccagcgacagcggcaagctgcggcacgtgctgtccatggatggcttcctgagctacctgtgcagcaaggatggagacatcttcaacccagcctgcctgcccatctaccaggacatgacccagcccctgaaccactacttcatctgcagcagccacaacacctacctggtgggggaccagctgtgtggccagagctctgtggagggctacatccgggccctgaagaggggctgccgctgtgtggaggtggatgtgtgggatggccccagcggggagcctgtggtgtaccacggccacaccctgaccagccgcatcctcttcaaggatgtggtggccaccgtggcccagtatgccttccagaccagtgactaccctgtgatcctgagcctggagacccactgctcctgggagcagcagcagaccatggcccggcacctgacagagatcctgggggagcagctgctgagcaccaccctggatggagtgctgcccacccagctgcccagccctgaggagctgcggaggaagatcctggtgaagggcaagaagctgaccctggaggaggacctggagtatgaggaggaggaggccgagcctgagctggaggagagcgagctggccctggagagccagtttgaaacagagcctgagccccaggagcagaacctgcagaacaaggacaagaagaagaagagcaagcccatcctgtgcccagccctgagcagcctggtgatctacctgaagtctgtgtccttccgctccttcacccacagcaaggagcactaccacttctatgagatcagcagcttcagcgagaccaaggccaagaggctcatcaaggaggccggaaatgaatttgtgcagcacaacacctggcagctgagccgggtgtaccccagcggcctgaggacagacagcagcaactacaacccccaggagctgtggaatgccggctgccagatggtggccatgaacatgcagacagctggcctggagatggacatctgtgatggccacttccggcagaatggaggctgcggctacgtgctgaagccagacttcctgcgggacatccagagcagcttccaccctgagaagcccatcagccccttcaaggcccagaccctgagcatcccctaccgccacctgcagctgatcttccccatcaacagcgtgtag

SEQ ID NO: 18371 - DNA, 7554 bp, synthetic construct
  source 1..7554: mol_type = other DNA; note = Synthetic coding sequence
atggtgggggagagacatgctggggacctgatggtgcccctgggcccccggctgcaggcctacccagaggagctgatccggcagaggcctggccatgatggccaccctgagtacctgatccgctggagcgtgctgaagtgtggggaggtgggcaaggtgggcgtggaggagggcaaggccgagcacatcctgatgtggctgagcgcccctgaggtgtatgccaactgccccggcctgctgggggagcgggccctgagcaagggcctgcagcacgagcctgctggggtgtctggcagcttcccccgggaccccggcggcctggatgaggtggccatgggagagatggaggctgatgtgcaggccctggtgcggcgggccgcccggcagctggccgagagcggcacccccagcctgacagctgctgtgctgcacaccatccacgtgctgagcgcctatgccagcatcggccccctgactggagtcttccgggagactggagccctggacctgctgatgcacatgctgtgcaaccctgagccccagatcagaagatctgctgggaagatgctgcaggccctggccgcccatgatgctggcagccgggcccacgtgctgctgagcctgagccagcaggacggcatcgagcagcacatggactttgacagccgctacaccctgctggagctgtttgctgagaccaccagcagcgaggagcactgcatggcctttgagggcatccacctgccccagatccctgggaagctgctcttcagcctggtgaagcgctacctgtgtgtgaccagcctgctggaccagctgaacagcagccctgagctgggcgctggggaccagagcagcccctgtgccacccgggagaagagccggggccagcgggagctggagttctccatggctgtgggcaacctgatcagcgagctggtgcgctccatgggctgggccaggaacctgtctgagcagggcatgagccccccccggcccaccaggagcatcttccagccctacatcagcggccccagcctgctgctgcccaccatcgtgaccaccccccggcggcagggctgggtgttccggcagaggtctgagttcagcagccgcagcggctatggagaatatgtgcagcagaccctgcagcccggcatgagggtgaggatgctggatgattatgaggagatctctgctggagatgaaggagagttccggcagagcaacaacggcatcccccctgtgcaggtgttctggcagagcactggaagaacctactgggtgcactggcacatgctggagatcctgggccctgaggaggccacagaggacaaggccagcgctgctgtggagaagggagctggggccaccgtgctgggcacagccttccccagctgggactggaaccccatggatggcctgtaccccctgccctacctgcagcctgagccccagaagaatgaaagagtgggctacctgacccaggccgagtggtgggagctgctcttcttcatcaagaagctggacctgtgtgagcagcagcccatcttccagaacctgtggaagaacctggatgagaccctgggggagaaggccctgggggagatctctgtgtctgtggagatggccgagagcctgctgcaggtgctgagcagcagatttgagggcagcaccctgaatgacctgctgaacagccagatctacaccaagtatggcctgctgagcaatgagcccagcagcagcagcaccagcaggaaccacagctgcaccccagaccctgaggaggagagcaagtctgaggccagcttcagcgaggaggagacagagagcctgaaggccaaggccgaggcccccaagacagaagctgagcccaccaagaccaggacagagacccccatggcccagagcgacagccagctgttcaaccagctgctggtgacagagggcatgaccctgcccacagagatgaaggaggccgccagcgagatggcccgggccctgcggggccctggccccaggagcagcctggaccagcacgtggccgctgtggtggccaccgtgcagatcagcagcctggacaccaacctgcagctgagcggcctgagcgccctgagccaggccgtggaggaggtgacagagcgggaccaccccctggtgcggccagacaggagcctgcgggagaagctggtgaagatgctggtggagctgctgaccaaccaggtgggggagaagatggtggtggtgcaggccctgcggctgctgtacctgctgatgaccaagcatgagtggaggcccctgtttgcccgggagggcggcatctatgctgtgctggtgtgcatgcaggagtacaagacctctgtgctggtgcagcaggccggcctggccgccctgaagatgctggccgtggccagcagcagcgagatccccacctttgtgacaggccgggacagcatccacagcctgtttgatgcccagatgacccgggagatctttgccagcattgattctgccaccaggcctggcagcgagagcctgctgctgactgtgcctgctgctgtgatcctgatgctgaacacagagggctgcagcagcgctgccagaaatggcctgctgctgctgaacctgctgctgtgcaaccaccacaccctgggggaccagatcatcacccaggagctgcgggacaccctcttccgccacagcggcatcgcccccaggacagagcccatgcccaccaccaggaccatcctgatgatgctgctgaaccgctacagcgagcccccaggcagccctgagcgggccgccctggagacccccatcatccagggccaggacggcagccctgagctgctgatccgcagcctggtgggcggccccagcgctgagctgctgctggacctggagcgggtgctgtgccgggagggcagccctggaggagctgtgcggcccctgctgaagaggctgcagcaggagacccagcccttcctgctgctgctgcggaccctggatgcccctggccccaacaagaccctgctgctgtctgtgctgcgggtcatcacccggctgctggacttccctgaggccatggtgctgccctggcatgaggtgctggagccctgcctgaactgcctgagcggccccagcagtgacagcgagatcgtgcaggagctgacctgcttcctgcaccggctggcctccatgcacaaggactatgctgtggtgctgtgctgcctgggcgccaaggagatcctgagcaaggtgctggacaagcacagcgcccagctgctgctgggctgtgagctgcgggacctggtgacagaatgtgagaagtatgcccagctgtacagcaacctgaccagcagcatcctggccggctgcatccagatggtgctgggccagatcgaggaccacaggaggacccaccagcccatcaacatccccttctttgatgtgttcctgcggcacctgtgccagggcagctctgtggaggtgaaggaggacaagtgctgggagaaggtggaggtgagcagcaacccccaccgggccagcaagctgacagaccacaaccccaagacctactgggagagcaatggcagcacaggcagccactacatcaccctgcacatgcaccggggcgtgctggtgcggcagctgaccctgctggtggccagcgaggacagcagctacatgcctgcccgggtggtggtgtttggaggagacagcaccagctgcattggaacagagctgaacacagtgaatgtgatgcccagcgccagcagggtcatcctgctggagaacctgaaccgcttctggcccatcatccagatccgcatcaagcgctgccagcagggcggcatcgacaccagggtgcggggcgtggaggtgctgggccccaagcccaccttctggcccctcttccgggagcagctgtgcaggaggacctgcctcttctacaccatccgggcccaggcctggagccgggacattgctgaggaccaccggcggctgctgcagctgtgcccccggctgaacagagtgctgcggcatgagcagaactttgctgaccgcttcctgcctgatgatgaagctgcccaggccctgggcaagacctgctgggaggccctggtgagccccctggtgcagaacatcaccagcccagatgctgagggcgtgtctgccctgggctggctgctggaccagtacctggagcagcgggagaccagcaggaaccccctgagcagagctgccagctttgccagccgggtgcggcggctgtgccacctgctggtgcacgtggagcccccacctggccccagccctgagcccagcacccggcccttcagcaagaacagcaagggccgggacaggagccctgcccccagccctgtgctgcccagcagcagcctgaggaacatcacccagtgctggctgtctgtggtgcaggagcaggtgagccgcttcctggccgccgcctggagggccccagactttgtgccccgctactgcaagctgtatgagcacctgcagagagctggcagcgagctgtttggcccccgggccgccttcatgctggccctgcggagcggcttcagcggggccctgctgcagcagagcttcctgacagctgcccacatgtctgagcagtttgcccgctacatcgaccagcagatccagggcggcctcatcggcggggcccctggggtggagatgctgggccagctgcagaggcacctggagcccatcatggtgctgagcggcctggagctggccaccacctttgagcacttctaccagcactacatggctgaccggctgctgagctttggcagctcctggctggagggcgctgtgctggagcagatcggcctgtgcttccccaaccggctgccccagctgatgctgcagagcctgagcaccagcgaggagctgcagaggcagttccacctgttccagctgcagaggctggacaagctgttcctggagcaggaggatgaggaggagaagaggctggaggaggaggaggaggaggaggaggaggaggaggccgagaaggagctgttcatcgaggaccccagccctgccatcagcatcctggtgctgagcccccgctgctggcctgtgagccccctgtgctacctgtaccaccccaggaagtgcctgcccacagagttctgtgatgccctggaccgcttcagcagcttctacagccagagccagaaccaccctgtgctggacatgggcccccaccggcggctgcagtggacctggctgggccgggcagagctgcagtttgggaagcagatcctgcacgtgtccacagtgcagatgtggctgctgctgaagttcaaccagacagaggaggtgtctgtggagaccctgctgaaggacagcgacctgagccctgagctgctgctgcaggccctggtgcccctgaccagcggaaatggccccctgaccctgcacgagggccaggacttcccccacggcggcgtgctgcggctgcacgagcccggcccccagaggtctggagaggccctgtggctgatccccccccaggcctacctgaatgtggagaaggatgagggccgcaccctggagcagaagaggaacctgctgagctgcctgctggtgcgcatcctgaaggcccatggagagaagggcctgcacatcgaccagctggtgtgcctggtgctggaggcctggcagaagggccccaaccccccaggcaccctgggccacacagtggccggcggcgtggcctgcaccagcacagatgtgctgagctgcatcctgcacctgctgggccagggctacgtgaagagaagagatgaccggccccagatcctgatgtatgctgcccctgagcccatgggcccctgccggggccaggctgatgtgcccttctgtggcagccagagcgagaccagcaagcccagccctgaggccgtggccaccctggccagcctgcagctgcctgctggccgcaccatgagcccccaggaggtggagggcctgatgaagcagacagtgcggcaggtgcaggagaccctgaacctggagccagatgtggcccagcacctgctggcccacagccactggggcgctgagcagctgctgcagagctacagcgaggaccctgagcccctgctgctggccgccggcctgtgtgtgcaccaggcccaggccgtgcctgtgcggccagaccactgccctgtgtgtgtgagccccctgggctgtgatgatgacctgcccagcctgtgctgcatgcactactgctgcaagagctgctggaatgagtacctgaccaccagaattgagcagaacctggtgctgaactgcacctgccccatcgctgactgcccagcccagcccactggagccttcatccgggccatcgtgagcagccctgaggtgatcagcaaatatgagaaggccctgctgcggggctacgtggagagctgcagcaacctgacctggtgcaccaacccccagggctgtgaccgcatcctgtgccggcagggcctgggctgcggcaccacctgcagcaaatgtggctgggccagctgcttcaactgcagcttccctgaggcccactacccagccagctgtggccacatgagccagtgggtggatgatggcggctactatgatggcatgtctgtggaggcccagagcaagcacctggccaagctgatcagcaagcgctgccccagctgccaggcccccatcgagaagaatgaaggctgcctgcacatgacctgtgccaagtgcaaccacggcttctgctggcgctgcctgaagtcctggaagcccaaccacaaggactactacaactgcagcgccatggtgtccaaggccgcccggcaggagaagcgcttccaggactacaatgaacgctgcaccttccaccaccaggcccgggagtttgctgtgaacctgaggaacagagtgtctgccatccacgaggtgcccccacccaggagcttcaccttcctgaatgatgcctgccagggcctggagcaggccaggaaggtgctggcctatgcctgtgtgtacagcttctacagccaggatgctgagtacatggatgtggtggagcagcagacagagaacctggagctgcacaccaatgccctgcagatcctgctggaggagaccctgctgcgctgccgggacctggccagcagcctgcggctgctgcgggctgactgcctgagcacaggcatggagctgctgcggcgcatccaggagcggctgctggccatcctgcagcacagcgcccaggacttccgggtgggcctgcagagccccagcgtggaggcctgggaggccaagggccccaacatgcctggcagccagccccaggccagcagcggccctgaggccgaggaggaggaggaggatgatgaagatgatgtgcctgagtggcagcaggatgaatttgatgaggagctggacaatgacagcttctcctatgatgaaagtgagaacctggaccaggagaccttcttctttggagatgaggaggaggatgaagatgaggcctatgactag

SEQ ID NO: 18372 - DNA, 1476 bp, synthetic construct
  source 1..1476: mol_type = other DNA; note = Synthetic coding sequence
atggaggagatcccagcccaggaggccgccggcagcccccgggtgcagttccagagcctggagacccagagtgaatgtctgagccctgagccccagtttgtgcaggacacagacatggagcagggcctgactggagatggagagacccgggaggagaacaagctgctgatccccaagcagaagatcagcgaggaggtgcacagctacaaggtgcgggtgggccgcctgaagcatgacatcacccaggtgcctgagacccgggaggtgtacaagtcagaagatcggctggagcggctgcaggagatcctgaggaagttcctgtacctggagcgggagttccggcagatcaccatcagcaaggagaccttcaccagcgagaagaacaatgaatgccacgagcctgagaagagcttcagcctggacagcaccattgatgctgaccagagggtgctgcgcatccagaacacagatgacaatgacaagtatgacatgtccttcaaccagaacagcgccagcggcaagcatgagcacctgaacctgacagaggacttccagagcagcgagtgcaaggagagcctgatggacctgagccacctgaacaagtgggagagcatccccaacacagagaagagctacaagtgtgatgtgtgtgggaagatcttccaccagagcagcgccctgaccaggcaccagaggatccacacccgggagaagccctacaagtgcaaggaatgtgagaagagcttcagccagagcagcagcctgagccgccacaagaggatccacacccgggagaagccctacaagtgtgaggccagtgacaagagctgtgaggccagtgacaagagctgcagccccagcagcggcatcatccagcacaagaagatccacacccgggccaagagctacaagtgcagcagctgtgagagggtcttcagccgctctgtgcacctgacccagcaccagaagatccacaaggagatgccctgcaagtgcaccgtgtgtggcagtgacttctgccacaccagctacctgctggagcaccagagggtgcaccacgaggagaaggcctatgaatatgatgaatatggcctggcctacatcaagcagcagggcatccacttccgggagaagccctacacctgcagtgaatgtgggaaggacttccggctgaacagccacctgatccagcaccagaggatccacactggagagaaggcccatgaatgtaatgaatgtgggaaggccttcagccagaccagctgcctgatccagcaccacaagatgcacaggaaggagaagagctatgaatgtaatgaatatgagggcagcttcagccacagcagtgacctgatcctgcagcaggaggtgctgacccggcagaaggcctttgactgtgatgtgtgggagaagaacagcagccagagggcccacctggtgcagcaccagagcatccacaccaaggagaacagctag

SEQ ID NO: 18373 - DNA, 2709 bp, synthetic construct
  source 1..2709: mol_type = other DNA; note = Synthetic coding sequence
atgtctgagttccgcatccaccatgatgtgaatgagctgctgagcctgctgcgggtgcacggcggagatggagctgaggtgtacatcgacctgctgcagaagaacagaacaccctacgtgaccaccaccgtgtctgcccacagcgccaaggtgaagattgctgagttcagcaggaccccagaggacttcctgaagaagtatgatgagctgaagagcaagaacaccaggaacctggaccccctggtgtacctgctgagcaagctgacagaggacaaggagaccctgcagtacctgcagcagaatgccaaggagcgggcagagctggccgctgctgctgtgggcagcagcaccaccagcatcaacgtgcctgctgctgccagcaagatctccatgcaggagctggaggagctgaggaagcagctgggctctgtggccaccggcagcaccctgcagcagagcctggagctgaagaggaagatgctgcgggacaagcagaacaagaagaacagcggccagcacctgcccatcttccctgcctgggtgtatgaaagacctgccctgattggagacttcctgattggagctggcatcagcacagacacagccctgcccatcggcaccctgcccctggccagccaggagagcgctgtggtggaggacctgctgtatgtgctggtgggcgtggatggccgctacgtgtctgcccagcccctggccggccggcagagcaggaccttcctggtggaccccaacctggacctgagcatccgggagctggtgcaccgcatcctgcctgtggccgccagctacagcgctgtgacccgcttcatcgaggagaagagcagctttgaatatggccaggtgaaccacgccctggccgccgccatgaggaccctggtgaaggagcacctgatcctggtgtcccagctggagcagctgcaccggcagggcctgctgagcctgcagaagctgtggttctacatccagcctgccatgaggaccatggacatcctggccagcctggccacctctgtggacaagggagaatgtctgggcggcagcaccctgagcctgctgcatgaccgctccttctcctacacaggagacagccaggcccaggagctgtgcctgtacctgaccaaggccgccagcgccccctactttgaggtgctggagaagtggatctaccggggcatcatccatgacccctacagcgagttcatggtggaggagcacgagctgaggaaggagcgcatccaggaggactacaatgacaagtactgggaccagcgctacaccatcgtgcagcagcagatccccagcttcctgcagaagatggctgacaagatcctgagcacaggcaagtacctgaatgtggtgcgggagtgtggccatgatgtgacctgccctgtggccaaggagatcatctacaccctgaaggagcgggcctacgtggagcagatcgagaaggccttcaactatgccagcaaggtgctgctggacttcctgatggaggagaaggagctggtggcccacctgcggagcatcaagcgctacttcctgatggaccagggcgacttctttgtgcacttcatggacctggccgaggaggagctgaggaagcctgtggaggacatcaccccaccccggctggaggccctgctggagctggccctgaggatgagcacagccaacacagaccccttcaaggatgacctgaagattgacctgatgcctcatgacctgatcacccagctgctgcgggtgctggccatcgagaccaagcaggagaaggccatggcccatgctgaccccacagagctggccctgagcggcctggaggccttctcctttgactacatcgtgaagtggcccctgagcctcatcatcaacaggaaggccctgacccgctaccagatgctgttccgccacatgttctactgcaagcacgtggagcggcagctgtgcagcgtgtggatcagcaacaagacagccaagcagcacagcctgcacagcgcccagtggtttgctggggccttcaccctgcggcagaggatgctgaactttgtgcagaacatccagtactacatgatgtttgaggtgatggagcccacctggcacatcctggagaagaacctgaagagcgccagcaacattgatgatgtgctgggccaccacacaggcttcctggacacctgcctgaaggactgcatgctgaccaaccctgagctgctgaaggtgttcagcaagctgatgtctgtgtgtgtgatgttcaccaactgcatgcagaagttcacccagagcatgaagctggatggagagctgggcggccagaccctggagcacagcacagtgctgggcctgcctgctggagctgaggagcgggccaggaaggagctggccaggaagcacctggccgagcacgccgacacagtgcagctggtgtctggctttgaggccaccatcaacaagtttgacaagaacttcagcgcccacctgctggacctgctggcccggctgagcatctacagcaccagtgactgtgagcacggcatggccagcgtcatcagccggctggacttcaacggcttctacacagagcggctggagcggctgtctgctgagaggagccagaaggccaccccccaggtgcctgtgctgcggggccccccagccccagccccccgggtggccgtgacagcccagtag

SEQ ID NO: 18374 - DNA, 2289 bp, synthetic construct
  source 1..2289: mol_type = other DNA; note = Synthetic coding sequence
atggccatgcaggagaagtaccccacagagggcatcagccacgtgaccagccccagcagtgatgtgatccagaagggcagcagcctgggcacagagtggcagacccctgtgatcagcgagcccttccgcagccgcttcagccgctgcagctctgtggccgacagcggggacacagccatcggcaccagctgcagcgacattgctgaggacttctgcagcagcagcggcagcccccccttccagcccatcaagagccacgtgaccatccccacagcccacgtgatgcccagcaccctgggcaccagccctgccaagcccaacagcacccctgtgggccccagcagcagcaagctgcccctgagcggcctggccgagagcgtgggcatgaccagaaatggagacctgggcgccatgaagcacagccctggcctgagccgggacctgatgtacttcagcggggccactggagaaaatggcatcgagcagagctggttccctgctgtgggccacgagcggcaggaggaggccaggaagtttgacatccccagcatggagagcaccctgaaccagagcgccatgatggagaccctgtacagcgacccccaccaccgggtgcgcttccacaaccccaggaccagcaccagcaaggagctgtacagagtgctgcctgaggccaagaaggcccctggcagcggggctgtgtttgaaagaaatggcccccacagcaacagcagtggagtgctgcccctgggcctgcagcctgcccctggcctgagcaagcccctgcccagccaggtgtggcagcccagcccagacacctggcacccccgggagcagagctgtgagctgagcacctgccggcagcagctggagctgatccggctgcagatggagcagatgcagctgcagaatggagccatctgccaccaccctgctgccttcggccccagcctgcccatcctggagcccgcccagtggatcagcatcctgaacagcaatgagcacctgctgaaggagaaggagctgctgattgacaagcagaggaagcacatcagccagctggagcagaaggtgcgggagagcgagctgcaggtgcacagcgccctgctgggccgcccagccccctttggagatgtgtgcctgctgcggctgcaggagctgcagcgggagaacaccttcctgcgggcccagtttgcccagaagacagaggccctgagccgggagaagattgacctggagaagaagctgagcgccagcgaggtggaggtgcagctgatccgggagagcctgaaggtggccctgcagaagcacagcgaggaggtgaagaagcaggaggagcgggtgaagggccgggacaagcacatcaacaacctgaagaagaagtgccagaaggagagcgagcagaaccgggagaagcagcagagaattgagaccctggagcgctacctggccgacctgcccaccctggaggaccaccagaagcagagccagcagctgaaggacagcgagctgaagagcacagagctgcaggagaaggtgacagagctggagagcctgctggaggagacccaggccatctgccgggagaaggagatccagctggagagcctgcggcagcgggaggccgagttcagcagcgctggccacagcctgcaggacaagcagagcgtggaggagaccagcggggagggccctgaggtggagatggagagctggcagaagagatatgacagcctgcagaagatcgtggagaagcagcagcagaagatggaccagctgcggagccaggtgcagagcctggagcaggaggtggcccaggaggagggcaccagccaggccctgcgggaggaggcccagaggcgggacagcgccctgcagcagctgaggacagctgtgaaggagctgtctgtgcagaaccaggacctgattgagaagaacctgaccctgcaggagcacctgcggcaggcccagcccggcagcccccccagcccagacacagcccagctggccctggagctgcaccaggagctggccagctgcctgcaggacctgcaggccgtgtgcagcatcgtgacccagagggcccagggccatgaccccaacctgagcctgctgctgggcatccacagcgcccagcaccctgagacccagctggacctgcagaagccagatgtgatcaagaggaagctggaggaggtgcagcagctgcggcgggacatcgaggacctgcggaccaccatgtctgacagatatgcccaggacatgggagagaactgtgtgacccagtag

SEQ ID NO: 18375 - DNA, 1443 bp, synthetic construct
  source 1..1443: mol_type = other DNA; note = Synthetic coding sequence
atgattgtggccgacagtgaatgtagagctgagctgaaggactacctgcgctttgcccctgggggcgtgggggacagcggccctggagaggagcagcgggagagccgggcccggcggggcccccggggccccagcgccttcatccctgtggaggaggtgctgcgggagggcgctgagagcctggagcagcacctgggcctggaggccctgatgagcagcggccgggtggacaacctggccgtggtgatgggcctgcacccagactacttcaccagcttctggaggctgcactacctgctgctgcacacagatggccccctggccagctcctggaggcactacatcgccatcatggccgccgcccggcaccagtgcagctacctggtgggcagccacatggccgagttcctgcagacaggaggagaccctgagtggctgctgggcctgcaccgggcccctgagaagctgaggaagctgtctgagatcaacaagctgctggcccaccggccctggctgatcaccaaggagcacatccaggccctgctgaagacaggagagcacacctggagcctggccgagctgatccaggccctggtgctgctgacccactgccacagcctgagcagctttgtgtttggctgcggcatcctgcctgaaggagatgctgatggcagccctgccccccaggcccccaccccaccttctgagcagagcagcccccccagccgggaccccctgaacaacagcggcggctttgagagcgccagagatgtggaggccctgatggagaggatgcagcagctgcaggagagcctgctgagagatgagggcaccagccaggaggagatggagagcagatttgagctggagaagtctgagagcctgctggtgacccccagcgctgacatcctggagcccagcccccacccagacatgctgtgctttgtggaggaccccaccttcggctatgaggacttcacccggcggggggcccaggccccacccaccttccgggcccaggactacacctgggaggaccacggctacagcctcatccagaggctgtacccagagggcggccagctgctggatgagaagttccaggccgcctacagcctgacctacaacaccatcgccatgcacagcggcgtggacacctctgtgctgcggcgggccatctggaactacatccactgtgtgtttggcatccgctatgatgattatgactatggagaggtgaaccagctgctggagaggaacctgaaggtgtacatcaagacagtggcctgctacccagagaagaccaccaggaggatgtacaacctcttctggaggcacttccgccacagcgagaaggtgcacgtgaacctgctgctgctggaggccaggatgcaggccgccctgctgtatgccctgcgggccatcacccgctacatgacctag

SEQ ID NO: 18376 - DNA, 633 bp, synthetic construct
  source 1..633: mol_type = other DNA; note = Synthetic coding sequence
atgcctggggtgaagctgaccacccaggcctactgcaagatggtgctgcatggagccaagtacccccactgtgctgtgaatggcctgctggtggccgagaagcagaagcccaggaaggagcacctgcccctgggcggccctggggcccaccacaccctgtttgtggactgcatccccctcttccacggcaccctggccctggcccccatgctggaggtggccctgaccctgattgacagctggtgcaaggaccacagctatgtgattgctggctactaccaggccaatgaaagagtgaaggatgccagccccaaccaggtggccgagaaggtggccagcagaattgctgagggcttcagtgacacagccctgatcatggtggacaacaccaagttcaccatggactgtgtggcccccaccatccacgtgtatgagcaccacgagaaccgctggcgctgccgggacccccaccacgactactgtgaggactggccagaggcccagaggatcagcgccagcctgctggacagccgctcctatgagaccctggtggactttgacaaccacctggatgacatcagaaatgactggaccaaccctgagatcaacaaggctgtgctgcacctgtgctag

SEQ ID NO: 18377 - DNA, 1059 bp, synthetic construct
  source 1..1059: mol_type = other DNA; note = Synthetic coding sequence
atgacagaggccggcaagctgcccctgcccctgcccccccggctggactggtttgtgcacacccagatgggccagctggcccaggatggagtgcctgagtggttccacggggccatcagccgggaggatgctgagaacctgctggagagccagcccctgggcagcttcctgatccgggtgagccacagccacgtgggctacaccctgagctacaaggcccagagcagctgctgccacttcatggtgaagctgctggatgatggcaccttcatgatccctggagagaaggtggcccacaccagcctggatgccctggtgaccttccaccagcagaagcccatcgagccccggcgggagctgctgacccagccctgccggcagaaggaccctgccaacgtggactatgaggacctcttcctgtacagcaatgctgtggccgaggaggccgcctgccctgtgtctgcccctgaggaggccagccccaagcctgtgctgtgccaccagagcaaggagaggaagcccagcgctgagatgaaccgcatcaccaccaaggaggccaccagcagctgcccccccaagagccccctgggggagacccggcagaagctgtggaggagcctgaagatgctgcctgagcggggccagagggtgcggcagcagctgaagagccacctggccaccgtgaacctgagcagcctgctggatgtgagaagaagcaccgtcatcagcggccctggcaccgggaagggcagccaggaccacagcggggaccccaccagcggggaccggggctacacagacccctgtgtggccaccagcctgaagagccccagccagccccaggcccccaaggacaggaaggtgcccaccaggaaggccgagaggtctgtgtcctgcatcgaggtgacccctggggaccgctcctggcaccagatggtggtgcgggccctgagcagccaggagagcaagccagagcaccagggcctggccgagccagaaaatgaccagctgcctgaggagtaccagcagcccccaccatttgcccctggctactgctag

SEQ ID NO: 18378 - DNA, 480 bp, synthetic construct
  source 1..480: mol_type = other DNA; note = Synthetic coding sequence
atgacccactgctgcagcccctgctgccagcccacctgctgcaggaccacctgctggaagcccaccaccgtgaccacctgcagcagcaccccctgctgccagcccagctgctgcgtgagcagctgctgccagccctgctgccggcccacctgctgccagaacacctgctgccagcccatctgtgtgaccagctgctgccagcccagctgctgcagcaccccctgctgccagcccacctgctgcggccagaccagctgtggcagcagctgtggccagagcagcagctgtgcccctgtgtactgcaggaggacctgctaccaccccaccaccgtgtgcctgcccggctgcctgaaccagagctgtggcagcaactgctgccagccctgctgcaggcctgcctgctgtgagaccacctgctgcaggaccacctgcttccagcccacctgtgtgagcagctgctgccagcccagctgctgctag

SEQ ID NO: 18379 - DNA, 615 bp, synthetic construct
  source 1..615: mol_type = other DNA; note = Synthetic coding sequence
atggaccccaaggacaggaagaagatccagttctctgtgcctgccccacccagccagctggacccccggcaggtggagatgatcagaagaagaagacccaccccagccatgctgttccggctgtctgagcacagcagccctgaggaggaggccagcccccaccagagggccagcggggagggccaccacctgaagagcaagaggcccaacccctgtgcctacaccccacccagcctgaaggctgtgcagagaattgctgagagccacctgcagagcatcagcaacctgaatgaaaaccaggccagcgaggaggaggatgagctgggggagctgcgggagctgggctacccccgggaggaggatgaggaggaggaggaggatgatgaggaggaggaggaggaggaggacagccaggccgaggtgctgaaggtgatccggcagagcgctggccagaagaccacctgtggccagggcctggagggcccctgggagcggcccccacccctggatgagagcgagagagatggcggcagcgaggaccaggtggaggaccctgccctgtctgagcccggggaggagccccagaggcccagccccagcgagcccggcacctag

SEQ ID NO: 18380 - DNA, 2061 bp, synthetic construct
  source 1..2061: mol_type = other DNA; note = Synthetic coding sequence
atgacagatgccctgctgcctgctgccccccagcccctggagaaggaaaatgatggctacttcaggaagggctgcaaccccctggcccagacaggccgcagcaagctgcagaaccagagagctgccctgaaccagcagatcctgaaggctgtgaggatgaggactggagctgagaacctgctgaaggtggccaccaacagcaaggtgcgggagcaggtgcggctggagctgagctttgtgaacagcgacctgcagatgctgaaggaggagctggagggcctgaacatctctgtgggcgtgtaccagaacacagaggaggccttcaccatccccctcatccccctgggcctgaaggagaccaaggatgtggactttgctgtggtgctgaaggacttcatcctggagcactacagtgaagatggctacctgtatgaagatgaaattgctgacctgatggacctgcggcaggcctgcaggacccccagcagagatgaggccggcgtggagctgctgatgacctacttcatccagctgggctttgtggagagccgcttcttcccccccacccggcagatgggcctgctcttcacctggtatgacagcctgactggagtgcctgtgtcccagcagaacctgctgctggagaaggcctctgtgctcttcaacacaggagccctgtacacccagatcggcacccgctgtgaccggcagacccaggccggcctggagagcgccattgatgccttccagagagctgctggggtgctgaactacctgaaggacaccttcacccacacccccagctatgacatgagccctgccatgctgtctgtgctggtgaagatgatgctggcccaggcccaggagagcgtgtttgagaagatcagcctgcccggcatcagaaatgagttcttcatgctggtgaaggtggcccaggaggccgccaaggtgggggaggtgtaccagcagctgcacgccgccatgagccaggcccctgtgaaggagaacatcccctacagctgggccagcctggcctgtgtgaaggcccaccactatgctgccctggcccactacttcaccgccatcctgctgattgaccaccaggtgaagccaggcacagacctggaccaccaggagaagtgcctgagccagctgtatgaccacatgcctgagggcctgacccccctggccaccctgaagaatgaccagcagaggcggcagctgggcaagagccacctgcggcgggccatggcccaccacgaggagagcgtgcgggaggccagcctgtgcaagaagctgcggagcattgaggtgctgcagaaggtgctgtgtgccgcccaggagaggagccggctgacctacgcccagcaccaggaggaggatgacctgctgaacctgattgatgcccccagcgtggtggccaagacagagcaggaggtggacatcatcctgccccagttcagcaagctgactgtgacagacttcttccagaagctgggccccctgtctgtgttcagcgccaacaagcgctggaccccacccaggagcatccgcttcaccgctgaggagggggacctgggcttcaccctgcggggaaatgcccctgtgcaggtgcacttcctggacccctactgcagcgcctctgtggccggggcccgggagggggactacatcgtgtccatccagctggtggactgcaagtggctgaccctgtctgaggtgatgaagctgctgaagagctttggagaagatgaaattgagatgaaggtggtgtccctgctggacagcaccagctccatgcacaacaagagcgccacctacagcgtgggcatgcagaagacctacagcatgatctgcctggccattgatgatgatgacaagacagacaagaccaagaagatcagcaagaagctgtccttcctgtcctggggcaccaacaagaaccggcagaagagcgccagcaccctgtgcctgcccagcgtgggcgccgcccggccccaggtgaagaagaagctgcccagccccttcagcctgctgaacagcgacagctcctggtactag

SEQ ID NO: 18381 - DNA, 1254 bp, synthetic construct
  source 1..1254: mol_type = other DNA; note = Synthetic coding sequence
atgcccctgtatgagggcctgggcagcggcggggagaagacagctgtggtgattgacctgggggaggccttcaccaagtgtggctttgctggggagaccggcccccgctgcatcatccccagcgtcatcaagagagctggcatgcccaagcctgtgcgggtggtgcagtacaacatcaacacagaggagctgtacagctacctgaaggagttcatccacatcctgtacttccgccacctgctggtgaacccccgggacagaagagtggtgatcatcgagagcgtgctgtgccccagccacttccgggagaccctgaccagggtgctcttcaagtactttgaggtgcccagcgtgctgctggcccccagccacctgatggccctgctgaccctgggcatcaacagcgccatggtgctggactgtggctaccgggagagcctggtgctgcccatctatgagggcatccctgtgctgaactgctggggcgccctgcccctgggcggcaaggccctgcacaaggagctggagacccagctgctggagcagtgcaccgtggacacctctgtggccaaggagcagagcctgcccagcgtgatgggctctgtgcctgagggcgtgctggaggacatcaaggcccggacctgctttgtgtctgacctgaagaggggcctgaagatccaggccgccaagttcaacattgatggcaacaatgaaagacccagccccccaccaaatgtggactaccccctggatggagagaagatcctgcacatcctgggcagcatccgggacagcgtggtggagatcctgtttgagcaggacaatgaggagcagagcgtggccaccctcatcctggacagcctcatccagtgccccatcgacaccaggaagcagctggccgagaacctggtggtgattggaggcacctccatgctgcccggcttcctgcaccggctgctggccgagatccgctacctggtggagaagcccaagtacaagaaggccctgggcaccaagaccttccgcatccacaccccaccagccaaggccaactgtgtggcctggctgggcggggccatctttggagccctgcaggacatcctgggcagccgctctgtgtccaaggagtactacaaccagacaggccgcatcccagactggtgcagcctgaacaacccccccctggagatgatgtttgatgtgggcaagacccagccccccctgatgaagagggccttcagcacagagaagtag

SEQ ID NO: 18382 - DNA, 2643 bp, synthetic construct
  source 1..2643: mol_type = other DNA; note = Synthetic coding sequence
atgagccagcctgctgggggccgcaggaagcccaggaccctgggcccccctgtgtgcagcatccggcccttcaagagcagcgagcagtacctggaggccatgaaggaggacctggccgagtggctgcgggacctgtatggcctggacattgatgctgccaacttcctgcaggtgctggagaccggcctggtgctgtgccagcacgccaacgtggtgacagatgctgccctggccttcctggccgaggccccagcccaggcccagaagatccccatgccccgggtgggcgtgtcctgcaatggagctgcccagcccggcaccttccaggcccgggacaacgtgagcaacttcatccagtggtgcaggaaggagatgggcatccaggaggtgctgatgtttgaaacagaggacctggtgctgaggaagaatgtgaagaatgtggtgctgtgcctgctggagctgggccggcgggcctggaggtttggagtggccgcccccaccctggtgcagctggaggaggagattgaggaggaggtgcggcgggagctggccctgcccccaccagaccccagccccccagccccaccccggcggcagccctgccacttcaggaacctggaccagatggtgcagagcctggtgagccactgcacctgccctgtgcagttctccatggtgaaggtgtctgagggcaagtacagagtgggggacagcaacaccctcatcttcatccgcatcctgaggaaccacgtgatggtgcgggtgggcggcggctgggacaccctgggccactacctggacaagcatgacccctgccgctgcaccagcctgagccacaagccaggcagcttcctgaagcccccagcccctcctgtgcagcacgaggtgcgggtgcaggacggccccagccagacccagcccaccatgaccatcagccgcagccagagccccccacctcctgtggactggaagacctacaccagcagtgaccggcggctgcggccccccacccccagcagcccccggccccggcgggagagaggagctggcactggagccagccgggagatggcccccttcctgcgctgccaggagaggagcctcatccccagctggaggcagcccacagctggggacagcccccccagcccccagagcagcagcacccagaagggccgggacccccagtgcaccagcagcggcaagcgggaggagcgctacccacctgagctgccccggggccgcatccccacctcctgggtgcatgaggagacagacagctggggcacagatgctggcaaccccaccccccagaggctgcgggccatcgaggccaccaccaagggcatcagcgcccggggccccagccccctgcccaggagctttggacctgctgagtgcctgggcctgcggctgcccctgagagatgaggccaagggggccttcttccagttccgggagcctgagagcgtgcgcagccccacccctgtgcagggcctgaccaagatccccatccggctgcccccagcccggccccccaccccaggccgctccttccctggggccaccagcggcagccccaggacagagctgggccgggaccccatccccctgcgggctgtgacagtggacctggccggcagcacccacggggactgcagcgtggaggtgcggcaggaggaccagcagctggacatccaggtgatggccgaggcccgggagagctgggacctgggcctgcaggagcaggagggccgctacacccccctgcccctgggcggcaacaaggagcaggccatctactgcagcctggaggaggagatcctgggcaacatgaagctgctggaggtgcgcagcgcctgcccccagggcaccaggtctggagtcatccccaggtctggagtgtacatcccccggctggccggccagtggccagagcccggcggcccctatgacaaggccatccaggagctggcccagggcagccccagcctgctgaaggtggacctggaggcctggaaggccgcccccaccggcagccccaagccagctgtgaccccaggccctggcagcctgaagggcaagctgggcgcccggcagagcggccccaggaccaaggccagcctgagcgccaagggcacccacatgaggaaggtgcccccccagggcggccaggactgcagcgccagcacagtgtctgccagccctgaggcccccacccccagccccctggaccccaacagcgacaaggccaaggcctgcctgagcaaaggaagaaggaccctgaggaagcccaagagggtgcccagcatctacaagctgaagctgcggccccgcatccggccccggcgggaccacaggcctgagaagcagcccagccgcatcccccggcccctggcctacgtgttcctgggccctgcccggcagccccccaaggaccggctgctgcgggctgtgctgggcagcaaaggaggagaggccagccgggtggatggagcctctgtgggggaggaggaggaggagggcaaggaggagaaggagcctgctgcccccctggagagcagcccccagcccccagagggcctgcagccccactggctgaaccaggcccccctgcccccagaggaggagagctgggtgtag

SEQ ID NO: 18383 - DNA, 14262 bp, synthetic construct
  source 1..14262: mol_type = other DNA; note = Synthetic coding sequence
atggtgcctgaggagcggcgggtgggcctgagcagtgatgagaccagcagtgacagcctgaagtcctggcacagcatctgtgtgctggacagcaaggagcagcccctggcctgccagcagaagcagaggcagtttgtgaagcctgtgacagagagcgagcagcccaccgtgctggagctgctgctggccgagctgcggaccctcttctctgctgtgctgcaggacagcagccctgctgcctggagatacctgcatgctgtgctgggcctgctgcccccctaccgggagctgctggtgggccacctggacctgctgcccttcctggagcagctgtactgctgggccccctgggtgcagacccacctgcacctggacctgctgggcgccatcgtgcaggccttccccccagacagcagcctgctggacagcgccagccatgctgactgctgcccccagaagaggcggctgcaccaccggcccccctgcccagcctgcccctttgtgcaggcccagtggagccggcagcaggtgaaggaggagctggccacctggctgcggcccctgaccctgcctgagctgcagcgctgcctgggcatcgtgggcgcccaggtggccctggaggaggccgtgtggctggatggcctgagcctgctgcccctggccctggccgctgacatccctgtgcgctatgagagcagtgacacagacaatgctgaggtggagcctgtgggcaggaaggagaccaggagccagctggactatgaggtgccccgggagaaggccttccagaagagcagcacaggcttcagccctgagaccagcttcctggacagccaggtgatgacagccctgaagatggagcgctacctgaagaagatccacttcctgtacctgaatgtggcccccagccgctacttccggccctacagcctgatggtggtgcccccagacaaggtgaaccctgagcactacatcttcagccccttcggcatcctgcacgtgcaccctgtggagggcagcgagaccatgaccctgggcacctggcaccaccactgtgtgctgtggcagcagctgcagttcatccccttcttcaagtactgcctgctgaggaagagcttcacctgctggaagaagaatgtgcggctgcagggcctgcaccggctgcagaagttcctggagaaccacctgctgctggccgtgccccactttggagctggcctgctgcacatcagccggctgctgcaggagctgcacagcgtgtcctggctgccccaggagctggaccgctgctatgagctgctggacctgcagacagccctggccgaggagaagcacaaggccctgcggctgctgcaccgctgcctgaacctgtgcaccagcatcctgcggctggtgcatgaggacacctaccacatgcagcagtgcctgcaggagcgggtgcagaactgtgaccgcatcagaacaggccagggcagcatctacctgcagagggtgcagcacaagcagctggagcagaagctgaagcaggccgaggcctggtggctgcagctgggcaagtttgcccggctggtggactacatgatctgccagagcctcatctctgtgctggaggagcagatcaccagctttgtggccaacatcctgcaggccccccggcagaagcccttcctgagcagccagctggtgtttgatgaccacggccagctgagccacgtgccctgtgtggagaacatgatccagaccctgactggaggcctgcagagcgtgaagaccagcgccctgcaggtggtgcagagcgctgacctgaagaccagcagtgacagcctgtacagcgaggaggaggatgaggaggaggacagcaaggatgagttcctgatgcccaagttccagggccagcccagtgatgctgtgtccatcttctgtggccccaacgtgggcctggtgtggccctggaagagccaccccatcgccggcatcctggaggtgcggggctgccgcctgcggggccagtacttcccccacaactacaagcagctggaggaggacctggacaacaaccccaagatccagcaggccctgaacatccagcaggtgctgctggagggcgtgctgtgcaaggtgcaggagttctgccgggagcaccactggatcaccggcatctatgagttcctgcagagctggggcccccagaagctggaggacatgagaggaggccccatcaagaactacgtgaccctggtgtcccggctgaatgtgtggcaggcccgggtgtcctccatgcccatcgagctgctgaccaagggcggcctgctgctgctgagctgccatgatgtgcaggccgagatggagagcaagctgaacagcatcaggaaggacatcctggcccacgtgcagaatgaatgctggaacctgagccagcagctgatgacagagctgacagacttcatgcacatcttccgcaccatcaacagcgacatccacgccatcgcccagtgcacccagaagctgaatgaggccaatgagcagtatgtggagctggaggagaggatggagtatgtgcgggccctgcacgagctgatccggaaccacttcagcctcttcagcgcagaaaatgaggccctggacatctctgtgcggcggcagtttggagagagccccatccccccctgccccccaccaccccagccccacctgctgcactgccccctgctggccccccagctgctggacatgtgggaggccttccagtttgagaagagccaggccagcgagttcctgctgagcaagagacatgccatcatgcccaagctgcagcagctgatggctgctgccctggccgagctggagggcctgctggccaaggccctgagcggccccttcatggaccccacccaggaccagaggagcacagagcaccagctggtgtccctggagcggcagttccagaacacagtgtctgacctgtctgagctgcaccacgcctatgccatcttcacagaagatgagacccctgtgcccctgcccatctgtggcacccggcccatcgtgcagcagcagaggatctggcacctgtacagagtcatcagcgagaacatcagcgagtggaagtgcatggcctttgccaagttctccccagccatggcccaggagaagacagagggctggctgacagaagctgccaggatgagcaccaccctggagctgcacagccctgtgctgcagcactgcatgaggatcctgggggagttccgcagctacctgcccctgctgaccaagctgggcagcctgcacccccagagcctgaactgccagtgcctgctgcgggccctgggcctgggcagcctgcagaccatcgagctgctgaccctgggccagctgctgacctaccccctgctggagtttgctgaccgcatcaaccaggtgtggcagaatgaaaatgaaagaatccacgcccaggagaccatccggcggctgcagcgctactgggaggcccggcagctgcggctgctgaacttcatcctgcacgtgccctatgagcccccagccagcgagaggagcaagaggcaggtgctgcggagcccccagtgggaggtggtggacaaggacagcggcaccttcatcctgagtgactacagcaacctgcaggacagcatccaggagagcctgcaggtgctgagcaagatcctggccatcgagaagagcggggacctgaacaagatcgccctggagtgggtggccatcatgcacggcctgggcgccctgctggaggtgtggctgaccttccagcagaagtggatcttcctgaacaaggtgctgcacgagatgaagatccagttccccaatgctgacctgaacagccgcttcaaggtgatggatgaccagtaccgcaccctgatgaggatctctgtggccgaccccatggtgctgagcctggtggtgcccagcgctgagaggagcccctacttccagggccagcagctgcagcagctgctgcaggccggctctgtggagctggagggcatcatcatgagcctggagagcgtgctgtatggagtgtgtgcccacttccccaggctcttcttcctgagtgacagcgagctggtggccctgctggccgcccggctggagagctgtgaggcccagctgtgggtgcggcgctgcttcccccacgtgcatgctgtgtccttccgcagctgccccactggagagaagaacacagatgactgggagagcagccccaacacccagacccaggtggaggccctggccgtgctgggcgccggcggggaggaggtgaagctgcagggccccctgcccctgcacccagacctgcccaagtggctggccagcctggagaagtgcctgcggctggccctggtgcacatgctgcagggctgtgtggccgcccggctggcccggggccccagcctgggggaggccctgaagcagctgcccaagcagaacaagctgtacctgcagctgtatgtgcagcactggattgacctggtgcaggccttcccctggcagtgtgtgctggtggccgaggaggtggtgtggagggctgagatggaggaggccctgctggagtggggcaccctggccatggtgtccatgcacatgaggaagctggaggtgctggtgaacttcatgagggcccagagggccagccagggcggccagagcctgcccagcgtgcggcagaccagcctgctgagcgccctgctggtgatggctgtgacccaccgggacatcgcccagctgctggagcagcaccaggtgtctgacctgacagacttccactgggtgcggcagctgaagtaccacctgggcagcccccacatcatccccaagagccccctgcagagcctgaagaccatcgccagcagcgagcccagcctgagccctgctgcctgctggattgatgtgctgggccgctccttcctgtacaactatgagtacctgggcccccggctgggccccctgcccagcctgctgcctgagaggcctgccctggtgctgctgctggccctggaggaggtggcctgtggcaccgtgctgggccccaatggagtgggcaagagggccatcgtgaacagcctggcccaggccctgggccggcagctggtgatgctgccctgcagcccccagatcgaggcccagtgcctgagcaactacctgaatggagccctgcagggcggggcctggctgctgctggagaaggtgcaccagctgcccccaggcctgctgagcgccctgggccagaggctgggggagctgcaccacctgtatgcccccctgtaccaggaggccagcaggaacaccagcaccatcgaccccacccagccccagctgctgggcagcagcttctttgagaagcaccacgtgtctgtgcggctgggctacggctgcctgctggtgctgcgggccctgagcagcgctgtgcctgccaacctgcacctgctgctgcggcctgtggccctggccctgcctgacctgcggcaggtggccgagctgaccctgctgggcgccggcatgagagatgccttccagatggccacccggctgagcaagttcttcagcctggagcgggagctggtgtctggccccctgccctgccgcctgcccctgctgaagcagatcctggaggacaccatccgcaccctgaatgtgaccaaggaggagcccaagtgccagaagcccaggagcctggccgccatcgaggaggccgccctgctgcggagccccctcttcagcatcctgaatggcctgcacctgcacaacctgcggggcctgctgtgtgccctcttccccagcgccagccaggtgctggccgagcccatgacctacaagctgatgaagcccctggtggtggaggagctgcagcaggtgggcctggaccccagcccagacatcctgggcagcctggagcagctgagccaggccctgagccgggccagcggcatcctgctgctgggccctgctggcagcggcaagaccacctgctggcacagcctcttcaagatccagaaccggctggccgccatggaggacaccagcacccagggctgccagcctgtggagatcacccacctgtaccccagcggcctgagcccccaggagttcctgggctggctggagggcagctgctggcaccacggcatcttccccaaggtgctgcgggccgccggccagtgcaacaacatgggccagaagaggcagacagaggagagcatcggcatccagcactggatcatctgtgatggagccagcaatggagcctggctggacagcatcacctgcctgctgtctgagctgccccagctgagcctgcccagcggccagcagatcgcccggcccccaggcaccttcctgctgatggaggtggccgacaccaccggcatcagccccaccgtggtgggctgctgtgccctggtgtggtgtggcggggagcagacctggcagtgcatcctgagcgccctgatggccagcctgccctatgagtaccgcctgcagcacaggacagtggccgagctgaaccacatggccgaggtgctggtgcctgccaccctgcgcttcctgacctgccagggcgtgagcagcctgctgcaggtgcacggccagcaggccgtgtgtgccggcgtggccgaggtgacctccatggcccgcatcctgcacagcctgctggacctgcacctgcggctgaaggaggagaaggcccctggccctgaggacctgagctacagcgaccctgtggcccagagcttccgcagcagcaagagcagcttcctgaacagaagccaggtggacagtgatgatgtgcctgacaagtgccgggagcacctgctggccgtgagcagcttcctgtttgccctgatctggggctttggagcccacctgcccagccgcttctggcccatctttgacaccttcatccgggacagcatcagccggctgagcaactacccagagcccccaccttctgccctggtgtttgacctgcacgtgtccccagaagatggcaccctggtgcccttcaccggccagtacctgagcagccacatcaagggcaccctgggcaccttccaccccagcatccagacagagcggctgctgtatgtggtggacctgctgctgagcggcggccagcctgtgctgctggccggggaggccgccaccgggaagagcgcctttgtggaggtgctggtggagccccaccacccctacatctacagccccatccacccagccttcagcagcagccacctgcggctgctgctgagccggggcatccagggccagacccaggccagcccccagcccggccaccaccaggacagcaagcccagcctgctcttcctgctggaggacctgcacctggccaccagtgaccctgagaagagctgccagcctgtgctggagaccctgcggcaggccatggatggcaccgtgtatgcccacagcaccctggagctgcagaccctgcagcccaccgtgaacttcctggccaccgtgacagtgcccggctactgtgagcggcccctgtgccccaggctcttccgcctcttcaccgtgctggccctggagagcatgacccaggccaccctgctggagagacatgtgcccatcatccaggcctggctggagcgcttccccagcgtggagcgggagcgggccctggcccggggcctggtgcgggcctctgtggaggcctgggaggccgtgtgcaactgcttcatgcccagccccctgcacccccactaccacttcagcctgcacagcgtgagccacctgctgagcagcctgcagctgctgcccaacagaacaggcagccggggctttgtggactaccccaaccaccaggagcacctgcggcgggtgtctggcctgcggggcacctgcctgactgtgatgatggccaccagaaatgtggtgcggctgtggctgcacgaggcccagaggaccttctgtgaccggctggacagcccccgggagaggagctactgtgccaagctgctgctggtggtggcccagagcgtcttctgctgcggccctggcccccagcacctgggcaaggaccaccaggagagcgaggaggaggaggaggaggagcgggtgcctgaggtggagagcgagggggagctggcccagtgggaggacttcagcaacagcaacagcgagacagaggaggaggaggagccctacggcctgcaggtggcccgggtgagcaacagccgggaccccagcctgacccccagcatcggccctgtgtcccggggcatgaaggagagcatcagccacaagatccggcaggagaagggcacccgggccagcaactaccgcctgcaggtgcggcgctccttcaagacctggtggcagaagaagccccagatggacctgatcagccccctgctgctgcctgtgctgctgctgcacccccaggagaagcccagcgacctggtgttcagccaggagctgatcctgggccccaacagcgagacccccaacctgtacctggagcggcagtgggagaagctggaggagcagctggccaccagcgctgcccagctgaagctgagcccccacctggcccgctgccacagcatggcccagcacgtggcccggctggtgcgggtgctggcccggccccggcagcacggcctgctgctgagcggggccctgggcaccggccgccacacagccatcaccctggccagcagcatctgccaggcccacttcttccacctgcccagcggcagcgaggaggccatcctgcagtgcctgagagatgcctcctggcacgccggcatgctgagccagcctgtggccctgctggtgcccagcggcgtggacctgaccaccctgcaccggctgctggccctggccaccagcggcagcttccctggccagtacacagaagctgacctggaccgcatcggggagcacctgccccgggagaacctgggcgtgaagcagaacatcaagaaggagatggtgctgcagcgcttccaccagcaggtgtgcagccacctgcacctgttcttcctgattggagacaagcaggcccacaagcagctgcccagcaccctcttcctgcggctgctgcagctggccacagccagcattgacagatatgagccctgggaccaggccgccctggccaaggtggcccagcaccacctggagggcgcccagagcgtgcccctggatgatggctcctggaagtacccagacctgcaggccagcatccccagcgtggccaaggccatggccctgatccacctgagcgccacccactaccacgagcacctgtgcccagccctgcccctggtgacccccaagaccttcctggacttcctggacaccttcctgatgctgcagcagcagaccatcctgaagatcaagaacaaggcccagagggtgcagaatgccctggagaacctgaggatgctgatcaaggagcacggcacccacgccaacctgatctttgacctggagcagcagctgaaggacagcggcaagagcctgtccatgttccagcagcagctggagcagagcaagctgctgtacaagcagcagctggaggagtgccgccaccaggagaacctgattgagaacctggcccggcagagagatgccctgcaggcccagcgggaggccttcctggagcagatgagcaaggccttcctggagcccctgagccagctgcaggtggccgactttgaggagatccgcagctaccgggcccctcctgagagcgtggtgcgggtgacagatgccatgtgtgacctcttccaccacgagaccggctgggccagcgccaagcagctgctgtgcacagaggacttctaccaggagctggtgttcttccccaaggagaagatcacagattctgagctgatcaagctgcacctgatcctgaaggcccctggcatggatgatgctgccctgcgggctgtgtccaggcctgctgccagcctggccgcctggctgtgggccgtgctgcactacggcctggcccactgccggggcctgcccacagacctgctgctgcagcaggtggaggccaccctgacccgggagcaggcccggctgggctactaccagttccaggcccaggagaccctggagcacaacctggccctggccaagatggtggaggatgcccaggccagccacaactgtgtggccaagaccctgagccaggcccagtgtggccagtaccacaagtggcccatgaaggccgccctgctgacccccatgagggcctggaccacccagctgcagaagctgaagggccgctgcatgacagtgtttggagacaccctgctgtgcagcgctgccatcatctacctgggccccttcccccccctgcggcggcaggagctgctggatgagtggctggccctgtgccggggcttccaggaggccctgggcccagatgatgtggcccaggccctgaagaggaagcagaagtctgtgtccatcccccccaagaaccccctgctggccacccacagccccttcagcatcctgagcctgctgagcagcgagagcgagcagtaccagtgggatggcaacctgaagccccaggccaagagcgcccacctggccggcctgctgctgcggagccccacccactacagcagctgccgctggcccctgctgctggaccccagcaatgaggccctgatctggctggaccccctgcccctggaggagaacagaagctttgccccagccctgacagagggccggggcaagggcctgatgaggaaccagaagcgggagagcaagacagacatgaaggaggaggatgatgagagcgaggagagcaatgaagctgaggaccagaccaaggagcagaaggccgaggagaggaagaatgagcaggagaaggagcaggaggagaatgaggagaaggaggaggagaagacagagagccagggcagcaagccagcctatgagacccagctgcccagcctgccctacctgtctgtgctgagcggggctgaccctgagctgggcagccagctgcaggaggccgccgcctgtggcctgcctgtgctgctgaccaacgtggagctgggcctgggctgtgaggagctgcagtggctgctgcagcgggagcagctgagccccccccaggtgcagcccggcttctgcctgtacctgagcaccaccctgagcctgtgtgccatggagaaggtgctgggctgtgagctgctgaagggcctgaatgtgctggacctgggcctgaacatggagatcctggaggagcagatgctgcacgagatcctgtgccgggagtacccagagctggagacccgctggcaggacctgaagatccgggccctggacacctgcaaggctgtggaggccgctgaggagcggctgctgaccatgctgctcttccagaaccccaagaggcagaagccagccaagttcctgagaaatattgtgcgggcccagggcaagctgtgccagctgcgggcccactgtgaggagctggagggccagaagctgcaggagatggtgctgtgggccccctacagacctgtggtgtggcacggcatggccatggtgaaggccctgagccagctgcagaacctgctgcccctcttctgcatgagccctgagaactggctggccgtgaccaagcaggccctggacagcatgaagccccgggagatcaaccacggggaggacctggccagccacctgctgcagctgcgggcccacctgacccggcagctgctgggcagcacagtgacagccctgggcctgacccaggtgcccctggtgggcgccctgggcgccctggccctgctgcaggccaccgggaaggccagcgagctggagcggctggccctgtggccaggcctggccgccagccccagcacagtgcacagcaagcctgtgtctgatgtggcccggcctgcctggctgggccccaaggcctggcatgaatgtgagatgctggagctgctgcccccatttgtgggcctgtgtgccagcctggccggccacagcagcgcctggcaggcctacctgagcctgagcagcacagtgctgggccctgcccctggccctggccctgagcccctgagcctgctgcagaagctgatcctgtggagggtgctgcggcctgagtgcctggccggggccctggccgacttcaccaccagcctgctgggccggcccctggatgagaacacctacgcccccaccatgcccttcaagcacagccaggccacccagcccatgctgatcctgctgcccccacctggccaccccagcgccaccctgcaccccctgaccgtcatccagaagctggccgccaagtaccagcagggccagaagcagctgcaggtgattgccctgggcagcgaggcctgggaccctgtgtctgtggtggtgtccaccctgagccaggccatgtatgagggccactggctggtgctggacaactgccacctgatgccccactggcccaaggagctgctgcagctgctgctggagctgctgggccgggccaaggtggtggccgacctggagagcgagcagctgctggaccagcctgagagcagaaatgtgtccacagtgcaccgggacttccggctgtggctgattgtgcctgctgagagcagcgccagcctgcctgctgtgctgacccagcacagcatgcctgtgttctggaaccagagcctggagctgggccacgtgctgattgattctgtggagctggcccagcaggtgctgtacatgcagccccccacccaggccctgcccctgctgctgctgcacggcctgctgctgcaccggcagctgtatggcacccggctgcaggcccaccggggccgctggagccaggtgaccctgacccaggtgctgcagacccaggaccagctgtgggccagcctgagcaacccccgggccgccatgcaggagctggccgccagcgtcttctatggaggccccctgggggacacagaagatcgggaggccctgatcagcctgacccaggcctgcctgagccccagcagcggctcctgggtgcagccccacaccccccagagcctgctggccaccctgatgcccctgcctgagctgcgggagctggatgccatggccgagtgcaaggcccagatgcacctgctgcccagccccccagagccccggctgtgtggcctgtctgagggcccccaggcctggctgctgcggcggcagagccgggccctgctgagcgccctgcagaggagcagccctgtgtgggtgcctgagagcagaagaggagcccagctggccgagcggcggctgcggcagaggctggtgcaggtgaacagaaggctggagagcctgcaggacctgctgacccacgtgatccggcaggatgaaagtgatgccccctggagcgtgctgggccccaatgcccggcggcccctggagggcgtgctggagacagaggccctggagctgagccagctggtgggcaccctgcagagggacctggactgcctgctgcagcagctgaagggggccccaccctgccccagcagaagatgtgccgctgtggcccacgccctgtggacaggccgcctgcccctgccctggaggccccacgccccagctggcccccagcccccctggcactggctgcggcagctgagcagaagaggccagctgctggtgcgctacctgggcgtgggcgcagatgccagcagtgatgtgcctgagagggtcttccacctgagcgccttccgccacccccggcggctgctgctggccctgcggggggaggccgccctggaccagaatgtgcccagcagcaacttccctggcagccggggctctgtgagcagccagctgcagtacaagaggctggagatgaacagcaaccccctgcacttccgggtggagaatggccccaaccccaccgtgcctgagcggggcctgctgctgattggcctgcaggtgctgcatgctgagtgggaccccatcgccggggccctgcaggacagccccagcagccagcccagccccctgccccctgtgtccatcagcacccaggcccctggcaccagtgacctgcctgccccagctgacctgactgtgtacagctgccctgtgtacatgggcggccccctgggcacagccaagctgcagagcagaaatattgtgatgcacctgcccctgcccaccaagctgacccccaacacctgtgtgcagaggagagtgcacgtgtgcagcccccccctgtcctag

SEQ ID NO: 18384 - DNA, 1179 bp, synthetic construct
  source 1..1179: mol_type = other DNA; note = Synthetic coding sequence
atggacctgtttggagacctgcctgagcctgagaggagccccaggcctgctgctgggaaggaggcccagaagggccccctgctgtttgatgacctgcccccagccagcagcacagacagcggcagcggcggccccctgctgtttgatgacctgcccccagccagcagcggggacagcggcagcctggccaccagcatcagccagatggtgaagacagagggcaaaggagccaagaggaagaccagcgaggaggagaagaatggaagtgaggagctggtggagaagaaggtgtgcaaggccagcagcgtcatcttcggcctgaagggctacgtggccgagaggaaaggagagcgggaggagatgcaggatgcccacgtgatcctgaatgacatcacagaggagtgcaggcctcccagcagcctcatcaccagggtgtcctactttgctgtgtttgatggccacggcggcatccgggccagcaagtttgctgcccagaacctgcaccagaacctgatcaggaagttccccaagggagatgtgatctctgtggagaagacagtgaagcgctgcctgctggacaccttcaagcacacagatgaggagttcctgaagcaggccagcagccagaagccagcctggaaggatggcagcacagccacctgtgtgctggccgtggacaacatcctgtacatcgccaacctgggggacagccgggccatcctgtgccgctacaatgaggagagccagaagcacgccgccctgagcctgagcaaggagcacaaccccacccagtatgaggagaggatgaggatccagaaggccggcggcaatgtgagagatggccgggtgctgggcgtgctggaggtgagccgcagcattggagatggccagtacaagagatgtggggtgacctctgtgcctgacatccgccgctgccagctgaccccaaatgaccgcttcatcctgctggcctgtgatggcctcttcaaggtgttcaccccagaggaggccgtgaacttcatcctgagctgcctggaggatgagaagatccagacccgggagggcaagtctgctgctgatgcccgctatgaagctgcctgcaaccggctggccaacaaggctgtgcagaggggcagcgctgacaacgtgacagtgatggtggtgcgcatcggccactag

SEQ ID NO: 18385 - DNA, 2193 bp, synthetic construct
  source 1..2193: mol_type = other DNA; note = Synthetic coding sequence
atgtttggaaggaagaggtctgtgtcctttggaggcttcggctggattgacaagaccatgctggccagcctgaaggtgaagaagcaggagctggccaacagcagtgatgccaccctgcctgaccggcccctgagcccccccctgacagccccacccaccatgaagagcagcgagttctttgagatgctggagaagatgcagggcatcaagctggaggagcagaagccaggcccccagaagaacaaggatgactacatcccctaccccagcattgatgaggtggtggagaagggcggcccctacccccaggtgatcctgccccagtttggaggctactggattgaagatcctgaaaatgtgggcacccccaccagcctgggcagcagcatctgtgaggaggaggaggaggacaacctgagccccaacaccttcggctacaagctggagtgcaagggggaggcccgggcctaccgccgccacttcctgggcaaggaccacctgaacttctactgcaccggcagcagcctgggcaacctgatcctgtctgtgaagtgtgaggaggccgagggcatcgagtacctgcgggtcatcctgcggagcaagctgaagacagtgcatgagcgcatccccctggccggcctgagcaagctgcccagcgtgccccagatcgccaaggccttctgtgatgatgctgtgggcctgcgcttcaaccctgtgctgtaccccaaggccagccagatgattgtgtcctatgatgagcacgaggtgaacaacaccttcaagtttggagtcatctaccagaaggcccggcagaccctggaggaggagctgtttggaaataatgaggagagccctgccttcaaggagttcctggacctgctgggggacaccatcaccctgcaggacttcaagggcttccggggcggcctggatgtgacccacggccagacaggagtggagagcgtgtacaccaccttccgggaccgggagatcatgttccacgtgtccaccaagctgcccttcacagatggagatgcccagcagctgcagaggaagaggcacatcggaaatgacatcgtggccatcatcttccaggaggagaacaccccatttgtgcctgacatgattgccagcaacttcctgcacgcctacatcgtggtgcaggtggagaccccaggcacagagacccccagctacaaggtgtctgtgacagccagagaagatgtgcccaccttcggcccccccctgcccagcccccctgtgttccagaagggccctgagttccgggagttcctgctgaccaagctgaccaatgcagaaaatgcctgctgcaagagtgacaagtttgccaagctggaggacaggacccgggccgccctgctggacaacctgcatgatgagctgcacgcccacacccaggccatgctgggcctgggccctgaggaggacaagtttgaaaatggaggccacggcggcttcctggagagcttcaagagggccatccgggtgcgcagccacagcatggagaccatggtgggcggccagaagaagagccacagcggcggcatccctggcagcctgagcggcggcatcagccacaacagcatggaggtgaccaagaccaccttcagcccccctgtggtggccgccaccgtgaagaaccagagccgcagccccatcaagaggaggagcggcctcttcccccggctgcacacaggcagcgagggccagggcgacagccgggcccgctgtgacagcaccagcagcacccccaagaccccagatggcggccacagcagccaggagatcaagtctgagaccagcagcaaccccagcagccctgagatctgccccaacaaggagaagcccttcatgaagctgaaggaaaatggccgggccatcagccgcagcagcagcagcaccagctctgtgagcagcacagctggggagggggaggccatggaggagggggacagcggcggcagccagcccagcaccaccagccccttcaagcaggaggtgtttgtgtacagccccagccccagcagcgagagccccagcctgggcgctgctgccacccccatcatcatgagccgcagccccacagatgccaagagcaggaacagccccaggagcaacctgaagttccgctttgacaagctgagccacgccagcagcggggccggccactag

SEQ ID NO: 18386 - DNA, 1110 bp, synthetic construct
  source 1..1110: mol_type = other DNA; note = Synthetic coding sequence
atgtggagcggcaggaagctgggcagcagcggcggctggttcctgcgggtgctgggccctgggggctgcaacaccaaggccgcccggcccctcatcagcagcgctgtgtatgtgaagaaccagctgagcggcaccctgcagatcaagccaggagtcttcaatgagtaccgcaccatctggttcaagagctaccgcaccatcttcagctgcctgaaccgcatcaagagcttccgctacccctgggcccggctgtacagcaccagccagaccaccgtggacagcggggaggtgaagaccttcctggccctggcccacaagtggtgggatgagcagggcgtgtatgcccccctgcacagcatgaatgacctgcgggtgcccttcatccgggacaacctgctgaagaccatccccaaccaccagcccgggaagcccctgctgggcatgaagatcctggatgtgggctgcggcggcggcctgctgacagagcccctgggccgcctgggcgccagcgtcatcggcatcgaccctgtggatgagaacatcaagacagcccagtgccacaagagctttgatcctgtgctggacaagagaattgagtacagagtgtgcagcctggaggagatcgtggaggagacagctgagacctttgatgctgtggtggccagcgaggtggtggagcacgtgattgacctggagaccttcctgcagtgctgctgccaggtgctgaagccaggcggcagcctcttcatcaccaccatcaacaagacccagctgtcctatgccctgggcatcgtgttttctgagcagatcgccagcatcgtgcccaagggcacccacacctgggagaagtttgtgtccccagagaccctggagagcatcctggagagcaatggcctgtctgtgcagacagtggtgggcatgctgtacaaccccttcagcggctactggcactggagcgagaacaccagcctgaactatgctgcctatgctgtgaagagccgggtgcaggagcacccagccagcgctgagtttgtgctgaagggggagacagaggagctgcaggccaatgcctgcaccaacccagctgtgcatgagaagctgaagaagtag

SEQ ID NO: 18387 - DNA, 1782 bp, synthetic construct
  source 1..1782: mol_type = other DNA; note = Synthetic coding sequence
atggagggctgcatgggagaggagagcttccagatgtgggagctgaacagaaggctggaggcctacctggcccgggtgaaggccctggaggagcagaatgagctgctgtctgctgagctgggcggcctgcgggcccagagcgctgacacctcctggagggcccacgcagatgatgagctggccgccctgcgggccctggtggaccagcgctggagggagaagcacgccgctgaggtggcccgggacaacctggccgaggagctggagggcgtggccggccgctgccagcagctgcggctggcccgggagaggaccacagaggaggtggccaggaacagaagagctgtggaggccgagaagtgtgcccgggcctggctgagcagccaggtggccgagctggagcgggagctggaggccctgcgggtggcccacgaggaggagcgggtgggcctgaatgcccaggccgcctgtgccccccgctgcccagccccaccccggggccccccagccccagcccctgaggtggaggagctggcccggcggctgggggaggcctggagaggagctgtgcggggctaccaggagcgggtggcccacatggagaccagcctgggccaggcccgggagcggctgggccgggctgtgcagggcgcccgggagggccgcctggagctgcagcagctgcaggccgagcggggcggcctgctggagcggcgggccgccctggagcagaggctggagggccgctggcaggagcggctgcgggccacagagaagttccagctggccgtggaggccctggagcaggagaagcagggcctgcagagccagatcgcccaggtgctggagggccggcagcagctggcccacctgaagatgagcctgagcctggaggtggccacctaccgcaccctgctggaggccgagaacagccggctgcagacccctgggggcggcagcaagaccagcctgtccttccaggaccccaagctggagctgcagttccccaggaccccagagggccggcggctgggcagcctgctgcctgtgctgagccccaccagcctgcccagccccctgcctgccaccctggagacccctgtgcctgccttcctgaagaaccaggagttcctgcaggcccggacccccaccctggccagcacccccatcccccccaccccccaggcccccagccctgctgtggatgctgagatccgggcccaggatgcccccctgagcctgctgcagacccagggcggcaggaagcaggcccctgagcccctgcgggcagaggcccgggtggccatcccagcctctgtgctgcccggccctgaggagcccggcggccagaggcaggaggccagcacaggccagagcccagaagatcatgccagcctggccccacccctgagcccagaccacagcagcctggaggccaaggatggagagagcggcggcagcagggtcttcagcatctgccgcggggagggggagggccagatctggggcctggtggagaaggagacagccatcgagggcaaggtggtgagcagcctgcagcaggagatctgggaggaggaggacctgaacaggaaggagatccaggacagccaggtgcccctggagaaggagaccctgaagagcctgggggaggagatccaggagagcctgaagaccctggagaaccagagccatgagaccctggagcgggagaaccaggagtgccccaggagcctggaggaggacctggagaccctgaagagcctggagaagaagaagtag

SEQ ID NO: 18388 - DNA, 3456 bp, synthetic construct
  source 1..3456: mol_type = other DNA; note = Synthetic coding sequence
atgatggccgccgccctgggccccccagaggtgattgcccagctggagaatgctgccaaggtgctgatggcccctccttccatggtgaacaatgagcagaggcagcacgccgagcacatcttcctgtccttcaggaagagcaagagcccctttgctgtgtgcaagcacatcctggagaccagcaaggtggactatgtgctcttccaggccgccacagccatcatggaggccgtggtgcgggagtggatcctgctggagaagggcagcattgagagcctgcggaccttcctgctgacctacgtgctgcagaggcccaacctgcagaagtatgtgcgggagcagatcctgctggccgtggccgtcatcgtgaagaggggcagcctggacaagagcattgactgcaagagcatcttccacgaggtgtcccagctgatcagcagcggcaaccccaccgtgcagaccctggcctgcagcatcctgacagccctgctgtctgagttcagcagcagcagcaagaccagcaacatcggcctgtccatggagttccacggcaactgcaagagggtcttccaggaggaggacctgcggcagatcttcatgctgactgtggaggtgctgcaggagttcagcagaagagagaacctgaatgcccagatgagctctgtgttccagcgctacctggccctggccaaccaggtgctgtcctggaacttcctgccccccaacctgggccgccactacatcgccatgtttgagagcagccagaatgtgctgctgaagcccacagagagctggagggagaccctgctggacagccgggtgatggagctgttcttcaccgtgcacaggaagatcagagaagattctgacatggcccaggacagcctgcagtgcctggcccagctggccagcctgcacggccccatcttcccagatgagggcagccaggtggactacctggcccacttcatcgagggcctgctgaacaccatcaatggcatcgagattgaagattctgaggccgtgggcatcagcagcatcatcagcaacctgatcaccgtcttccccagaaatgtgctgacagccatccccagcgagctgttcagcagctttgtgaactgcctgacccacctgacctgcagctttggccgctctgctgccctggaggaggtgctggacaaggatgacatggtgtacatggaggcctatgacaagctgctggagagctggctgaccctggtgcaggatgacaagcacttccacaagggcttcttcacccagcacgctgtgcaggtgttcaacagctacatccagtgccacctggccgccccagatggcaccaggaacctgacagccaatggagtggccagccgggaggaggaggagatcagcgagctgcaggaggatgaccgggaccagttcagtgaccagctggcctctgtgggcatgctgggcagaattgctgctgagcactgcatccccctgctgaccagcctgctggaggagcgggtgacccggctgcacggccagctgcagaggcaccagcagcagctgctggccagccctggcagcagcacagtggacaacaagatgctggatgacctgtatgaggacatccactggctgatcctggtgacaggctacctgctggctgatgacacccagggcgagacccccctcatccccccagagatcatggagtacagcatcaagcacagcagcgaggtggacatcaacaccaccctgcagatcctgggcagccctggagagaaggccagcagcatccctggctacaacagaacagattctgtcatccggctgctgagcgccatcctgcgggtgtctgaggtggagagccgggccatccgggctgacctgacccacctgctgagcccccagatgggcaaggacatcgtgtggttcctgaagcgctgggccaagacctacctgctggtggatgagaagctgtatgaccagatcagcctgcccttcagcacagccttcggggctgacacagagggcagccagtggatcatcggctacctgctgcagaaggtgatcagcaacctgtctgtgtggagcagcgagcaggacctggccaatgacacagtgcagctgctggtgaccctggtggagcggcgggagcgggccaacctggtgatccagtgtgagaactggtggaacctggccaagcagtttgccagccgcagcccccccctgaacttcctgagcagccctgtgcagaggaccctgatgaaggccctggtgctgggcggctttgcccacatggacacagagaccaagcagcagtactggacagaggtgctgcagcccctgcagcagcgcttcctgcgggtcatcaaccaggagaacttccagcagatgtgccagcaggaggaggtgaagcaggagatcacagccaccctggaggccctgtgtggcattgctgaggccacccagattgacaacgtggccatcctcttcaacttcctgatggacttcctgaccaactgcatcggcctgatggaggtgtacaagaacaccccagagaccgtgaacctgatcatcgaggtgtttgtggaggtggcccacaagcagatctgctacctgggggagagcaaggccatgaacctgtatgaggcctgcctgaccctgctgcaggtgtacagcaagaacaacctgggccggcagagaattgatgtgacagctgaggaggagcagtaccaggacctgctgctgatcatggagctgctgaccaacctgctgagcaaggagttcatcgacttcagtgacacagatgaggtgttccggggccacgagcccggccaggccgccaacagatctgtgtctgctgctgatgtggtgctgtatggagtgaacctgatcctgcccctgatgagccaggacctgctgaagttccccaccctgtgcaaccagtactacaagctgatcaccttcatctgtgagatcttccctgagaagatcccccagctgcctgaggacctcttcaagagcctgatgtacagcctggagctgggcatgacctccatgagcagcgaggtgtgccagctgtgcctggaggccctgacccccctggccgagcagtgtgccaaggcccaggagacagacagccccctcttcctggccaccaggcacttcctgaagctggtgtttgacatgctggtgctgcagaagcacaacacagagatgaccacagctgctggggaggccttctacaccctggtgtgcctgcaccaggccgagtacagcgagctggtggagaccctgctgagcagccagcaggaccctgtgatctaccagaggctggctgatgccttcaacaagctgacagccagcagcaccccacccaccctggacaggaagcagaagatggccttcctgaagagcctggaggagttcatggccaacgtgggcggcctgctgtgtgtgaagtag

SEQ ID NO: 18389 - DNA, 1578 bp, synthetic construct
  source 1..1578: mol_type = other DNA; note = Synthetic coding sequence
atggctgctgggggcagcggcggccgggccagctgccccccaggagtgggcgtgggccctggcaccggcggcagccctggccccagcgccaatgctgctgccaccccagcccctggaaatgctgctgctgctgctgctgctgctgctgctgctgctgctgcccctggccccaccccaccagcccctcctggccctggaacagatgcccaggccgccggggctgagagagctgaggaggccgccggccctggagctgctgccctgcagcgggaggccgcctacaactggcaggccagcaagcccaccgtgcaggagagatttgccttcctgttcaacaatgaggtgctgtgtgatgtgcacttcctggtgggcaagggcctgagcagccagaggatcccagcccacagatttgtgctggccgtgggcagcgctgtgtttgatgccatgtttaatggaggcatggccaccaccagcacagaaattgagctgcctgatgtggagcctgctgccttcctggccctgctgaagttcctgtacagtgatgaggtgcagatcggccctgagaccgtgatgaccaccctgtacacagccaagaagtatgctgtgcctgccctggaggcccactgtgtggagttcctgaagaagaacctgcgggctgacaatgccttcatgctgctgacccaggcccggctgtttgatgagccccagctggccagcctgtgcctggagaacatcgacaagaacacagcagatgccatcacagctgagggcttcacagacatcgacctggacaccctggtggccgtgctggagcgggacaccctgggcatccgggaggtgcggctcttcaatgctgtggtgcgctggagcgaggccgagtgccagaggcagcagctgcaggtgaccccagagaacagaaggaaggtgctgggcaaggccctgggcctcatccgcttccccctgatgaccatcgaggagtttgctgctggccctgcccagagcggcatcctggtggaccgggaggtggtgtccctcttcctgcacttcaccgtgaaccccaagccccgggtggagttcatcgaccggccccgctgctgcctgcggggcaaggaatgttccatcaaccgcttccagcaggtggagagccgctggggctacagcggcaccagtgaccgcatccgcttctctgtgaacaagaggatctttgtggtgggcttcggcctgtatggcagcatccacggccccacagactaccaggtgaacatccagatcatccacacagacagcaacacagtgctgggccagaatgacaccggcttcagctgtgatggcagcgccagcaccttccgggtgatgttcaaggagcctgtggaggtgctgcccaacgtgaactacacagcctgtgccaccctgaagggccctgacagccactacggcaccaagggcctgaggaaggtgacccatgagagccccaccactggagccaagacctgcttcaccttctgctacgccgccggcaacaacaacggcacctctgtggaggatggccagatccctgaggtgatcttctacacctag

SEQ ID NO: 18390 - DNA, 525 bp, synthetic construct
  source 1..525: mol_type = other DNA; note = Synthetic coding sequence
atggccaccgtggccgagctgaaggctgtgctgaaggacaccctggagaagaagggcgtgctgggccacctgaaggcccgcatccgggcagaggtgttcaatgccctggatgatgaccgggagccccggcccagcctgagccatgagaacctgctgatcaatgagctgatccgggagtacctggagttcaacaagtacaagtacacagcctctgtgctgattgctgagagcggccagcctgtggtgcccctggaccggcagttcctgattcatgagctgaatgcctttgaggagagcaaggacaacaccatccccctgctgtatggcatcctggcccacttcctgcggggcaccaaggatggcatccagaatgccttcctgaagggccccagcctgcagcccagcgaccccagcctgggccggcagcccagcaggaggaagcccatggatgaccacctgaggaaggaggagcagaagagcaccaacatcgaggacctgcacgtgtcccaggccgtgaacagatag

SEQ ID NO: 18391 - DNA, 1257 bp, synthetic construct
  source 1..1257: mol_type = other DNA; note = Synthetic coding sequence
atggccggcagcctgcccccctgtgtggtggactgtggcaccggctacaccaagctgggctacgccggcaacacagagccccagttcatcatccccagctgcatcgccatccgggagagcgccaaggtggtggaccaggcccagaggagagtgctgcggggcgtggatgacctggacttcttcatcggagatgaggccatcgacaagcccacctacgccaccaagtggcccatccgccacggcatcatcgaggactgggacctgatggagcgcttcatggagcaggtggtgttcaagtacctgcgggcagagcctgaggaccactacttcctgatgacagagccccccctgaacaccccagaaaatcgggagtacctggccgagatcatgtttgagagcttcaacgtgcccggcctgtacatcgctgtgcaggccgtgctggccctggccgcctcctggaccagccggcaggtgggggagaggaccctgaccggcatcgtcatcgacagcggagatggagtgacccacgtgattcctgtggccgagggctacgtgattggcagctgcatcaagcacatccccatcgccggccgggacatcacctacttcatccagcagctgctgcgggagcgggaggtgggcatccccccagagcagagcctggagacagccaaggccatcaaggagaagtactgctacatctgcccagacatcgtgaaggagtttgccaagtatgatgtggaccccaggaagtggatcaagcagtacacaggcatcaatgccatcaaccagaagaagtttgtgattgatgtgggctatgagcgcttcctgggccctgagatcttcttccaccctgagtttgccaacccagacttcatggagagcatcagtgatgtggtggatgaagtcatccagaactgccccattgatgtgcggcggcccctgtacaagaatgtggtgctgagcggcggcagcaccatgttccgggactttggaagaaggctgcagagggacctgaagagggtggtggatgcccggctgcggctgtctgaggagctgagcggcggccgcatcaagcccaagcctgtggaggtgcaggtggtgacccaccacatgcagagatatgctgtgtggtttggaggctccatgctggccagcaccccagagttcttccaggtgtgccacaccaagaaggactatgaggagtatggccccagcatctgccgccacaaccctgtgtttggagtgatgtcctag

SEQ ID NO: 18392 - DNA, 1044 bp, synthetic construct
  source 1..1044: mol_type = other DNA; note = Synthetic coding sequence
atggctgctgctgagcccgccagcagcggccagcaggccccagctggccagggccagggccagaggcccccaccccagcccccccaggcccaggccccccagcccccacctccaccccagctgggcggggccggcggcggcagcagcagacatgagaagagcctgggcctgctgaccaccaagtttgtgtccctgctgcaggaggccaaggatggagtgctggacctgaaggctgctgctgacaccctggccgtgcggcagaagaggcgcatctatgacatcaccaacgtgctggagggcatcgacctgattgagaagaagagcaagaacagcatccagtggaagggcgtgggcgccggctgcaacaccaaggaggtgattgaccggctgcgctacctgaaggccgagattgaggacctggagctgaaggagcgggagctggaccagcagaagctgtggctgcagcagagcatcaagaatgtgatggatgacagcatcaacaacagaaccttctcctatgtgacccatgaggacatctgcaactgcttcaacggggacaccctgctggccatccaggcccccagcggcacccagctggaggtgcccatccctgagatgggccagaatggccagaagaagtaccagatcaacctgaagagccacagcggccccatccacgtgctgctgatcaacaaggagagcagcagcagcaagcctgtggtgtttcctgtgcccccaccagatgacctgacccagcccagcagccagagcctgacccctgtgaccccccagaagagctccatggccacccagaacctgcctgagcagcacgtgtctgagaggagccaggccctgcagcagaccagcgccacagacatcagcagcgctggcagcatcagcggggacatcattgatgagctgatgagcagtgatgtgttccccctgctgcggctgagccccaccccagcagatgactacaacttcaacctggatgacaatgaaggagtgtgtgacctgtttgatgtgcagatcctgaactactag

SEQ ID NO: 18393 - DNA, 636 bp, synthetic construct
  source 1..636: mol_type = other DNA; note = Synthetic coding sequence
atgtgccccggcaactggctgtgggcctccatgaccttcatggcccgcttcagccgcagcagcagccgcagccctgtgaggacccggggcaccctggaggagatgcccaccgtgcagcaccccttcctgaatgtgtttgagctggagcggctgctgtacaccgggaagacagcctgcaaccacgcagatgaggtgtggccaggcctgtacctgggggaccaggacatggccaacaacagaagagagctgcggcggctgggcatcacccacgtgctgaatgccagccacagccgctggaggggcaccccagaggcctatgagggcctgggcatccgctacctgggcgtggaggcccatgacagccctgcctttgacatgagcatccacttccagacagctgctgacttcatccaccgggccctgagccagcccggcggcaagatcctggtgcactgtgctgtgggcgtgagccgcagcgccaccctggtgctggcctacctgatgctgtaccaccacctgaccctggtggaggccatcaagaaggtgaaggaccaccggggcatcatccccaacagaggcttcctgcggcagctgctggccctggaccggcggctgcggcagggcctggaggcctag

SEQ ID NO: 18394 - DNA, 948 bp, synthetic construct
  source 1..948: mol_type = other DNA; note = Synthetic coding sequence
atgcctggcctgagctgccgcttctaccagcacaagtttcctgaggtggaggatgtggtgatggtgaatgtgcgcagcattgctgagatgggcgcctacgtgtccctgctggagtacaacaacatcgagggcatgatcctgctgtctgagctgagcagaagacgcatccgcagcatcaacaagctgatcagaattggaagaaatgaatgtgtggtggtgatccgggtggacaaggagaagggctacatcgacctgagcaagagaagagtgtccccagaggaggccatcaagtgtgaggacaagttcaccaagagcaagacagtgtacagcatcctgcggcacgtggccgaggtgctggagtacaccaaggatgagcagctggagagcctcttccagaggacagcctgggtgtttgatgacaagtacaagaggcctggctatggagcctatgatgccttcaagcatgctgtgtctgaccccagcatcctggacagcctggacctgaatgaagatgagcgggaggtgctgatcaacaacatcaacagaaggctgaccccccaggccgtgaagatccgggctgacatcgaggtggcctgctacggctatgagggcattgatgctgtgaaggaggccctgcgggccggcctgaactgcagcacagagaacatgcccatcaagatcaacctgattgccccacccaggtatgtgatgaccaccaccaccctggagaggacagagggcctgtctgtgctgagccaggccatggccgtcatcaaggagaagattgaggagaagaggggcgtcttcaacgtgcagatggagcccaaggtggtgacagacacagatgaaacagagctggcccggcagatggagcggctggagcgggagaatgctgaggtggatggagatgatgatgctgaggagatggaggccaaggccgaggactag

SEQ ID NO: 18395 - DNA, 318 bp, synthetic construct
  source 1..318: mol_type = other DNA; note = Synthetic coding sequence
atggccggccaggaggaccctgtgcagcgggagatccaccaggactgggccaaccgggagtacatcgagatcatcaccagcagcatcaagaagattgctgacttcctgaacagctttgacatgagctgccgcagccggctggccaccctgaatgagaagctgacagccctggagaggagaattgagtacatcgaggcccgggtgaccaagggggagaccctgaggacagtgccctgctgctgctgggaggtggccctgcacaacacaggccacatgggcaaggccccagctgccttcagcagcttcctgagcccctag

SEQ ID NO: 18396 - DNA, 1902 bp, synthetic construct
  source 1..1902: mol_type = other DNA; note = Synthetic coding sequence
atggctgctgctgctgctgctgccaccacagctgcctgcagcagcggcagcgctggaacagatgctgctggggccagcggcctgcagcagcccccaccccagccccagccccagcctgctgctgctgccccagcccagcccccacctgagccccccaggaagcccaggatggacccccggcggcggcaggccgccctgtccttcctgaccaacatcagcctggatggccgcctgcccccccaggatgctgagtggggcggcggggaggagggcggggccgccaagccaggggccggcggggcctgtggggcccggacccgcttcagcctgctggccgctgctgagcggggcggctgcatcgccctggccgcccctggcaccccagctgctggcctggccgccggcagcggcccctgcctgccccagcccagcagcctgcccccactcatccctgggggccacgccaccgtgtctggccctggggtggcccggggctttgccagccccctgggcgccggccgggccagcggggagcagtggcagccccccaggcctgcccccctggccgcctgtgcccagctgcagctgctggatggcagcggggctgctggccaggaggagctggaggaggatgatgccttcatctctgtgcaggtgcctgctgctgccttcctgggcagcggcaccccaggcagcggcagcggcagccggggccgcctgaacagcttcacccagggcatcctgcccatcgccttcagccggcccaccagccagaactactgcagcctggagcagcccggccagggcggcagcaccagcgcctttgagcagctgcagaggagcagaagaagactcatcagccagaggagcagcctggagaccctggaggacatcgaggagaatgcccccctgcggcgctgcaggaccctgagcggcagcccccggcccaagaacttcaagaagatccacttcatcaagaacatgaggcagcacgacaccagaaatggccgcatcgtgctgatcagcggccgccgctccttctgcagcatcttctctgtgctgccctacagagacagcacccaggtgggggacctgaagctggatggcggccggcagagcactggagctgtgtccctgaaggagatcatcggcctggagggcgtggagctgggcgcagatggcaagacagtgtcctacacccagttcctgctgcccaccaatgcctttggagcccggaggaacaccatcgacagcaccagcagcttcagccagttcaggaacctgagccacaggagcctgagcatcggccgggccagcggcacccagggcagcctggacaccggcagtgacctgggggacttcatggactatgaccccaacctgctggatgacccccagtggccctgtgggaagcacaagagggtgctgatcttccccagctacatgaccaccgtcatcgactatgtgaagcccagcgacctgaagaaggacatgaatgagaccttcaaggagaagttcccccacatcaagctgaccctgagcaagatccgcagcctgaagcgggagatgaggaagctggcccaggaggactgtggcctggaggagcccaccgtggccatggcctttgtgtactttgagaagctggccctgaagggcaagctgaacaagcagaacaggaagctgtgtgccggggcctgtgtgctgctggccgccaagattggaagtgacctgaagaagcatgaggtgaagcacctgattgacaagctggaggagaagttccggctgaacagaagagagctgattgcctttgagttccctgtgctggtggccctggagtttgccctgcacctgcctgagcacgaggtgatgccccactacagaaggctggtgcagagcagctag

SEQ ID NO: 18397 - DNA, 3423 bp, synthetic construct
  source 1..3423: mol_type = other DNA; note = Synthetic coding sequence
atgaccacagctgtggagaggaagtacatcaacatcaggaagaggctggaccagctgggctaccggcagaccctgactgtggagtgcctgcccctggtggagaagctgttcagtgacctggtgcacaccacagagagcctgcggcagagcaagctgtctgctgtgaaggccgagaaggagagcgccaactttgattttgtgctggagccctacaagctggagaatgcccggctgagcagagaaaataatgagctgtacctggagctgatgaagctgcgggagcacagcgaccagcacgtgaaggagctgaagaccagcctgaagaagtgtgcccgggagacagctgacctgaagttcctgaacaaccagtatgcccacaagctgaagctgctggagaaggagagcaaggccaagaatgaaagaatccagcagctgcaggagaagaacctgcatgctgtggtgcagaccccaggcggcaagaagaggagcatcgccttccggcggcagaggatgcagattgatgagcctgtgccccccagcgaggtgagcagctaccctgtgccccagccagatgacccctacatcgctgacctgctgcaggtggccgacaaccgcatccaggagctgcagcaggaggtgcaccagctgcaggagaagctggccatgatggagagcggcgtgcgggactacagcaagcagatcgagctgcgggagcgggagattgagcggctgtctgtggccctggatggcggccgcagcccagatgtgctgagcctggagagcaggaacaagaccaatgagaagctgattgcccacctgaacatccaggtggacttcctgcagcaggccaacaaggacctggagaagaggatccgggagctgatggagaccaaggagaccgtgaccagcgaggtggtgaacctgagcaacaagaatgagaagctgtgccaggagctgacagaaattgaccagctggcccagcagctggagcggcacaaggaggaggtgctggagacagctgacaaggagctgggggaggccaagaaggagatcaagaggaagctgtctgagatgcaggacctggaggagaccatggccaagctgcagctggagctgaacctgtgccagaaggagaaggagcggctgagtgatgagctgctggtgaagagtgacctggagaccgtggtgcaccagctggagcaggagaagcagaggctgagcaagaaggtggagagctttgctgtgacagagcggcagctgaccctggaggtggagaggatgaggctggagcacggcatcaagagaagagacaggagccccagccggctggacaccttcctgaagggcatcgaggaggagcgggactactacaagaaggagctggagcggctgcagcacatcatccagaggaggagctgcagcaccagctacagcgcccgggagaagagcagcatcttccgcaccccagagaagggggactacaacagcgagatccaccagatcacccgggagagagatgagctgcagaggatgctggagagatttgagaagtacatggaggacatccagagcaatgtgaagctgctgacagctgagcgggacaagctgtctgtgctgtacaatgaggcccaggaggagctgagcgccctgaggaaggagagcacccagaccacagccccccacaacatcgtgtccctgatggagaaggagaaggagctggccctgagtgacctgcggcgcatcatggccgagaaggaggccctgcgggagaagctggagcacatcgaggaggtgtccctgtttgggaagtctgagctggagaagaccatcgagcacctgacctgtgtgaaccaccagctggagagcgagaagtatgagctgaagagcaaggtgctgatcatgaaggagaccatcgagagcctggagaacaagctgaaggtgcaggcccagaagttcagccacgtggccggggacagcagccaccagaagacagaggtgaacagcctgagaattgtgaatgagcagctgcagaggtctgtggatgactaccagcaccggctgagcatcaagagaggagagctggagagcgcccaggcccagatcaagatcctggaggagaagattgatgagctgaacctgaagatgaccagccaggatgaggaggcccacgtgatgaagaagaccatcggggtcatcgacaaggagaaggacttcctgcaggagaccgtggatgagaagacagagaagatcgccaacctgcaggagaacctggccaacaaggagaaggctgtggcccagatgaagatcatgatcagtgaatgtgagagctctgtgaaccagctgaaggagaccctggtgaacagagaccgggagatcaacagcctgcggcggcagctggatgctgcccacaaggagctggatgaggtgggccgcagccgggagatcgccttcaaggaaaatagaaggctgcaggatgacctggccaccatggcccgggagaaccaggagatcagcctggagctggaggccgctgtgcaggagaaggaggagatgaagagccgggtgcacaagtacatcacagaggtgagccgctgggagagcctgatggccgccaaggagaaggagaaccaggacctgctggaccgcttccagatgctgcacaacagagctgaggactgggaggtgaaggcccaccaggccgagggggagagcagctctgtgcggctggagctgctgagcattgacacagagcggcggcacctgcgggagcgggtggagctgctggagaaggagatccaggagcacatcaatgcccaccacgcctatgagagccagatcagctccatggccaaggccatgagccggctggaggaggagctgcggcaccaggaggatgagaaggccaccgtgctgaatgacctgagcagcctgcgggagctgtgcatcaagctggacagcggcaaggacatcatgacccagcagctgaacagcaagaacctggagtttgagcgggtggtggtggagctggagaatgtgaagtctgagagtgacctgctgaagaagcagctgagcaatgaaagacacacagtgaagaacctggagagcctgctggccaccaacagagacaaggagttccacagccacctgaccagccatgagaaggacacagagatccagctgctgaaggagaagctgaccctgtctgagagcaagctgaccagccagagccgggagaacaccatgctgcgggccaaggtggcccagctgcagacagattatgatgccctgaagaggcagatcagcacagaaagatatgagcgggagcgggccatccaggagatgagaagacatggcctggccaccccacccctgagcagcaccctgcggagccccagccacagccctgagcacagaaatgtgtag

SEQ ID NO: 18398 - DNA, 1512 bp, synthetic construct
  source 1..1512: mol_type = other DNA; note = Synthetic coding sequence
atgcccaacgtggccgagacagagaggagcaatgattctggaaatggagagcacaagtctgagaggaagagccctgaggagaacctgcagggcgctgtgaagagcttctgcaccagcgccagcggggcccccctgggccccaagggagatggccactacccctggagctgccctgtgacccacacccgggagaagatctatgccatctgcagcgactatgccttcctgaaccaggccaccagcatctacaagacccccaaccccagccgcagcccctgcctgcctgacagcaccagcctgtctgctggcaacaacagcagccgctacatcggcatccccaccagcaccagcgagatcatctacaatgaggagaacagcctggagaacctgagcaacagcctgggcaagctgcccctggcctgggagattgacaagtcagaatttgatggagtgaccaccaacagcaagcacaagtctggaaatgccaagaagcaggtgtccaagaggaagaccagtgacaagaagggccgctaccagaaggaatgtccccagcacagccccctggaggacatcaagcagaggaaggtgctggacctgcggcgctggtactgcatcagccggccccagtacaagaccagctgtggcatcagcagcctcatcagctgctggaacttcctgtacagcaccatgggcgccggcaacctgccccccatcacccaggaggaggccctgcacatcctgggcttccagcccccatttgaggacatccgcttcggccccttcaccggcaacaccaccctgatgcgctggttccggcagatcaatgaccacttccacgtgaagggctgcagctatgtgctgtacaagccccacggcaagaacaagacagctggggagacagccagcggggccctgagcaagctgacccggggcctgaaggatgagagcctggcctacatctaccactgccagaaccactacttctgccccatcggctttgaggccacccctgtgaaggccaacaaggccttcagccggggccccctgagcccccaggaggtggagtactggatcctgattggagagagcagcaggaagcacccagccatccactgcaagaagtgggccgacatcgtgacagacctgaacacccagaaccctgagtacctggacatccgccacctggagcggggcctgcagtacaggaagaccaagaaggtgggcggcaacctgcactgcatcatcgccttccagaggctgaactggcagagatttggcctgtggaacttccccttcggcaccatccggcaggagagccagccccccacccacgcccagggcatcgccaagtctgagagcgaggacaacatcagcaagaagcagcacggccgcctgggccgctccttcagcgccagcttccaccaggacagcgcctggaagaagatgagcagcatccacgagaggagaaattctggctaccagggctacagcgactatgatggaaatgactag

SEQ ID NO: 18399 - DNA, 813 bp, synthetic construct
  source 1..813: mol_type = other DNA; note = Synthetic coding sequence
atggaggccgaggagctggagcaggagcgggagcagctgcggctgcagctgtgggaggcctactgccaggtgcgctacctgtgcagccacctgcggggaaatgacagcgctgacagcgctgtgtccacagacagctccatggatgagagcagcgagaccagcagcgccaaggatgtgcctgctggcagcctgaggacagccctgaatgagctgaagaggctcatccagagcatcgtggatggcatggagcccaccggcagccggcggctggatgatgacagcctggaggagcagatccggcagaccagcgaggacagccgggccctgcgggagctgatggagggggagcggggcaagctgcggcagagcctggaggagctgcagaggctgcacagccaggtgaccctgctgtctgtggagatgacagccctgaaggaggagcgggaccggctgcgggtgaccagcgaggacaaggagcccaaggagcagctgcagaaggccatccgggacagagatgaggccatcgccaagaagaatgctgtggagctggagctggccaagtgcaggatggacatgatgagcctgaacagccagctgctggatgccatccagcagaagctgaacctgagccagcagctggaggcctggcaggatgacatgcacagggtcatcgaccggcagctgatggacacccacctgaaggagaggagccagcctgctgctgccctgtgccggggccacagcgctggaagaggagatgagcccagcattgctgagggcaagaggctcttctccttcttcaggaagatctag

SEQ ID NO: 18400 - DNA, 2379 bp, synthetic construct
  source 1..2379: mol_type = other DNA; note = Synthetic coding sequence
atgctgcctgctggggagattggagccagccctgctgccccctgctgcagcgagagcggagatgagaggaagaacctggaggagaagagtgacatcaacgtgacagtgctgattggcagcaagcaggtgtctgagggcacagacaatggagacctgcccagctatgtgtctgccttcatcgagaaggaggtgggcaatgacctgaagagcctgaagaagctggacaagctgattgagcagaggacagtgtccaagatgcagctggaggagcaggtgctgaccatcagcagcgagatccccaagaggatccgcagcgccctgaagaatgctgaggagagcaagcagttcctgaaccagttcctggagcaggagacccacctgttcagcgccatcaacagccacctgctgacagcccagccctggatggatgacctgggcaccatgatcagccagatcgaggagattgagcggcacctggcctacctgaagtggatcagccagatcgaggagctgagtgacaacatccagcagtacctgatgaccaacaacgtgcctgaggccgccagcaccctggtgtccatggccgagctggacatcaagctgcaggagagcagctgcacccacctgctgggcttcatgagggccaccgtgaagttctggcacaagatcctgaaggacaagctgaccagtgactttgaggagatcctggcccagctgcactggcccttcatcgccccaccccagagccagacagtgggcctgagcaggcctgccagcgcccctgagatctacagctacctggagaccctcttctgccagctgctgaagctgcagaccagtgatgagctgctgacagagcccaagcagctgcctgagaagtacagcctgcctgccagccccagcgtcatcctgcccatccaggtgatgctgacccccctgcagaagcgcttccgctaccacttccggggcaaccggcagaccaacgtgctgagcaagccagagtggtacctggcccaggtgctgatgtggattggcaaccacacagagttcctggatgagaagatccagcccatcctggacaaggtgggcagcctggtgaatgcccggctggagttcagccggggcctgatgatgctggtgctggagaagctggccacagacatcccctgcctgctgtatgatgacaacctcttctgccacctggtggatgaggtgctgctgtttgagcgggagctgcacagcgtgcacggctacccaggcacctttgccagctgcatgcacatcctgtctgaggagacctgcttccagcgctggctgactgtggagaggaagtttgccctgcagaagatggacagcatgctgagcagcgaggccgcctgggtgtcccagtacaaggacatcacagatgtggatgagatgaaggtgcctgactgtgccgagaccttcatgaccctgctgctggtgatcacagaccgctacaagaacctgcccacagccagcaggaagctgcagttcctggagctgcagaaggacctggtggatgacttccgcatccggctgacccaggtgatgaaggaggagacccgggccagcctgggcttccgctactgtgccatcctgaatgctgtgaactacatcagcacagtgctggccgactgggccgacaacgtgttcttcctgcagctgcagcaggccgccctggaggtgtttgctgagaacaacaccctgagcaagctgcagctgggccagctggcctccatggagagctctgtgtttgatgacatgatcaacctgctggagcggctgaagcatgacatgctgacccggcaggtggaccacgtgttccgggaggtgaaggatgctgccaagctgtacaagaaggagcgctggctgagcctgcccagccagagcgagcaggccgtgatgagcctgagcagcagcgcctgccccctgctgctgaccctgcgggaccacctgctgcagctggagcagcagctgtgcttcagcctcttcaagatcttctggcagatgctggtggagaagctggatgtgtacatctaccaggagatcatcctggccaaccacttcaatgaaggaggagctgcccagctgcagtttgacatgaccaggaacctcttccccctcttcagccactactgcaagaggcctgagaactacttcaagcacatcaaggaggcctgcatcgtgctgaacctgaatgtgggcagcgccctgctgctgaaggatgtgctgcagagcgccagcggccagctgcctgccacagctgccctgaatgaggtgggcatctacaagctggcccagcaggatgtggagatcctgctgaacctgcggaccaactggcccaacacaggcaagtag

SEQ ID NO: 18401 - DNA, 1068 bp, synthetic construct
  source 1..1068: mol_type = other DNA; note = Synthetic coding sequence
gtgcggggcgtgcgggccgccacagctgctgctgtggccgccacagctgccagcggcctgagccggcgggaggccggcggccgggccggggctgctgctgctgtggtgcggcccccaggcaggaaatgtggccgctgccggcggctggccaacttccctggcaggaagagaagaagaagaagaaggaagggcctgggcgccaccactggaggctgtggggaggccgtgagcagcctgcacccagccccccacagccccagctctgtgcggcctgctggccggcgggcccggcggcagaggagaggagctggcagcgctgagcggcccatgtctggagctggggaggccctggcccctggccctgtgggcccccagagggtggccgaggccggcggcggccagctgggcagcacagcccagggcaaatgtgacaaggacaacacagagaaggacatcacccaggccaccaacagccacttcacccacggggagatgcaggaccagagcatctggggcaaccccagtgatggagagctgatccgcacccagccccagaggctgccccagctgcagaccagcgcccaggtgcccagcggggaggagatcggcaagatcaagaatggccacacaggcctgagcaatggaaatggcatccaccacggggccaagcacggcagcgctgacaacaggaagctgagcgcccctgtgtcccagaagatgcacaggaagatccagagcagcctgtctgtgaacagcgacatcagcaagaagagcaaggtgaatgctgtgttcagccagaagacaggcagcagccctgaggactgctgcgtgcactgcatcctggcctgcctcttctgtgagttcctgaccctgtgcaacatcgtgctgggccaggccagctgtggcatctgcaccagcgaggcctgctgctgctgctgcggagatgagatgggagatgactgcaactgcccctgtgacatggactgtggcatcatggatgcctgctgtgagagcagtgactgcctggagatctgcatggagtgctgcggcatctgcttccccagctag

SEQ ID NO: 18402 - DNA, 378 bp, synthetic construct
  source 1..378: mol_type = other DNA; note = Synthetic coding sequence
atgctgagccggctgctgaaggagcaccaggccaagcagaatgaaaggaaggagctgcaggagaagagaagaagagaggccatcacagctgccacctgcctgacagaggccctggtggaccacctgaatgtgggcgtggcccaggcctacatgaaccagaggaagctggaccacgaggtgaagaccctgcaggtgcaggccgcccagtttgccaagcagacaggccagtggattggcatggtggagaacttcaaccaggccctgaaggagattggagatgtggagaactgggcccggagcattgagctggacatgaggaccatcgccacagccctggagtatgtgtacaagggccagctgcagagcgcccccagctag

SEQ ID NO: 18403 - DNA, 2337 bp, synthetic construct
  source 1..2337: mol_type = other DNA; note = Synthetic coding sequence
atgaccacccggcaggccaccaaggaccccctgctgcggggcgtgagccccacccccagcaagatccctgtgcgcagccagaagaggacccccttccccaccgtgaccagctgtgctgtggaccaggagaaccaggacccccggcgctgggtgcagaagccacccctgaacatccagaggcccctggtggacagcgctggcccccggcccaaggcccggcaccaggccgagaccagccagaggctggtgggcatcagccagcccaggaaccccctggaggagctgcggcccagcccccggggccagaatgtgggccctggccccccagcccagacagaggcccctggcaccatcgagtttgtggccgaccctgctgccctggccaccatcctgagcggggagggcgtgaagagctgccacctgggccggcagcccagcctggccaagagggtgctggtgcggggcagccagggcggcaccacccagagggtgcagggcgtgcgggccagcgcctacctggcccccaggacccccacccaccggctggaccctgcccgggccagctgcttcagccggctggagggccctggcccccggggccgcaccctgtgcccccagaggctgcaggccctgatcagccccagcggccccagcttccaccccagcacccggcccagcttccaggagctgcggcgggagacagctggcagcagcaggacctctgtgtcccaggccagcggcctgctgctggagacccctgtgcagcctgccttcagcctgcccaagggggagcgggaggtggtgacccacagtgatgagggcggcgtggccagcctgggcctggcccagagggtgcccctgagagaaaatcgggagatgagccacacccgggacagccatgacagccacctgatgcccagccctgcccctgtggcccagcccctgcccggccacgtggtgccctgccccagccccttcggccgggcccagagggtgcccagccctggcccccccaccctgaccagctacagcgtgctgcggcggctgactgtgcagcccaagacccgcttcacccccatgcccagcaccccccgggtgcagcaggcccagtggctgcggggcgtgagcccccagagctgcagcgaggaccctgccctgccctgggagcaggtggccgtgcggctgtttgaccaggagagctgcatccgcagcctggagggcagcggcaagccccctgtggccaccccatctggcccccacagcaacagaacacccagcctgcaggaggtgaagatccagagaattggcatcctgcagcagctgctgcggcaggaggtggagggcctggtgggcggccagtgtgtgcccctgaatggaggcagcagcctggacatggtggagctgcagcccctgctgacagagatcagcaggaccctgaatgccacagagcacaacagcggcaccagccacctgcccggcctgctgaagcacagcggcctgcccaagccctgcctgcctgaggagtgtggggagccccagccctgccccccagctgagcccggccccccagaggccttctgccgctctgagcctgagatccctgagcccagcctgcaggagcagctggaggtgcctgagccctacccacctgctgagccccggcccctggagagctgctgccgctctgagcctgagatccctgagagcagccggcaggagcagctggaggtgcctgagccctgccccccagctgagccccggcccctggagagctactgcagaattgagcctgagatccctgagagcagccggcaggagcagctggaggtgcctgagccctgccccccagctgagcccggccccctgcagcccagcacccagggccagagcggccccccaggcccctgcccccgggtggagctgggcgccagcgagccctgcaccctggagcacaggagcctggagagcagcctgcccccctgctgcagccagtgggccccagccaccaccagcctcatcttcagcagccagcaccccctgtgtgccagcccccccatctgcagcctgcagagcctgcggcccccagctggccaggccggcctgagcaacctggcccccaggaccctggccctgcgggagcggctgaagagctgcctgacagccatccactgcttccacgaggcccggctggatgatgaatgtgccttctacaccagccgggccccacccagcggccccaccagggtgtgcaccaaccctgtggccaccctgctggagtggcaggatgccctgtgcttcatccctgtgggcagcgctgccccccagggcagcccctag

SEQ ID NO: 18404 - DNA, 1803 bp, synthetic construct
  source 1..1803: mol_type = other DNA; note = Synthetic coding sequence
atgagctgccgcagctacagagtgagcagcggccaccgggtgggcaacttcagcagctgcagcgccatgaccccccagaacctgaaccgcttccgggccaacagcgtgtcctgctggagcggccctggcttccggggcctgggcagctttggcagccgcagcgtcatcaccttcggcagctacagccccagaattgctgctgtgggcagccggcccatccactgcggcgtgcgctttggagctggctgcggcatgggctttggagatggccggggcgtgggcctgggccccagggctgacagctgtgtgggcctgggctttggagctggcagcggcatcggctacggctttggaggccctggcttcggctacagagtgggcggcgtgggcgtgcctgctgcccccagcatcacagctgtgacagtgaacaagagcctgctgacccccctgaacctggagattgaccccaatgcccagagggtgaagaaggatgagaaggagcagatcaagaccctgaacaacaagtttgccagcttcatcgacaaggtgcgcttcctggagcagcagaacaagctgctggagaccaagtggagcttcctgcaggagcagaagtgcatccgcagcaacctggagcccctgtttgagagctacatcaccaacctgcggcggcagctggaggtgctggtgtctgaccaggcccggctgcaggccgagaggaaccacctgcaggatgtgctggagggcttcaagaagaagtatgaggaggaggtggtgtgccgggccaatgcagaaaatgaatttgtggccctgaagaaggatgtggatgctgccttcatgaacaagagtgacctggaggccaacgtggacaccctgacccaggagattgacttcctgaagaccctgtacatggaggagatccagctgctgcagagccacatcagcgagacctctgtgattgtgaagatggacaacagccgggacctgaacctggatggcatcatcgccgaggtgaaggcccagtatgaggaggtggcccggcgcagcagagcagatgctgaggcctggtaccagaccaagtatgaggagatgcaggtgacagctggccagcactgtgacaacctgaggaacatcagaaatgagatcaatgagctgaccaggctcatccagaggctgaaggccgagattgaacatgccaaggcccagagggccaagctggaggccgctgtggccgaggccgagcagcagggcgaggccaccctgagtgatgccaagtgcaagctggccgacctggagtgtgccctgcagcaggccaagcaggacatggcccggcagctgtgtgagtaccaggagctgatgaatgccaagctgggcctggacatcgagatcgccacctaccgccgcctgctggagggggaggagagccggctgtgtgaaggagtgggccctgtgaacatctctgtgagcagcagccggggcggcctggtgtgtggccctgagcccctggtggccggcagcaccctgagccggggcggcgtgaccttcagcggcagcagctctgtgtgtgccaccagcggcgtgctggccagctgtggccccagcctgggcggggcccgggtggccccagccactggagacctgctgagcacaggcaccaggagcggctccatgctgatcagcgaggcctgtgtgcccagcgtgccctgccccctgcccacccagggcggcttcagcagctgcagcggcggccgcagcagctctgtgcgctttgtgtccaccaccaccagctgcaggaccaagtactag

SEQ ID NO: 18405 - DNA, 1542 bp, synthetic construct
  source 1..1542: mol_type = other DNA; note = Synthetic coding sequence
atgagctaccacagcttccagcccggcagccgctgtggcagccagagcttcagcagctacagcgctgtgatgcccaggatggtgacccactatgctgtgtccaagggcccctgcaggcctgggggcggccggggcctgcgggccctgggctgcctgggcagccgcagcctgtgcaatgtgggcttcggccggccccgggtggccagccgctgtggcggcaccctgcccggcttcggctaccgcctgggcgccacctgtggccccagcgcctgcatcacccctgtgaccatcaatgaaagcctgctggtgcccctggccctggagattgaccccaccgtgcagagggtgaagagagatgagaaggagcagatcaagtgcctgaacaacagatttgccagcttcatcaacaaggtgcgcttcctggagcagaagaacaagctgctggagaccaagtggaacttcatgcagcagcagcgctgctgccagaccaacatcgagcccatctttgagggctacatcagcgccctgcggcggcagctggactgtgtgtctggggacagagtgcggctggagagcgagctgtgcagcctgcaggccgccctggagggctacaagaagaagtatgaggaggagctgagcctgcggccctgtgtggagaatgaatttgtggccctgaagaaggatgtggacacagccttcctgatgaaggctgacctggagaccaatgctgaggccctggtgcaggagattgacttcctgaagagcctgtatgaggaggagatctgcctgctgcagagccagatcagcgagaccagcgtcatcgtgaagatggacaacagccgggagctggatgtggatggcatcatcgccgagatcaaggcccagtatgatgacatcgccagccgcagcaaggccgaggccgaggcctggtaccagtgccgctatgaggagctgcgggtgacagctggcaaccactgtgacaacctgaggaacaggaagaatgagatcctggagatgaacaagctgatccagaggctgcagcaggagacagaaaatgtgaaggcccagcgctgcaagctggagggcgccatcgccgaggccgagcagcagggcgaggccgccctgaatgatgccaagtgcaagctggccggcctggaggaggccctgcagaaggccaagcaggacatggcctgcctgctgaaggagtaccaggaggtgatgaacagcaagctgggcctggacattgaaattgccacctacagaaggctgctggagggggaggagcaccggctgtgtgagggcatcggccctgtgaacatctctgtgagcagcagcaagggggccttcctgtatgagccctgtggggtgtccacccctgtgctgagcactggagtgctgcggagcaatggaggctgcagcatcgtgggcactggagagctgtatgtgccctgtgagccccagggcctgctgagctgtggcagcggcaggaagagctccatgaccctgggcgctgggggcagcagccccagccacaagcactag

SEQ ID NO: 18406 - DNA, 1632 bp, synthetic construct
  source 1..1632: mol_type = other DNA; note = Synthetic coding sequence
atgatgcccacccctgtgatcctgctgaaggagggcacagacagcagccagggcatcccccagctggtgagcaacatcagcgcctgccaggtgattgctgaggccgtgaggaccaccctgggcccccggggcatggacaagctgattgtggatggccggggcaaggccaccatcagcaatgatggagccaccatcctgaagctgctggatgtggtgcaccctgctgccaagaccctggtggacatcgccaagagccaggatgctgaggtgggagatggcaccacctctgtgaccctgctggccgctgagttcctgaagcaggtgaagccctacgtggaggagggcctgcacccccagatcatcatccgggccttcagaacagccacccagctggccgtgaacaagatcaaggagattgctgtgacagtgaagaaggctgacaaggtggagcagaggaagctgctggagaagtgtgccatgacagccctgagcagcaagctgatcagccagcagaaggccttctttgccaagatggtggtggatgctgtgatgatgctggatgacctgctgcagctgaagatgattggcatcaagaaggtgcagggcggggccctggaggacagccagctggtggccggcgtggccttcaagaagaccttctcctatgccggctttgagatgcagcccaagaagtaccacaaccccaagatcgccctgctgaatgtggagctggagctgaaggccgagaaggacaatgctgagatccgggtgcacacagtggaggactaccaggccatcgtggatgctgagtggaacatcctgtatgacaagctggagaagatccaccacagcggggccaaggtggtgctgagcaagctgcccatcggagatgtggccacccagtactttgctgaccgggacatgttctgtgccggccgggtgcctgaggaggacctgaagaggaccatgatggcctgtggcggcagcatccagacctctgtgaatgccctgtctgcagatgtgctgggccgctgccaggtgtttgaggagacccagattggaggagagcgctacaacttcttcaccggctgccccaaggccaagacctgcaccttcatcctgcggggcggcgctgagcagttcatggaggagacagagaggagcctgcatgatgccatcatgattgtgagaagagccatcaagaatgacagcgtggtggccggcggcggggccatcgagatggagctgagcaagtacctgcgggactacagcaggaccatccctgggaagcagcagctgctgattggagcctatgccaaggccctggagatcatcccccggcagctgtgtgacaatgccggctttgatgccaccaacatcctgaacaagctgcgggcccggcatgcccagggcggcacctggtatggagtggacatcaacaatgaagatattgctgacaactttgaggcctttgtgtgggagcccgccatggtgcgcatcaatgccctgacagctgccagcgaggccgcctgcctgattgtgtctgtggatgagaccatcaagaaccccaggagcacagtggatgcccccacagctgctggccggggccggggccggggccggccccactag

SEQ ID NO: 18407 - DNA, 1479 bp, synthetic construct
  source 1..1479: mol_type = other DNA; note = Synthetic coding sequence
atggcccctgtgggcgtggagaagaagctgctgctgggccccaatggacctgctgtggccgccgccggggacctgaccagcgaggaggaggagggccagagcctgtggagcagcatcctgtctgaggtgtccacccgggcccggagcaagctgcccagcggcaagaacatcctggtgtttggagaagatggcagcggcaagaccaccctgatgaccaagctgcagggcgctgagcacggcaagaagggccggggcctggagtacctgtacctgtctgtgcatgatgaggacagagatgaccacacccgctgcaatgtgtggatcctggatggagacctgtaccacaagggcctgctgaagtttgctgtgtctgctgagagcctgcctgagaccctggtgatctttgtggccgacatgagccggccctggacagtgatggagagcctgcagaagtgggcctctgtgctgcgggagcacatcgacaagatgaagatccccccagagaagatgagggagctggagaggaagtttgtgaaggacttccaggactacatggagcctgaggagggctgccagggcagcccccagaggcggggccccctgaccagcggcagtgatgaggagaatgtggccctgcccctgggggacaacgtgctgacccacaacctgggcatccctgtgctggtggtgtgcaccaagtgtgatgctgtgtctgtgctggagaaggagcatgactacagagatgagcacctggacttcatccagagccacctgcggcgcttctgcctgcagtatggagctgccctgatctacacctctgtgaaggaggagaagaacctggacctgctgtacaagtacatcgtgcacaagacctacggcttccacttcaccaccccagccctggtggtggagaaggatgctgtgttcatcccagctggctgggacaatgagaagaagatcgccatcctgcacgagaacttcaccaccgtgaagccagaagatgcctatgaggacttcatcgtgaagccccctgtgaggaagctggtgcatgacaaggagctggccgcagaagatgagcaggtgttcctgatgaagcagcagagcctgctggccaagcagcctgccacccccacccgggccagcgagagccctgcccggggccccagcggcagccccaggacccagggccggggcggccctgcctctgtgcccagcagcagccctggcacctctgtgaagaagccagaccccaacatcaagaacaatgctgccagcgagggcgtgctggccagcttcttcaacagcctgctgagcaagaagacaggcagccctggcagccctggagctggaggagtgcagagcacagccaagaagagcggccagaagacagtgctgagcaatgtgcaggaggagctggacaggatgaccaggaagccagacagcatggtgaccaacagcagcacagaaaatgaggcctag

SEQ ID NO: 18408 - DNA, 540 bp, synthetic construct
  source 1..540: mol_type = other DNA; note = Synthetic coding sequence
atggacaaggactttgacaagctgcatgaatttgtggagatcatgaaggagatgcagaaggacatggatgagaagatggacatcctgatcaacacccagaagaactacaagctgcccctgcggcgggcccccaaggagcagcaggagctgcggctgatgggcaagacccaccgggagccccagctgcggcccaagaagatggatggagccagcggcgtgaatggagccccctgtgccctgcacaagaagaccatggccccccagaagaccaagcagggcagcctggaccccctgcaccactgcggcacctgctgtgagaagtgcctgctgtgtgccctgaagaacaactacaacagagctgcccccctgaaggaggcccggcacctgctgacagccaacagcattgaccccagcgctgccctggtgctgctgattgagttcctgctgctgaccctggtgactggagctgctgcccctggcctggatgcctgtggccaccagaggaacatgagagatgagatcaacagcgagaggaggtag

SEQ ID NO: 18409 - DNA, 3600 bp, synthetic construct
  source 1..3600: mol_type = other DNA; note = Synthetic coding sequence
atggccagcgctggcacccagcactacagcatcggcctgcggcagaagaacagcttcaagcagagcggccccagcggcaccgtgcctgccaccccacctgagaagcccagcgagggccgggtgtggccccaggcccaccagcaggtgaagcccatctggaagctggagaagaagcaggtggagaccctgtctgctggcctgggccctggcctgctgggcgtgcccccccagcctgcctacttcttctgccccagcaccctgtgcagcagcggcaccacagctgtgattgctggccacagcagcagctgctacctgcacagcctgcctgacctcttcaacagcaccctgctgtacagaagaagcagctaccggcagaagccctaccagcagctggagagcttctgcctgcggagcagccccagcgagaagagccccttcagcctgccccagaagagcctgcctgtgtccctgacagccaacaaggccaccagctccatggtgttctccatggcccagcccatggccagcagcagcacagagccctacctgtgcctggccgccgccggggagaaccccagcggcaagagcctggccagcgccatcagcggcaagatccccagccccctgagcagcagctacaagcccatgctgaacaacaacagcttcatgtggcccaacagcacccctgtgcccctgctgcagaccacccagggcctgaagcctgtgagcccccccaagatccagcctgtgtcctggcaccacagcggcggcaccggggactgtgccccccagcctgtggaccacaaggtgcccaagagcatcggcaccgtgcctgcagatgccagcgcccacatcgccctgagcacagccagcagccatgacaccagcaccacctctgtggccagctcctggtacaacagaaacaacctggccatgagagctgagcccctgagctgtgccctggatgacagcagtgacagccaggaccccaccaaggagatccgcttcacagaagctgtgaggaagctgacagcccggggctttgagaagatgccccggcagggctgccagctggagcagagcagcttcctgaaccccagcttccagtggaatgtgctgaacagaagccgccgctggaagcccccagctgtgaaccagcagttcccccaggaggatgctggctctgtgagaagagtgctgcccggggccagtgacaccctgggcctggacaacacagtgttctgcaccaagaggatcagcatccacctgctggccagccacgccagcggcctgaaccacaacccagcctgtgagagcgtgattgacagcagcgccttcggggagggcaaggcccctggcccccccttcccccagaccctgggcatcgccaacgtggccacccggctgagcagcatccagctgggccagagcgagaaggagaggcctgaggaggcccgggagctggacagcagtgaccgggacatcagcagcgccacagacctgcagcctgaccaggccgagacagaggacacagaggaggagctggtggatggcctggaggactgctgcagcagagatgaaaatgaggaggaggagggggacagcgagtgcagcagcctgtctgctgtgagccccagcgagagcgtggccatgatcagccgcagctgcatggagatcctgaccaagcccctgagcaaccacgagaaggtggtgcggcctgccctgatctacagcctcttccccaacgtgccccccaccatctacttcggcaccagagatgagcgggtggagaagctgccctgggagcagaggaagctgctgcgctggaagatgagcacagtgacccccaacatcgtgaagcagaccatcggccgcagccacttcaagatcagcaagagaaatgatgactggctgggctgctggggccaccacatgaagagccccagcttccgcagcatccgggagcaccagaagctgaaccacttccctggcagcttccagatcggcaggaaggaccggctgtggaggaacctgagcaggatgcagagcagatttgggaagaaggagttctccttcttcccccagagcttcatcctgccccaggatgccaagctgctgaggaaggcctgggagagcagcagccggcagaagtggatcgtgaagcccccagccagcgcccggggcatcggcatccaggtgatccacaagtggagccagctgcccaagagaagacccctgctggtgcagcgctacctgcacaagccctacctgatcagcggcagcaagtttgacctgcgcatctacgtgtatgtgaccagctatgaccccctgcgcatctacctgttcagtgatggcctggtgcgctttgccagctgcaagtacagccccagcatgaagagcctgggcaacaagttcatgcacctgaccaactacagcgtgaacaagaagaatgctgagtaccaggccaatgctgatgagatggcctgccagggccacaagtgggccctgaaggccctgtggaactacctgagccagaagggcgtgaacagtgatgccatctgggagaagatcaaggatgtggtggtgaagaccatcatcagcagcgagccctacgtgaccagcctgctgaagatgtatgtgagaagaccctacagctgccacgagctgtttggatttgacatcatgctggatgagaacctgaagccctgggtgctggaggtgaacatcagccccagcctgcacagcagcagccccctggacatcagcatcaagggccagatgatccgggacctgctgaacctggccggctttgtgctgcccaatgctgaggacatcatcagcagccccagcagctgcagcagcagcaccaccagcctgcccaccagccctggggacaagtgcaggatggcccctgagcacgtgacagcccagaagatgaagaaggcctactacctgacccagaagatcccagaccaggacttctacgcctctgtgctggatgtgctgaccccagatgatgtgcgcatcctggtggagatggaggatgagttcagcagaagaggccagtttgagcgcatcttccccagccacatcagcagccgctacctgcgcttctttgagcagccccgctacttcaacatcctgaccacccagtgggagcagaagtaccacggcaacaagctgaagggcgtggacctgctgcgctcctggtgctacaagggcttccacatgggcgtggtgtctgattctgcccctgtgtggagcctgcccaccagcctgctgaccatcagcaaggatgatgtgatcctgaatgccttcagcaagtctgagaccagcaagctgggcaagcagagcagctgtgaggtgtccctgctgctgtctgaagatggcaccacccccaagagcaagaagacccaggccggcctgagcccctacccccagaagcccagcagcagcaaggacagcgaggacaccagcaaggagcccagcctgagcacccagaccctgcccgtcatcaagtgcagcggccagaccagccggctgagcgccagcagcaccttccagagcatcagtgacagcctgctggccgtgagcccctag

SEQ ID NO: 18410 - DNA, 2772 bp, synthetic construct
  source 1..2772: mol_type = other DNA; note = Synthetic coding sequence
atgctgcggcggggcagccaggccctgcggcgcttcagcacaggccgggtgtacttcaagaacaagctgaagctggccctgattggccagagcctgtttggccaggaggtgtacagccacctgaggaaggagggccaccgggtggtgggcgtcttcaccgtgcctgacaaggatggcaaggctgaccccctggccctggccgctgagaaggatggcacccctgtgttcaagctgcccaagtggagggtgaagggcaagaccatcaaggaggtggccgaggcctacagatctgtgggcgctgagctgaatgtgctgcccttctgcacccagttcatccccatggacatcatcgacagccccaagcacggcagcatcatctaccaccccagcatcctgcccaggcacagaggagccagcgccatcaactggaccctcatcatgggagacaagaaggccggcttctctgtgttctgggcagatgatggcctggacaccggccccatcctgctgcagaggagctgtgatgtggagcccaatgacacagtggatgccctgtacaaccgcttcctgtttcctgagggcatcaaggccatggtggaggccgtgcagctgattgctgatggcaaggccccccgcatcccccagcctgaggagggcgccacctatgagggcatccagaagaaggaaaatgctgagatctcctgggaccagagcgctgaggtgctgcacaactggatccggggccatgacaaggtgcctggggcctggacagagatcaatggccagatggtgaccttctacggcagcaccctgctgaacagctctgtgcccccaggagagcccctggagatcaagggggccaagaagccaggcctggtgaccaagaatggcctggtgctgtttggaaatgatggcaaggccctgactgtgaggaacctgcagtttgaagatggcaagatgatcccagccagccagtacttcagcactggagagacctctgtggtggagctgacagctgaggaggtgaaggtggccgagaccatcaaggtgatctgggccggcatcctgagcaatgtgcccatcatcgaggacagcacagacttcttcaagagcggggccagctccatggatgtggcccggctggtggaggagatccggcagaagtgtggcggcctgcagctgcagaatgaagatgtgtacatggccaccaagtttgagggcttcatccagaaggtggtgaggaagctgcggggggaggaccaggaggtggagctggtggtggactacatcagcaaggaggtgaatgagatcatggtgaagatgccctaccagtgcttcatcaatggccagttcacagatgctgatgatggcaagacctatgacaccatcaaccccacagatggcagcaccatctgcaaggtgtcctatgccagcctggctgatgtggacaaggctgtggccgccgccaaggatgcctttgaaaatggagagtggggccgcatgaatgcccgggagcggggccgcctgatgtaccgcctggccgacctgctggaggagaaccaggaggagctggccaccatcgaggccctggacagcggggctgtgtacaccctggccctgaagacccacatcggcatgtctgtgcagaccttccgctactttgctggctggtgtgacaagatccagggcagcaccatccccatcaaccaggcccggcccaacagaaacctgaccttcaccaagaaggagcccctgggcgtgtgtgccatcatcatcccctggaactaccccctgatgatgctggcctggaagtctgctgcctgcctggccgccggcaacaccctggtgctgaagccagcccaggtgacccccctgacagccctgaagtttgctgagctgtctgtgaaggccggcttccccaagggcgtcatcaacatcatccctggcagcggcggcattgctggccagaggctgtctgagcacccagacatcaggaagctgggcttcaccggcagcacccccatcggcaagcagatcatgaagagctgtgctgtgagcaacctgaagaaggtgtccctggagctgggcggcaagagccccctcatcatcttcaatgactgtgagctggacaaggctgtgaggatgggcatgggcgctgtgttcttcaacaagggggagaactgcatcgctgctggccgcctgtttgtggaggagagcatccatgatgaatttgtgaccagggtggtggaggagatcaagaagatgaagattggagaccccctggacaggagcacagaccacggcccccagaaccacaaggcccacctggagaagctgctgcagtactgtgaaacaggagtgaaggagggcgccaccctggtgtatggaggccggcaggtgcagaggcctggcttcttcatggagcccaccgtcttcacagatgtggaggactacatgtacctggccaaggaggagagctttggccccatcatggtgatcagcaagttccagaatggagacattgatggagtgctgcagagggccaacagcacagaatatggcctggccagcggggtcttcacccgggacatcaacaaggccatgtatgtgtctgagaagctggaggccggcaccgtcttcatcaacacctacaacaagacagatgtggccgccccctttggaggagtgaagcagagcggctttgggaaggacctgggggaggaggccctgaatgagtacctgaagaccaagacagtgaccctggagtactag

SEQ ID NO: 18411 - DNA, 1323 bp, synthetic construct
  source 1..1323: mol_type = other DNA; note = Synthetic coding sequence
atggagggcgtgctgtacaagtggaccaactacctgagcggctggcagccccgctggttcctgctgtgtggcggcatcctgagctactatgacagcccagaagatgcctggaagggctgcaagggcagcatccagatggctgtgtgtgagatccaggtgcacagcgtggacaacaccaggatggacctgatcatccctggagagcagtacttctacctgaaggcccggtctgtggccgagcggcagcgctggctggtggccctgggcagcgccaaggcctgcctgacagacagcaggacccagaaggagaaggagtttgctgagaacacagagaacctgaagaccaagatgtctgagctgcggctgtactgtgacctgctggtgcagcaggtggacaagaccaaggaggtgaccaccaccggggtgagcaacagcgaggagggcattgatgtgggcaccctgctgaagagcacctgcaacaccttcctgaagaccctggaggagtgcatgcagatcgccaatgctgccttcaccagcgagctgctgtaccgcaccccacctggcagcccccagctggccatgctgaagagcagcaagatgaagcaccccatcatccccatccacaacagcctggagcggcagatggagctgagcacctgtgaaaatggcagcctgaacatggagatcaacggggaggaggagatcctgatgaagaacaagaacagcctgtacctgaagtctgctgagattgactgcagcatcagcagcgaggagaacacagatgacaacatcaccgtgcagggcgagatcagaaaagaagatggcatggagaacctgaagaaccacgacaacaacctgacccagagcggcagtgacagcagctgcagccctgagtgcctgtgggaggagggcaaggaggtgatccccaccttcttcagcaccatgaacaccagcttcagtgacatcgagctgctggaggacagcggcatccccacagaggccttcctggccagctgctatgctgtggtgcctgtgctggacaagctgggccccaccgtgtttgcccctgtgaagatggacctggtgggcaacatcaagaaggtgaaccagaagtacatcaccaacaaggaggagttcaccaccctgcagaagatcgtgctgcacgaggtggaggctgatgtggcccaggtgaggaacagcgccacagaggccctgctgtggctgaagaggggcctgaagttcctgaagggcttcctgacagaggtgaagaatggagagaaggacatccagacagccctgaggaaccccacagagaacacctag

SEQ ID NO: 18412 - DNA, 1272 bp, synthetic construct
  source 1..1272: mol_type = other DNA; note = Synthetic coding sequence
atggccatctgccagttcttcctgcagggccgctgccgctttggagaccgctgctggaatgagcaccctggggcccggggggccggcggcggccggcagcagccccagcagcagcccagcggcaacaacagaagaggctggaacaccaccagccagcgctacagcaatgtcatccagcccagcagcttcagcaagagcaccccctggggcggcagccgggaccaggagaagccctacttcagcagctttgattctggggccagcaccaacaggaaggagggcttcggcctgtctgagaacccctttgccagcctgagcccagatgagcagaaggatgagaagaagctgctggagggcatcgtgaaggacatggaggtgtgggagagcagcggccagtggatgttttctgtgtacagccctgtgaagaagaagcccaacatcagcggcttcacagacatcagccctgaggagctgcggctggagtaccacaacttcctgaccagcaacaacctgcagagctacctgaacagcgtgcagaggctcatcaaccagtggaggaacagagtgaatgagctgaagagcctgaacatcagcaccaaggtggccctgctgagtgatgtgaaggatggagtgaaccaggccgccccagccttcggcttcggcagcagccaggccgccaccttcatgagccctggcttccctgtgaacaacagcagcagtgacaatgcccagaacttctccttcaagaccaacagcggctttgctgctgccagcagcggcagccctgctggcttcggcagcagccctgcctttggagctgctgccagcaccagcagcggcatcagcaccagcgccccagccttcggctttgggaagccagaggtgaccagcgctgccagcttctccttcaagagccctgctgccagcagctttggcagccctggcttcagcggcctgcctgccagcctggccactggacctgtgcgggcccctgtggccccagccttcggcggcggcagctctgtggccggcttcggcagccctggcagccacagccacacagccttcagcaagcccagcagtgacaccttcggcaacagcagcatcagcaccagcctgagcgccagcagcagcatcatcgccacagacaacgtgctcttcaccccccgggacaagctgactgtggaggagctggagcagttccagagcaagaagttcaccctgggcaagatccccctgaagcccccacccctggagctgctgaatgtgtag

SEQ ID NO: 18413 - DNA, 1323 bp, synthetic construct
  source 1..1323: mol_type = other DNA; note = Synthetic coding sequence
atgatggctgatgaggaggaggaggtgaagcccatcctgcagaagctgcaggagctggtggaccagctgtacagcttccgggactgctactttgagacccacagcgtggaggatgctggcaggaagcagcaggatgtgcagaaggagatggagaagaccctgcagcagatggaggaggtggtgggctctgtgcagggcaaggcccaggtgctgatgctgaccgggaaggccctgaatgtgaccccagactacagccccaaggccgaggagctgctgagcaaggctgtgaagctggagcctgagctggtggaggcctggaaccagctgggggaggtgtactggaagaagggagatgtggccgccgcccacacctgcttcagcggggccctgacccactgcaggaacaaggtgtccctgcagaacctgtccatggtgctgcggcagctgaggacagacacagaagatgagcacagccaccacgtgatggacagcgtgcggcaggccaagctggccgtgcagatggatgtgcatgatggccgctcctggtacatcctgggcaacagctacctgagcctgtacttcagcacaggccagaaccccaagatcagccagcaggccctgagcgcctatgcccaggccgagaaggtggacaggaaggccagcagcaacccagacctgcacctgaacagagccaccctgcacaagtatgaggagagctatggagaggccctggagggcttcagcagagctgctgccctggaccctgcctggccagagccccggcagcgggagcagcagctgctggagttcctggaccggctgaccagcctgctggagagcaagggcaaggtgaagaccaagaagctgcagagcatgctgggcagcctgcggcctgcccacctgggcccctgcagtgatggccactaccagagcgccagcggccagaaggtgaccctggagctgaagcccctgagcaccctgcagcccggggtgaacagcggggctgtgatcctgggcaaggtggtgttcagcctgaccacagaggagaaggtgcccttcaccttcggcctggtggacagtgatggcccctgctatgctgtgatggtgtacaacatcgtgcagagctggggcgtgctgattggagacagcgtggccatccctgagcccaacctgcggctgcaccgcatccagcacaagggcaaggactacagcttcagctctgtgcgggtggagacccccctgctgctggtggtgaatggcaagccccagggcagcagcagccaggccgtggccaccgtggccagccggccccagtgtgagtag

SEQ ID NO: 18414 - DNA, 1341 bp, synthetic construct
  source 1..1341: mol_type = other DNA; note = Synthetic coding sequence
atggaggagaccatcaaggacccccccaccagcgctgtgctgctggaccactgccacttcagccaggtgatcttcaacagcgtggagaagttctacatccctggaggagatgtgacctgccactacaccttcacccagcacttcatccccaggaggaaggactggattggcatcttccgggtgggctggaagaccacccgggagtactacaccttcatgtgggtgaccctgcccatcgacctgaacaacaagagcgccaagcagcaggaggtgcagttcaaggcctactacctgcccaaggatgatgagtactaccagttctgctacgtggatgaagatggagtggtgcggggggccagcatccccttccagttccggccagaaaatgaggaggacatcctggtggtgaccacccagggcgaggtggaggagattgagcagcacaacaaggagctgtgcaaggagaaccaggagctgaaggacagctgcatcagcctgcagaagcagaacagcgacatgcaggccgagctgcagaagaagcaggaggagctggagaccctgcagagcatcaacaagaagctggagctgaaggtgaaggagcagaaggactactgggagacagagctgctgcagctgaaggagcagaaccagaagatgagcagtgaaaatgagaagatgggcatccgggtggaccagctgcaggcccagctgagcacccaggagaaggagatggagaagctggtgcagggcgaccaggacaagacagagcagctggagcagctgaagaaggaaaatgaccacctgttcctgagcctgacagagcagaggaaggaccagaagaagctggagcagacagtggagcagatgaagcagaatgagaccacagccatgaagaagcagcaggagctgatggatgagaactttgacctgagcaagaggctgtctgaaaatgagatcatctgcaatgccctgcagaggcagaaggagcggctggagggggagaatgacctgctgaagcgggagaacagccggctgctgagctacatgggcctggacttcaacagcctgccctaccaggtgcccaccagtgatgagggcggggcccggcagaaccctggcctggcctacggcaacccctacagcggcatccaggagagcagcagccccagccccctgagcatcaagaagtgccccatctgcaaggcagatgacatctgtgaccacaccctggagcagcagcagatgcagcccctgtgcttcaactgccccatctgtgacaagatcttccctgccacagagaagcagatctttgaggaccacgtgttctgccacagcctgtag

SEQ ID NO: 18415 - DNA, 1329 bp, synthetic construct
  source 1..1329: mol_type = other DNA; note = Synthetic coding sequence
atggccctgcccggggcccgggcccggggctgggccgccgccgcccgggccgcccagaggagaagaagagtggagaatgccggcggcagccccagccctgagcccgccggccggcgggccgccctgtatgtgcactggccctactgtgagaagcgctgcagctactgcaacttcaacaagtacatcccccggcggctggaggaggccgccatgcagaagtgcctggtgacagaggcccagaccctgctgcggctgagcggcgtgcagagggtggagagcgtcttcttcggcggcggcacccccagcctggccagcccccacacagtggccgctgtgctggaggccgtggcccaggccgcccacctgcctgctgacctggaggtgaccctggaggccaaccccaccagcgcccctggcagccggctggccgagtttggagctgctggggtgaaccggctgagcatcggcctgcagagcctggatgacacagagctgcggctgctgggccgcacccacagcgcctgtgatgccctgcggaccctggccgaggcccggcggctcttccctggccgggtgtctgtggacctgatgctgggcctgcctgcccagcaggtgggcccctggctgggccagctgcaggagctgctgcaccactgtgatgaccacctgagcctgtaccagctgagcctggagcggggcacagccctgtttgcccaggtgcagagaggagccctgcctgccccagaccctgagctggccgctgagatgtaccagaggggccgggctgtgctgcgggaggccggcttccaccagtatgaggtgagcaactttgccagaaatggagccctgagcacccacaactggacctactggcagtgtggccagtacctgggcgtgggccctggggcccacggccgcttcatgccccagggcgctgggggccacacccgggaggcccgcatccagaccctggagccagacaactggatgaaggaggtgatgctgtttggccacggcaccaggaagagggtgcccctgggccgcctggagctgctggaggaggtgctggccctgggcctgaggacagatgtgggcatcacccaccagcactggcagcagtttgagccccagctgaccctgtgggatgtgtttggagccaacaaggaggtgcaggagctgctggagcggggcctgctgcagctggaccaccggggcctgcgctgctcctgggagggcctggccgtgctggacagcctgctgctgaccctgctgccccagctgcaggaggcctggcagcagaggacccccagccctgtgcctgggggctag

SEQ ID NO: 18416 - DNA, 1278 bp, synthetic construct
  source 1..1278: mol_type = other DNA; note = Synthetic coding sequence
atggacaagaacattggagagcagctgaacaaggcctatgaggccttccggcaggcctgcatggaccgggacagcgctgtgaaggagctgcagcagaagacagaaaattatgagcagaggatccgggagcagcaggagcagctgagcctgcagcagaccatcatcgacaagctgaagagccagctgctgctggtgaacagcacccaggacaacaactacggctgtgtgcccctgctggaggacagcgagaccaggaagaacaacctgaccctggaccagccccaggacaaggtgatcagcggcatcgcccgggagaagctgcccaaggtgcggcggcaggaggtgagcagccccaggaaggagaccagcgcccggagcctgggcagccccctgctgcacgagcggggcaacatcgagaagaccttctgggacctgaaggaggagttccacaagatctgcatgctggccaaggcccagaaggaccacctgagcaagctgaacatcccagacacagccacagagacccagtgcagcgtgcccatccagtgcacagacaagacagacaagcaggaggccctcttcaagccccaggccaaggatgacatcaacagaggagcccccagcatcacctctgtgaccccccggggcctgtgcagagatgaggaggacaccagctttgagagcctgagcaagttcaacgtgaagtttcctcccatggacaatgacagcaccttcctgcacagcaccccagagaggcctggcatcctgagccctgccaccagcgaggccgtgtgccaggagaagttcaacatggagttccgggacaaccctggcaactttgtgaagacagaggagaccctgtttgagatccagggcatcgaccccatcgccagcgccatccagaacctgaagaccacagacaagaccaagcccagcaacctggtgaacacctgcatccgcaccaccctggaccgggccgcctgcctgcccccaggggaccacaatgccctgtatgtgaacagcttccccctgctggaccccagtgatgcccccttccccagcctggacagccctgggaaggccatccggggcccccagcagcccatctggaagcccttccccaaccaggacagcgacagcgtggtgctgagcggcacagacagcgagctgcacatcccccgggtgtgtgagttctgccaggccgtgttcccccccagcatcaccagcagaggagacttcctgcggcacctgaacagccacttcaacggggagacctag

SEQ ID NO: 18417 - DNA, 2055 bp, synthetic construct
  source 1..2055: mol_type = other DNA; note = Synthetic coding sequence
atggagaacctgcagaccaacttcagcctggtgcagggcagcaccaagaagctgaatggcatgggagatgatggcagccccccagccaagaagatgatcacagacatccacgccaacgggaagaccatcaacaaggtgcccaccgtgaagaaggagcacctggatgattatggagaggcccctgtggagacagatggagagcacgtgaagaggacctgcacctctgtgcctgagaccctgcacctgaaccccagcctgaagcacaccctggcccagttccacctgagcagccagagcagcctgggcggccctgctgccttcagcgcccggcacagccaggagagcatgagccccaccgtcttcctgcccctgcccagcccccaggtgctgcccggccccctgctgatccccagcgacagcagcacagagctgacccagacagtgctggagggggagagcatcagctgcttccaggtgggcggggagaagaggctgtgcctgccccaggtgctgaacagcgtgctgcgggagttcaccctgcagcagatcaacacagtgtgtgatgagctgtacatctactgcagccgctgcaccagtgaccagctgcacatcctgaaggtgctgggcatcctgcccttcaatgcccccagctgtggcctcatcaccctgacagatgcccagaggctgtgcaatgccctgctgcggcccaggaccttcccccagaatggatctgtgctgcctgccaagagcagcctggcccagctgaaggagaccggcagcgcctttgaggtggagcatgaatgtctgggcaagtgccagggcctgtttgccccccagttctacgtgcagccagatgccccctgcatccagtgcctggagtgctgcggcatgtttgccccccagacctttgtgatgcacagccacaggagcccagacaagaggacctgccactggggctttgagagcgccaagtggcactgctacctgcacgtgaaccagaagtacctgggcaccccagaggagaagaagctgaagatcatcctggaggagatgaaggagaagttctccatgaggtctgggaagaggaaccagagcaagacagatgcccccagcggcatggagctgcagagctggtaccctgtgatcaagcaggagggggaccacgtgtcccagacccacagcttcctgcaccccagctactacctgtacatgtgtgacaaggtggtggcccccaacgtgtccctgaccagcgctgtgtcccagagcaaggagctgaccaagacagaggccagcaagagcatcagccggcagagcgagaaggcccacagcagcggcaagctgcagaagacagtgtcctacccagatgtgtccctggaggagcaggagaagatggacctgaagaccagccgggagctgtgcagccggctggatgccagcatcagcaacaacagcaccagcaagaggaagtctgagagcgccacctgcaacctggtgcgggacatcaacaaggtgggcatcggcctggtggccgccgccagcagccccctgctggtgaaggatgtgatctgtgaagatgacaagggcaagatcatggaggaggtgatgaggacctacctgaagcagcaggagaagctgaacctgatcctgcagaagaagcagcagctgcagatggaggtgaagatgctgagcagcagcaagtccatgaaggagctgacagaggagcagcagaacctgcagaaggagctggagagcctgcagaatgaacatgcccagaggatggaggagttctacgtggagcagaaggacctggagaagaagctggagcagatcatgaagcagaagtgcacctgtgacagcaacctggagaaggacaaggaggccgagtatgccggccagctggccgagctgcggcagaggctggaccatgctgaggccgaccggcaggagctgcaggatgagctgcggcaggagcgggaggcccggcagaagctggagatgatgatcaaggagctgaagctgcagatcctgaagagcagcaagacagccaaggagtag

SEQ ID NO: 18418 - DNA, 1080 bp, synthetic construct
  source 1..1080: mol_type = other DNA; note = Synthetic coding sequence
atgagctaccgccgggagctggagaagtacagagacctggatgaagatgagatcctgggcgccctgacagaggaggagctgcggaccctggagaatgagctggatgagctggaccctgacaatgccctgctgcctgctggcctgcggcagaaggaccagaccaccaaggcccccaccggccccttcaagcgggaggagctgctggaccacctggagaagcaggccaaggagttcaaggaccgggaggacctggtgccctacaccggggagaagaggggcaaggtgtgggtgcccaagcagaagcccctggaccctgtgctggagagcgtgaccctggagcctgagctggaggaggccctggccaatgccagtgatgctgagctgtgtgacattgctgccatcctgggcatgcacaccctgatgagcaaccagcagtactaccaggccctgagcagcagcagcatcatgaacaaggagggcctgaacagcgtcatcaagcccacccagtacaagcctgtgcctgatgaggagcccaacagcacagatgtggaggagaccctggagcgcatcaagaacaatgaccccaagctggaggaggtgaacctgaacaacatccggaacatccccatccccaccctgaaggcctatgcagaggccctgaaggagaacagctatgtgaagaagttcagcatcgtgggcaccaggagcaatgaccctgtggcctatgccctggccgagatgctgaaggagaacaaggtgctgaagaccctgaatgtggagagcaacttcatctctggagctggcatcctgcggctggtggaggccctgccctacaacaccagcctggtggagatgaagattgacaaccagagccagcccctgggcaacaaggtggagatggagatcgtgtccatgctggagaagaatgccaccctgctgaagtttggctaccacttcacccagcagggcccccggctgcgggccagcaatgccatgatgaacaacaatgacctggtgaggaagaggcggctggccgacctgaccggccccatcatccccaagtgccgctctggagtgtag

SEQ ID NO: 18419 - DNA, 1941 bp, synthetic construct
  source 1..1941: mol_type = other DNA; note = Synthetic coding sequence
atggaggagcggggcagcccagatggagacctggcccggagcctggagcagggccctgagggccctgagacccccatccaggtggtgctgcgggtgcggcccatgtctgctgctgagctgcggcggggccagcagagcgtgctgcactgcagcggcaccaggaccctgcagggcggccctgaggtggccttccgctttggagctgtgctggatgctgcccggacccaggaggatgtgttccgggcctgtggggtgcggcggctgggggagctggccctgcggggcttcagctgcaccgtcttcaccttcggccagacaggcagcggcaagacctacaccctgactggacctccaccccagggcgagggcgtgcctgtgccccccagcctggccggcatcatgcagaggacctttgcctggctgctggacagagtgcagcacctgggcgcccctgtgaccctgcgggccagctacctggagatctacaatgagcaggtgcgggacctgctgagcctgggcagcccccggcccctgcctgtgcgctggaacaagacccggggcttctacgtggagcagctgcgggtggtggagtttggcagcctggaggccctgatggagctgctgcagacaggcctgagcagaagaagaaacagcgcccacaccctgaaccaggccagcagccgcagccacgccctgctgaccctgtacatcagccggcagacagcccagcagatgcccagcgtggaccccggggagccccctgtgggcggcaagctgtgctttgtggacctggccggcagcgagaaggtggccgccaccggcagcagaggagagctgatgctggaggccaacagcatcaacagaagcctgctggccctgggccactgcatcagcctgctgctggacccccagaggaagcagagccacatccccttccgggacagcaagctgaccaagctgctggccgacagcctgggcggccggggcgtgaccctgatggtggcctgtgtgagccccagcgcccagtgcctgcctgagaccctgagcaccctgcgctatgccagccgggcccagagggtgaccacccggccccaggcccccaagagccctgtggccaagcagccccagaggctggagacagagatgctgcagctgcaggaggagaacagaaggctgcagttccagctggaccagatggactgcaaggccagcggcctgagcggggcccgggtggcctgggcccagaggaacctgtatggcatgctgcaggagttcatgctggagaatgaaaggctgaggaaggagaagagccagctgcagaacagccgggacctggcccagaatgagcagaggatcctggcccagcaggtgcacgccctggagcggcggctgctgagcgcctgctaccaccaccagcagggccctggcctgaccccaccctgcccctgcctgatggccccagccccaccctgccacgccctgccccccctgtacagctgcccctgctgccacatctgccccctgtgccgggtgcccctggcccactgggcctgcctgcccggggagcaccacctgccccaggtgctggaccctgaggccagcggcggccggccccccagcgcccggcccccaccctgggccccaccctgcagccctggcagcgccaagtgcccccgggagaggagccacagcgactggacccagaccagggtgctggccgagatgctgacagaggaggaggtggtgcccagcgccccacccctgcctgtgcggccccccaagaccagccctggcctgcggggcggggccggcgtgcccaacctggcccagaggctggaggccctgcgggaccagatcggcagcagcctgcggcggggccgcagccagcccccctgcagcgagggcgcccggagccctggccaggtgctgcccccccactag

SEQ ID NO: 18420 - DNA, 462 bp, synthetic construct
  source 1..462: mol_type = other DNA; note = Synthetic coding sequence
atggccaggaacaccctgagcagccgcttcagaagagtggacattgatgaatttgatgagaacaagtttgtggatgagcaggaggaggccgctgctgctgctgctgagcccggccctgaccccagcgaggtggatggcctgctgcggcagggcgacatgctgcgggccttccacgccgccctgaggaacagccctgtgaacaccaagaaccaggccgtgaaggagcgggcccagggcgtggtgctgaaggtgctgaccaacttcaagagcagcgagattgagcaggccgtgcagagcctggacagaaatggagtggacctgctgatgaagtacatctacaagggctttgagaagcccacagagaacagcagcgctgtgctgctgcagtggcatgagaaggccctggccgtgggcggcctgggcagcatcatccgggtgctgacagccaggaagacagtgtag

SEQ ID NO: 18421 - DNA, 3318 bp, synthetic construct
  source 1..3318: mol_type = other DNA; note = Synthetic coding sequence
atggccgccacagccagcgctggggtgcctgccaccgtgtctgagaagcaggagttctaccagctgctgaagaacctgatcaaccccagctgcatggtgcggcggcaggccgaggagatctatgagaacatccctggcctgtgcaagaccaccttcctgctggatgctgtgaggaacagaagagctggctatgaggtgcggcagatggctgctgccctgctgcggcggctgctgagcagcggctttgaggaggtgtaccccaacctgcctgcagatgtgcagagagatgtgaagattgagctgatcctggccgtgaagctggagacccacgcctccatgaggaagaagctgtgtgacatctttgctgtgctggccaggaacctgattgatgaagatggcaccaaccactggccagagggcctgaagttcctgattgacagcatctacagcaagaatgtggtgctgtgggaggtggccctgcacgtgttctggcacttccctggcatcttcggcacccaggagagacatgacctggacatcatcaagaggctgctggaccagtgcatccaggaccaggagcacccagccatccgcaccctgagcgcccgggctgctgctgcctttgtgctggccaatgaaaacaacatcgccctcttcaaggactttgctgacctgctgcccggcatcctgcaggccgtgaatgacagctgctaccaggatgatgattctgtgctggagagcctggtggagattgctgacacagtgcccaagtacctgggcccctacctggaggacaccctgcagctgagcctgaagctgtgtggggacagccggctgagcaacctgcagaggcagctggccctggaggtgattgtgaccctgtctgaaacagccacccccatgctgaagaagcacaccaacatcatcgcccaggccgtgccccacatcctggccatgatggtggacctgcaggatgatgaggactgggtgaatgctgatgagatggaggaggatgactttgacagcaatgctgtggccgctgagagcgccctggaccggctggcctgtggcctgggcggcaaggtggtgctgcccatgaccaaggagcacatcatgcagatgctgcagagcccagactggaagtacagacatgctggcctgatggccctgagcgccatcggggagggctgccaccagcagatggagagcatcctggatgagaccgtgaacagcgtgctgctcttcctgcaggacccccacccccgggtgcgggccgccgcctgcaccaccctgggccagatggccacagactttgcccccaacttccagaagaagttccatgaaacagtgattgctgccctgctgcggaccatggagaaccagggcaaccagagggtgcagagccacgccgccagcgccctgatcatcttcatcgaggactgccccaagagcctgctggtgctgtatgtggacagcatggtgaagaacctgcacagcgtgctggtgatcaagctgcaggagctgatcagaaatggcaccaagctggccctggagcagctggtgaccaccatcgcctctgtggccgacaccatcgaggagaagtttgtgccctactatgacatcttcatgcccagcctgaagcacatcgtggagctggccgtgcagaaggagctgaagctgctgcggggcaagaccatcgagtgcatcagccacatcggcctggccgtgggcaaggagaagttcatgcaggatgccagcaatgtgatgcagctgctgctgaagacccagagcgacctgaacaacatggaggatgatgacccccagaccagctacatggtgtctgcctgggccaggatgtgcaagatcctgggcaaggacttccagcagtacctgcccctggtgattgagcccctcatcaagacagccagcgccaagccagatgtggccctgctggacacccaggatgtggagaacatgtctgatgatgatggctggcagtttgtgaacctgggggaccagcagagctttggcatcaagaccagcggcctggaggccaaggccacagcctgccagatgctggtgtactatgccaaggagctgcgggagggctttgtggagtacacagagcaggtggtgaagctgatggtgcccctgctgaagttctacttccatgacaacgtgcgggtggccgctgctgagagcatgcccttcctgctggagtgtgcccgcatccggggccctgagtacctggcccagatgtggcagttcatctgtgaccccctcatcaaggccatcggcacagagccagacacagatgtgctgtctgagatcatgaacagctttgccaagagcattgaggtgatgggagatggctgcctgaatgatgagcacctggaggagctgggcggcatcctgaaggccaagctggagggccacttcaagaaccaggagctgcggcaggtgaagaggcaggaggagaactatgaccagcaggtggagatgagcctgcaggatgaagatgaatgtgatgtgtacatcctgaccaaggtgtctgacatcctgcacagcctcttcagcacctacaaggagaagatcctgccctggtttgagcagctgctgcccctcatcgtgaacctgatctgcagcagccggccctggccagaccggcagtggggcctgtgcatctttgatgacatcatcgagcactgcagccccaccagcttcaagtatgtggagtacttccgctggcccatgctgctgaacatgagggacaacaaccctgaggtgcggcaggccgccgcctacggcctgggcgtgatggcccagtttggaggagatgactaccgcagcctgtgcagcgaggccgtgcccctgctggtgaaggtgatcaagtgtgccaacagcaagaccaagaagaatgtgattgccacagagaactgcatcagcgccatcggcaagatcctgaagttcaagcccaactgtgtgaatgtggatgaggtgctgccccactggctgtcctggctgcccctgcacgaggacaaggaggaggccatccagaccctgtccttcctgtgtgacctgattgagagcaaccaccctgtggtgattggccccaacaacagcaacctgcccaagatcatcagcatcatcgccgagggcaagatcaatgagaccatcaactatgaggacccctgtgccaagaggctggccaacgtggtgcggcaggtgcagaccagcgaggacctgtggctggagtgtgtgtcccagctggatgatgagcagcaggaggccctgcaggagctgctgaactttgcctag

SEQ ID NO: 18422 - DNA, 1914 bp, synthetic construct
  source 1..1914: mol_type = other DNA; note = Synthetic coding sequence
atggaggtgacaggcttcggcgtgaccaggcctgggaaggtgccccaggccaggatgagcggcctggtgctgggccagagagatgagcctgctggccaccggctgagccaggaggagatcctgggcagcacccggctggtgtcccagggcctggaggccctgcggtctgagcaccaggccgtgctgcagagcctgagccagaccatcgagtgcctgcagcagggcggccacgaggagggcctggtgcatgagaaggcccggcagctgcggcgctccatggagaacatcgagctgggcctgtctgaggcccaggtgatgctggccctggccagccacctgagcacagtggagagcgagaagcagaagctgcgggcccaggtgcggcggctgtgccaggagaaccagtggctgagagatgagctggccggcacccagcagaggctgcagaggtctgagcaggccgtggcccagctggaggaggagaagaagcacctggagttcctgggccagctgcggcagtatgatgaagatggccacaccagcgaggagaaggagggagatgccaccaaggacagcctggatgacctcttccccaatgaggaggaggaggaccccagcaatggcctgagccggggccagggcgccacagctgcccagcagggcggctatgagatcccagcccggctgcggaccctgcacaacctggtgatccagtatgctgcccagggccgctatgaggtggccgtgcccctgtgcaagcaggccctggaggacctggagaggaccagcggccggggccacccagatgtggccaccatgctgaacatcctggccctggtgtacagagaccagaacaagtacaaggaggccgcccacctgctgaatgatgccctgagcatccgggagagcaccctgggccctgaccaccctgctgtggccgccaccctgaacaacctggccgtgctgtatggcaagaggggcaagtacaaggaggccgagcccctgtgccagagggccctggagatccgggagaaggtgctgggcaccaaccacccagatgtggccaagcagctgaacaacctggccctgctgtgccagaaccagggcaagtatgaagctgtggagcgctactaccagagggccctggccatctatgagggccagctgggccctgacaaccccaacgtggcccggaccaagaacaacctggccagctgctacctgaagcagggcaagtatgcagaggccgagaccctgtacaaggagatcctgacccgggcccacgtgcaggagtttggatctgtggatgatgaccacaagcccatctggatgcacgccgaggagcgggaggagatgagcaagagccgccaccacgagggcggcaccccctatgcagaatatggaggctggtacaaggcctgcaaggtgagcagccccaccgtgaacaccaccctgaggaacctgggcgccctgtaccgccggcagggcaagctggaggccgctgagaccctggaggagtgtgccctgcggagccggcggcagggcacagaccccatcagccagaccaaggtggccgagctgctgggggagagtgatggccgccgcaccagccaggagggccctggggacagcgtgaagtttgaaggaggagaagatgcctctgtggccgtggagtggagcggagatggcagcggcaccctgcagaggagcggcagcctgggcaagatcagagatgtgctgcggcgcagcagcgagctgctggtgaggaagctgcagggcacagagccccggcccagcagcagcaacatgaagagagctgccagcctgaactacctgaaccagcccagcgctgcccccctgcaggtgtcccggggcctgagcgccagcaccatggacctgagcagcagcagctag

SEQ ID NO: 18423 - DNA, 3966 bp, synthetic construct
  source 1..3966: mol_type = other DNA; note = Synthetic coding sequence
atgcagtgcctggccgccgccctgaaggatgagaccaacatgtctgggggcggggagcaggccgacatcctgcctgccaactacgtggtgaaggaccgctggaaggtgctgaagaagattggaggcggcggctttggagagatctatgaggccatggacctgctgacccgggagaatgtggccctgaaggtggagagcgcccagcagcccaagcaggtgctgaagatggaggtggccgtgctgaagaagctgcagggcaaggaccacgtgtgccgcttcatcggctgcggcagaaatgagaagttcaactacgtggtgatgcagctgcagggcaggaacctggccgacctgcggcgcagccagccccggggcaccttcaccctgagcaccaccctgcggctgggcaagcagatcctggagagcattgaggccatccacagcgtgggcttcctgcaccgggacatcaagcccagcaactttgccatgggccgcctgcccagcacctacaggaagtgctacatgctggactttggcctggcccggcagtacaccaacaccactggagatgtgcggcccccaagaaatgtggccggcttccggggcaccgtgcgctatgcctctgtgaatgcccacaagaaccgggagatgggcagacatgatgacctgtggagcctcttctacatgctggtggagtttgctgtgggccagctgccctggaggaagatcaaggacaaggagcaggtgggcatgatcaaggagaagtatgagcacaggatgctgctgaagcacatgcccagcgagttccacctgttcctggaccacatcgccagcctggactacttcaccaagccagactaccagctgatcatgtctgtgtttgagaacagcatgaaggagcggggcattgctgaaaatgaggcctttgactgggagaaggccggcacagatgccctgctgagcaccagcaccagcaccccaccccagcagaacacccggcagacagctgccatgtttggagtggtgaatgtgacccctgtgcctggggacctgctgagagaaaatacagaagatgtgctgcagggcgagcacctgagtgaccaggagaatgccccacccatcctgcccggccggcccagcgagggcctgggccccagcccccacctggtgccccaccctgggggccctgaggccgaggtgtgggaggagacagatgtgaacagaaacaagctgcgcatcaacatcggcaagagcccctgtgtggaggaggagcagagccggggcatgggcgtgcccagcagccctgtgcgggcccccccagacagccccaccacccctgtgcgcagcctgcgctaccgccgggtgaacagccctgagagcgagcggctgagcacagcagatggccgggtggagctgcctgagcggcgcagcaggatggacctgcccggcagccccagccggcaggcctgcagcagccagcctgcccagatgctgtctgtggacaccggccacgccgaccggcaggccagcggccgcatggatgtgtctgcctctgtggagcaggaggccctgagcaatgccttccgctctgtgcccctggccgaggaggaggactttgacagcaaggagtgggtgatcatcgacaaggagacagagctgaaggacttccccccaggagctgagcccagcaccagcggcaccacagatgaggagcctgaggagctgcggcccctgcctgaggagggggaggagcggcggcggctgggcgctgagcccaccgtgcggccccggggccgctccatgcaggccctggccgaggaggacctgcagcacctgcccccccagcccctgcccccccagctgagccagggagatggccgctctgagaccagccagccccccaccccaggcagccccagccacagccccctgcacagcggcccccggcccaggagaagagaaagtgaccccaccggcccccagaggcaggtgttttctgtggcccccccatttgaggtgaatggcctgcccagggctgtgcccctgagcctgccctaccaggacttcaagagggacctgagtgactaccgggagcgggcccggctgctgaacagagtgcggcgggtgggcttcagccacatgctgctgaccaccccccaggtgcccctggcccctgtgcagccccaggccaacgggaaggaggaggaggaggaggaggaggaggatgaggaggaggaggaggaggatgaggaggaggaggaggaggaggaggaggaggaggaggaggaggaggaggaggaggaggaggaggaggaggccgctgctgctgtggccctgggggaggtgctgggccccaggagcggcagcagcagcgagggcagcgagaggagcacagacaggagccaggagggcgcccccagcaccctgctggctgatgaccagaaggagagccggggccgggcctccatggctgatggagacctggagcctgaggagggcagcaagaccctggtgctggtgtcccctggggacatgaagaagagccctgtgacagctgagctggccccagaccctgacctgggcaccctggccgccctgaccccccagcacgagcggccccagcccaccggcagccagctggatgtgtctgagcccggcaccctgagctctgtgctgaagtctgagcccaagcccccaggccctggggccggcctgggcgccggcaccgtgaccactggagtgggcggcgtggccgtgaccagcagccccttcaccaaggtggagaggacctttgtgcacatcgccgagaagacccacctgaatgtgatgagcagcggcggccaggccctgcggtctgaggagttctctgctggaggagagctgggcctggagctggccagtgatggaggagctgtggaggagggcgcccgggcccccctggagaatggcctggccctgagcggcctgaatggagctgagattgagggcagcgccctgagcggggccccccgggagaccccatctgagatggccaccaacagcctgcccaacggccctgccctggctgatggccctgcccctgtgagccccctggagcccagccctgagaaggtggccaccatcagccccaggagacatgccatgcctggcagccggcccaggagccgcatccctgtgctgctgtctgaagaagatactggaagtgagcccagcggcagcctgagcgccaaggagcgctggagcaagagggcccggccccagcaggacctggcccggctggtgatggagaagaggcagggccgcctgctgctgcggctggccagcggggccagcagcagcagcagcgaggagcagaggcgggccagcgagaccctgtctggaactggaagtgaggaggacaccccagccagcgagcctgctgctgccctgcccaggaagagcggccgggccgccgccaccaggagccgcatcccccggcccatcggcctgaggatgcccatgcctgtggccgcccagcagcctgccagccgcagccacggggccgccccagccctggacacagccatcaccagccggctgcagctgcagaccccacctggcagcgccacagctgctgacctgcggcccaagcagcccccaggccggggcctgggccctggccgggcccaggccggggcccggcccccagcccccaggagcccccggctgcctgccagcaccagcgctgccagaaatgccagcgccagccccaggagccagagcctgagccggcgggagagccccagccccagccaccaggcccggcctggggtgcccccaccccggggcgtgcccccagcccgggcccagccagatggcacccccagccctgggggcagcaagaagggcccccggggcaagctgcaggcccagagggccaccaccaagggccgggccggcggcgctgagggccgggccggggccaggtag

SEQ ID NO: 18424 - DNA, 1818 bp, synthetic construct
  source 1..1818: mol_type = other DNA; note = Synthetic coding sequence
atgagccagctgagcagcaccctgaagcgctacacagagagcgcccgctacacagatgcccactacgccaagagcggctatggagcctacacccccagcagctatggagccaacctggccgccagcctgctggagaaggagaagctgggcttcaagcctgtgcccaccagcagcttcctgacccggcccaggacctacggccccagcagcctgctggactatgaccggggccggcccctgctgcggccagacatcaccggcggcggcaagagagctgagagccagacccggggcacagagcggcccctgggcagcggcctgagcggcggcagcggcttcccctatggagtgaccaacaactgcctgagctacctgcccatcaatgcctatgaccagggcgtgaccctgacccagaagctggacagccagagcgacctggcccgggacttcagcagcctgcggaccagtgacagctacagaattgaccccaggaacctgggccgcagccccatgctggcccggaccaggaaggagctgtgcaccctgcagggcctgtaccagacagccagctgcccagagtacctggtggactacctggagaactacggcaggaaaggaagtgccagccaggtgcccagccaggccccacccagccgggtgcctgagatcatcagccccacctaccggcccatcggccgctacaccctgtgggagaccgggaagggccaggcccctggccccagccgcagcagcagccctggaagagatggcatgaacagcaagagcgcccagggcctggccggcctgaggaacctgggcaacacctgcttcatgaacagcatcctgcagtgcctgagcaacacccgggagctgcgggactactgcctgcagaggctgtacatgagggacctgcaccacggcagcaatgcccacacagccctggtggaggagtttgccaagctgatccagaccatctggaccagcagccccaatgatgtggtgagccccagcgagttcaagacccagatccagagatatgcccccaggtttgtgggctacaaccagcaggatgcccaggagttcctgcgcttcctgctggatggcctgcacaatgaggtgaacagagtgaccctgcggcccaagagcaaccctgagaacctggaccacctgcctgatgatgagaagggccggcagatgtggaggaagtacctggagcgggaggacagcagaattggagacctgtttgtgggccagctgaagagcagcctgacctgcacagactgtggctactgcagcacagtgtttgaccccttctgggacctgagcctgcccatcgccaagaggggctacccagaggtgaccctgatggactgcatgaggctcttcaccaaggaggatgtgctggatggagatgagaagcccacctgctgccgctgccggggcaggaagcgctgcatcaagaagttcagcatccagcgcttccccaagatcctggtgctgcacctgaagcgcttcagcgagagccgcatccgcaccagcaagctgaccacctttgtgaacttccccctgcgggacctggacctgcgggagtttgccagcgagaacaccaaccacgctgtgtacaacctgtatgctgtgagcaaccacagcggcaccaccatgggcggccactacacagcctactgccgcagccctggcactggagagtggcacaccttcaatgacagctctgtgacccccatgagcagcagccaggtgaggaccagtgatgcctacctgctcttctatgagctggccagcccccccagcaggatgtag

SEQ ID NO: 18425 - DNA, 1353 bp, synthetic construct
  source 1..1353: mol_type = other DNA; note = Synthetic coding sequence
atggtgcccctggtggccgtggtgtctggcccccgggcccagctgtttgcctgcctgctgcggctgggcacccagcaggtgggccccctgcagctgcacactggagccagccatgctgccaggaaccactatgaggtgctggtgctgggcggcggcagcggcggcatcaccatggccgccaggatgaagaggaaggtgggcgcagaaaatgtggccatcgtggagcccagcgagcggcacttctaccagcccatctggaccctggtgggcgctggggccaagcagctgagcagcagcggccggcccacagccagcgtcatccccagcggcgtggagtggatcaaggcccgggtgacagagctgaacccagacaagaactgcatccacacagatgatgatgagaagatctcctaccgctacctgatcatcgccctgggcatccagctggactatgagaagatcaagggcctgcctgagggctttgcccaccccaagattggcagcaactacagcgtgaagacagtggagaagacctggaaggccctgcaggacttcaaggagggcaatgccatcttcaccttccccaacacccctgtgaagtgtgccggggccccccagaagatcatgtacctgtctgaggcctacttcaggaagacaggcaagaggagcaaggccaacatcatcttcaacaccagcctgggcgccatctttggagtgaagaagtatgcagatgccctgcaggagatcatccaggagaggaacctgactgtgaactacaagaagaacctgattgaggtgcgggctgacaagcaggaggccgtgtttgagaacctggacaagccaggagagacccaggtgatctcctatgagatgctgcacgtgaccccacccatgagccccccagatgtgctgaagaccagccctgtggctgatgctgctggctgggtggatgtggacaaggagaccctgcagcaccggcgctaccccaacgtgtttggcatcggggactgcaccaacctgcccaccagcaagacagctgctgctgtggccgcccagagcggcatcctggacaggaccatcagcgtcatcatgaagaaccagacccccaccaagaagtatgatggctacaccagctgccccctggtgacaggctacaacagagtcatcctggccgagtttgactacaaggccgagcccctggagaccttcccctttgaccagagcaaggagcggctgtccatgtacctgatgaaggctgacctgatgcccttcctgtactggaacatgatgctgcggggctactggggcggccctgccttcctgaggaagctgttccacctgggcatgtcctag

SEQ ID NO: 18426 - DNA, 5244 bp, synthetic construct
  source 1..5244: mol_type = other DNA; note = Synthetic coding sequence
atggatggagtgagcagcgaggccaatgaagaaaatgacaacatcgagaggcctgtgagaagaagacacagcagcatcctgaagcccccaagaagccccctgcaggacctgcggggcggcaatgaaagagtgcaggagagcaatgccctgaggaacaagaagaacagcagaagagtgtcctttgctgacaccatcaaggtgttccagacagagagccacatgaagatcgtgaggaagtctgagatggaggagacagaaacaggagagaacctgctgctgatccagaacaagaagctggaggacaactactgtgagatcaccggcatgaacaccctgctgagcgcccccatccacacccagatgcagcagaaggagttcagcatcatcgagcacacccgggagaggaagcacgccaatgaccagaccgtcatcttcagtgatgagaaccagatggacctgaccagcagccacacagtgatgatcaccaagggcctgctggacaaccccatcagcgagaagagcaccaagattgacaccaccagcttcctggccaacctgaagctgcacacagaggacagcaggatgaagaaggaggtgaacttctctgtggaccagaacaccagcagcgagaacaagattgacttcaatgacttcatcaagaggctgaagacaggcaagtgcagcgccttcccagatgtgcctgacaaggaaaattttgagatccccatctacagcaaggagcccaacagcgccagcagcacccaccagatgcacgtgtccctgaaggaggatgagaacaacagcaacatcaccaggctcttccgggagaaggatgatggcatgaacttcacccagtgccacacagccaacatccagaccctcatccccaccagcagcgagaccaacagccgggagagcaaaggaaatgacatcaccatctatggaaatgacttcatggacctgaccttcaaccacaccctgcagatcctgcctgccactggaaacttcagcgagattgagaaccagacccagaatgccatggatgtgaccaccggctacggcaccaaggccagcggcaacaagacagtgttcaagagcaagcagaacacagccttccaggacctgagcatcaacagcgctgacaagatccacatcaccaggagccacatcatgggcgctgagacccacatcgtgtcccagacctgcaaccaggatgcccgcatcctggccatgaccccagagagcatctacagcaaccccagcatccagggctgcaagacagtgttctacagcagctgcaatgatgccatggagatgaccaagtgcctgagcaacatgagggaggagaagaacctgctgaagcatgacagcaactatgccaagatgtactgcaacccagatgccatgagcagcctgacagagaagaccatctacagcggggaggagaacatggacatcaccaagagccacacagtggccatcgacaaccagatcttcaagcaggaccagagcaatgtgcagattgctgctgcccccaccccagagaaggagatgatgctgcagaacctgatgaccaccagtgaagatggcaagatgaatgtgaactgcaacagcgtgccccacgtgtccaaggagcgcatccagcagagcctgagcaaccccctgagcatcagcctgacagacaggaagacagagctgctgagcggggagaacatggacctgacagagagccacaccagcaacctgggcagccaggtgcccctggccgcctacaacctggcccctgagagcaccagcgagagccacagccagagcaagagcagcagtgatgaatgtgaggagatcaccaagagcagaaatgagcccttccagaggagtgacatcatcgccaagaacagcctgacagacacctggaacaaggacaaggactgggtgctgaagatcctgccctacctggacaaggacagcccccagagcgctgactgcaaccaggagatcgccaccagccacaacatcgtgtactgcggcggcgtgctggacaagcagatcaccaacagaaacacagtgtcctgggagcagagcctcttcagcaccaccaagcccctcttcagcagcggccagttctccatgaagaaccacgacacagccatcagcagccacacagtgaagtctgtgctgggccagaacagcaagctggccgagcccctgaggaagagcctgagcaaccccaccccagactactgccacgacaagatgatcatctgcagcgaggaggagcagaacatggacctgaccaagagccacacagtggtgattggcttcggccccagcgagctgcaggagctgggcaagaccaacctggagcacaccaccggccagctgaccaccatgaaccggcagattgctgtgaaggtggagaagtgtgggaagagccccatcgagaagagcggcgtgctgaagagcaactgcatcatggatgtgctggaggatgagagcgtgcagaagcccaagttccccaaggagaagcagaatgtgaagatctggggcaggaagtctgtgggcggccccaagattgacaagaccatcgtgttttctgaagatgacaagaatgacatggacatcaccaagagctacaccatcgagatcaaccaccggcccctgctggagaagagggactgccacctggtgcccctggccggcaccagcgagaccatcctgtacacctgccggcaggatgacatggagatcaccaggagccacaccacagccctggagtgcaagacagtgtccccagatgagatcaccacccggcccatggacaagacagtggtgtttgtggacaaccacgtggagctggagatgacagagagccacacagtgttcatcgactaccaggagaaggagaggacagaccggcccaactttgagctgagccagaggaagagcctgggcacccccaccgtcatctgcacccccacagaggagagcgtcttcttccctggaaatggagagagtgaccggctggtggccaatgacagccagctgacccccctggaggagtggagcaacaacagaggccctgtggaggtggccgacaacatggagctgagcaagagcgccacctgcaagaacatcaaggatgtgcagagccctggcttcctgaatgagcccctgagcagcaagagccagaggaggaagagcctgaagctgaagaatgacaagaccatcgtgttttctgagaaccacaagaatgacatggacatcacccagagctgcatggtggagattgacaatgaaagtgccctggaggacaaggaggacttccacctggccggggccagcaagaccatcctgtacagctgtggccaggatgacatggagatcaccaggagccacaccacagccctggagtgcaagaccctgctgcccaatgagatcgccatccggcccatggacaagacagtgctcttcacagacaactacagcgacctggaggtgacagacagccacacagtgttcatcgactgccaggccacagagaagatcctggaggagaaccccaagtttggaattggcaagggcaagaacctgggcgtgtccttccccaaggacaacagctgtgtgcaggagattgctgagaagcaggccctggccgtgggcaacaagatcgtgctgcacacagagcagaagcagcagctgtttgctgccaccaacagaaccaccaatgagatcatcaagttccacagcgctgccatggatgagaaggtgattggcaaggtggtggaccaggcctgcaccctggagaaggcccaggtggagagctgccagctgaacaacagagacagaagaaatgtggacttcaccagcagccacgccacagctgtgtgtggcagcagtgacaactacagctgcctgcccaacgtcatcagctgcacagacaacctggagggcagcgccatgctgctgtgtgacaaggatgaggagaaggccaactactgccctgtgcagaatgacctggcctatgccaatgactttgccagcgagtactacctggagagcgagggccagcccctgagcgccccctgccccctgctggagaaggaggaggtgatccagaccagcaccaagggccagctggactgtgtgatcaccctgcacaaggaccaggacctgatcaaggaccccaggaacctgctggccaaccagaccctggtgtacagccaggacctgggggagatgaccaagctgaacagcaagagggtgtccttcaagctgcccaaggaccagatgaaggtgtatgtggatgacatctacgtgatcccccagccccacttcagcacagaccagccccccctgcccaagaagggccagagcagcatcaacaaggaggaggtgatcctgagcaaggccggcaacaagagcctgaacatcatcgagaacagcagcgcccccatctgtgagaacaagcccaagatcctgaacagcgaggagtggtttgctgctgcctgcaagaaggagctgaaggagaacatccagaccaccaactacaacacagccctggacttccacagcaacagtgatgtgaccaagcaggtgatccagacccacgtgaatgctggggaggccccagaccctgtgatcaccagcaatgtgccctgcttccacagcatcaagcccaacctgaacaacctgaatggcaagacaggagagttcctggccttccagacagtgcacctgccccccctgcctgagcagctgctggagctgggcaacaaggcccacaatgacatgcacatcgtgcaggccacagagatccacaacatcaacatcatcagcagcaatgccaaggacagcagagatgaggagaacaagaagagccacaacggggctgagaccaccagcctgccccccaagacagtgttcaaggacaaggtgcggcgctgcagcctgggcatcttcctgccccggctgcccaacaagaggaactgcagcgtgactggaattgatgacctggagcagatcccagctgacaccacagacatcaaccacctggagacccagcctgtgagcagcaaggacagcggcatcggctctgtggccggcaagctgaacctgagccccagccagtacatcaatgaggagaacctgcctgtgtacccagatgagatcaacagcagtgacagcatcaacattgaaacagagcccaagaagaatgtgggcaccaggagaagacgctacagctag

SEQ ID NO: 18427 - DNA, 2061 bp, synthetic construct
  source 1..2061: mol_type = other DNA; note = Synthetic coding sequence
atgatccctgggaagtacagatctgtgtctggccgggccgccaacaacgtgaactgtggcctgcacctggtgatccagaccagcagcctgcctgagaagaacaaggtggagttcaagctgaacaaggacaccagcagcttccctggccgcctgctgcagcacgacctggagaggaactacagcagccggcagggcgaccacatcaacctggtgagcagcagcctgagcagcttccccatcctgcagaggagcagcgaggagaagatcctgtacagcgaccggctgagcctggagcggcagaagctgactgtgtgccccatcatcaatggagaggaccacctgcggctgctgaacttccagcacaacttcatcacccgcatccagaacatcagcaacctgcagaagctgatcagcctggacctgtatgacaaccagatcgaggagatcagcggcctgagcaccctgcgctgcctgcgggtgctgctgctgggcaagaaccgcatcaagaagatcagcaacctggagaacctgaagagcctggatgtgctggacctgcacggcaaccagatcaccaagattgagaacatcaaccacctgtgtgagctgcgggtgctgaacctggccaggaacttcctgagccacgtggacaacctgaatggcctggacagcctgacagagctgaacctgcggcacaaccagatcacctttgtgagagatgtggacaacctgccctgcctgcagcacctgttcctgtccttcaacaacatcagcagctttgattctgtgtcctgcctggccgacagcagcagcctgagtgacatcacctttgatggcaaccccatcgcccaggagagctggtacaagcacacagtgctgcagaacatgatgcagctgcggcagctggacatgaagaggatcacagaggaggagaggaggatggcctctgtgctggccaagaaggaggaggagaagaagcgggagagccacaagcagagcctgctgaaggagaagaagaggctgaccatcaacaacgtggcccggcagtgggacctgcagcagcagagggtggccaacatcgccaccaatgaagacaggaaggacagcgacagcccccaggacccctgccagattgatggcagcaccctgagcgccttccctgaggagaccggccccctggacagcggcctgaacaatgccctgcagggcctgagcgtcatcgacacctacctggtggaggtggatggagacaccctgagcctgtatggcagcggggccctggagagcctggacaggaactggagcgtgcagacagctggcatgatcaccaccgtgtccttcaccttcattgaatttgatgagatcgtgcaggtgctgcccaagctgaagatcaagttccccaacagcctgcacctgaagttcaaggagaccaacctggtgatgctgcagcagttcaatgccctggcccagctgcggagaattgaccagctgaccatcgacccccagggcaaccctgtggtgaacttcaccctgtggaagtactacgtgctcttccggctgagccacttctccatgcagaagatcaatggaacagaggtgacccagaatgacatgatcatggccgagcggctgtttggcatcctggcccacgtggccagcagcgagctgccccagtaccgcctcatcagcatcctgggagatgccaggaagaagcagttccgctacctgctggagagcaagggcaagaagccaggcatcatcaatgaagaaaataatgacagcaagaggctggtgggggagaacaccaacagagccaccctgaactacaccacccgggacttctacaatgagaagctggaggagatcaaggagaagaagaagttctgcaagacctacatcgaggacctggtgaaggaggccacagagatcaacatgaagaatgaggccctgcagaagctgtggccccagatgttcatcgagctggtgagagatgctgtgattgagatccggaacaagaacagctacatgaagctgtgcctgcagcagatcacagaccagaagtag

SEQ ID NO: 18428 - DNA, 255 bp, synthetic construct
  source 1..255: mol_type = other DNA; note = Synthetic coding sequence
atgccctacctgctgatcagcacccagatccgcatggaggtgggccccaccatggtgggagatgagcagagcgaccctgagctgatgcagcacctgggcgccagcaagagaagagccctgggcaacaacttctatgagtactacgtggatgaccccccaagaattgtgctggacaagctggagcggcggggcttccgggtgctgtccatgactggagtgggccagaccctggtgtggtgcctgcacaaggagtag

SEQ ID NO: 18429 - DNA, 2664 bp, synthetic construct
  source 1..2664: mol_type = other DNA; note = Synthetic coding sequence
atgcccagcctgccccaggagggcgtcatccagggccccagccccctggacctgaacacagagctgccctaccagagcaccatgaagaggaaggtgaggaagaagaagaagaagggcaccatcacagccaacgtggccggcaccaagtttgagatcgtgcggctggtgattgatgagatgggcttcatgaagaccccagatgaagatgagaccagcaacctgatctggtgtgacagcgctgtgcagcaggagaagatcagcgagctgcagaactaccagaggatcaaccacttccctggcatgggagagatctgcaggaaggacttcctggccaggaacatgaccaagatgatcaagagccggcccctggactacacctttgtgcccaggacctggatcttccctgctgagtacacccagttccagaactacgtgaaggagctgaagaagaagaggaagcagaagaccttcatcgtgaagccagccaatggagccatgggccacggcatcagcctcatcagaaatggagacaagctgcccagccaggaccacctgattgtgcaggagtacatcgagaagcccttcctgatggagggctacaagtttgacctgcgcatctacatcctggtgaccagctgtgaccccctgaagatcttcctgtaccatgatggcctggtgaggatgggcacagagaagtacatccccccaaatgaaagcaacctgacccagctgtacatgcacctgaccaactacagcgtgaacaagcacaatgagcactttgaaagagatgaaacagagaacaagggcagcaagaggagcatcaagtggttcacagagttcctgcaggccaaccagcatgatgtggccaagttctggagcgacatcagcgagctggtggtgaagaccctcatcgtggccgagccccacgtgctgcacgcctacaggatgtgcaggcctggccagcccccaggcagcgagagcgtgtgctttgaggtgctgggctttgacatcctgctggacaggaagctgaagccctggctgctggagatcaacagagcccccagctttggaacagaccagaagattgattatgatgtgaagaggggcgtgctgctgaatgccctgaagctgctgaacatccgcaccagtgacaagagaagaaacctggccaagcagaaggccgaggcccagaggcggctgtatggccagaacagcatcaagaggctgctgcccggcagcagtgactgggagcagcagaggcaccagctggagaggaggaaggaggagctgaaggagcggctggcccaggtgaggaagcagatcagccgggaggagcatgaaaatagacacatgggcaactaccgccgcatctaccccccagaggacaaggccctgctggagaagtatgagaacctgctggccgtggccttccagaccttcctgagcggccgggccgccagcttccagcgggagctgaacaaccccctgaagaggatgaaggaggaggacatcctggacctgctggagcagtgtgaaattgatgatgagaagctgatgggcaagaccaccaagacccggggccccaagcccctgtgcagcatgcctgagagcacagagatcatgaagaggcccaagtactgcagcagtgacagcagctatgacagcagcagcagcagcagcgagagtgatgaaaatgagaaggaggagtaccagaacaagaagcgggagaagcaggtgacctacaacctgaagcccagcaaccactacaagctgatccagcagcccagcagcatcagaagatctgtgtcctgccccaggagcatcagcgcccagagccccagcagcggggacacccggcccttcagcgcccagcagatgatctctgtgtcccggcccaccagcgccagccgcagccacagcctgaacagagccagcagctacatgaggcacctgccccacagcaatgatgcctgcagcaccaacagccaggtgtctgagagcctgcggcagctgaagaccaaggagcaggaggatgacctgaccagccagaccctgtttgtgctgaaggacatgaagatccgcttccctgggaagagtgatgctgagagcgagctgctgattgaggacatcatcgacaactggaagtaccacaagaccaaggtggccagctactggctgatcaagctggacagcgtgaagcagaggaaggtgctggacatcgtgaagaccagcatcagaacagtgctgccccgcatctggaaggtgcctgatgtggaggaggtgaacctgtaccgcatcttcaacagagtcttcaaccggctgctgtggagccggggccagggcctgtggaactgcttctgtgacagcggcagctcctgggagagcatcttcaacaagagccctgaggtggtgacccccctgcagctgcagtgctgccagaggctggtggagctgtgcaagcagtgcctgctggtggtgtacaagtatgccacagacaagaggggcagcctgagcggcatcggccctgactggggcaacagccgctacctgctgcccggcagcacccagttcttcctgcggacccccacctacaacctgaagtacaacagccctggcatgaccaggagcaatgtgctcttcaccagccgctatggccacctgtag

SEQ ID NO: 18430 - DNA, 1140 bp, synthetic construct
  source 1..1140: mol_type = other DNA; note = Synthetic coding sequence
atggccggcccccgggtggaggtggatggcagcatcatggagggcggcggccagatcctgcgggtgtccacagccctgagctgcctgctgggcctgcccctgcgggtgcagaagatccgggccggccgcagcaccccaggcctgagcagcggcggctggaagagcaagatcaaggtgctgacccggccccagcacctgagcggcctggagatgatccgggacctgtgtgatggccagctggagggcgctgagatcggcagcacagagatcaccttcaccccagagaagatcaagggcggcatccacacagctgacaccaagacagctggctctgtgtgcctgctgatgcaggtgtccatgccctgtgtgctgtttgctgccagccccagcgagctgcacctgaagggcggcaccaatgctgagatggccccccagattgactacacagtgatggtgttcaagcccatcgtggagaagtttggcttcatcttcaactgtgacatcaagacccggggctactaccccaagggcggcggggaggtgattgtgaggatgagccctgtgaagcagctgaaccccatcaacctgacagagcggggctgtgtgaccaagatctacggccgggcctttgtggccggcgtgctgcccttcaaggtggccaaggacatggctgctgctgctgtgcgctgcatcaggaaggagatccgggacctgtatgtgaacatccagcctgtgcaggagcccaaggaccaggcctttggaaatggaaatggcatcatcatcatcgccgagaccagcacaggctgcctgtttgctggcagcagcctgggcaagaggggcgtgaatgctgacaaggtgggcatcgaggccgctgagatgctgctggccaacctgcggcacggcggcaccgtggatgagtacctgcaggaccagctgattgtgttcatggccctggccaacggggtgagccgcatcaagacaggccctgtgaccctgcacacccagacagccatccactttgctgagcagatcgccaaggccaagttcatcgtgaagaagtcagaagatgaggaggatgctgccaaggacacctacatcatcgagtgccagggcatcggcatgaccaaccccaacctgtag

SEQ ID NO: 18431 - DNA, 1056 bp, synthetic construct
  source 1..1056: mol_type = other DNA; note = Synthetic coding sequence
atgcccagcgagaccctgtgggagatcgccaaggccgaggtggagaagaggggcatcaatggaagtgaaggagatggagctgagattgctgagaagtttgtgttcttcatcggcagcaagaatggaggcaagaccaccatcatcctgcgctgcctggacagagatgagccccccaagcccaccctggccctggagtacacctacggccggcgggccaagggccacaacacccccaaggacatcgcccacttctgggagctgggcggcggcaccagcctgctggacctgatcagcatccccatcaccggggacaccctgcggaccttcagcctggtgctggtgctggacctgagcaagcccaatgacctgtggcccaccatggagaacctgctgcaggccaccaagagccacgtggacaaggtgatcatgaagctgggcaagaccaatgccaaggctgtgtctgagatgaggcagaagatctggaacaacatgcccaaggaccacccagaccacgagctgattgaccccttccctgtgcccctggtgatcatcggcagcaaatatgatgtgttccaggactttgagagcgagaagaggaaggtgatctgcaagaccctgcgctttgtggcccactactatggagccagcctgatgttcaccagcaagtctgaggccctgctgctgaagatccggggcgtcatcaaccagctggcctttggaattgacaagagcaagagcatctgtgtggaccagaacaagcccctcttcatcacagctggcctggacagctttggccagatcggcagcccccctgtgcctgaaaatgacatcggcaagctgcacgcccacagccccatggagctgtggaagaaggtgtatgagaagctgttcccccccaagagcatcaacaccctgaaggacatcaaggaccctgcccgggacccccagtatgcagaaaatgaggtggatgagatgaggatccagaaggacctggagctggagcagtacaagaggagcagcagcaagtcctggaagcagatcgagctggacagctag

SEQ ID NO: 18432 - DNA, 798 bp, synthetic construct
  source 1..798: mol_type = other DNA; note = Synthetic coding sequence
atgtgcaccagcgagaccttccaggccctggacacctttgaggcccggcatgatgacatcgtgctggccagctaccccaagtgtggcagcaactggatcctgcacatcgtgtctgagctgatctatgctgtgtccaagaagaagtacaagtacccagagttccctgtgctggagtgtggggacagcgagaagtaccagaggatgaagggcttccccagcccccgcatcctggccacccacctgcactatgacaagctgcccggcagcatctttgagaacaaggccaagatcctggtgatcttcaggaaccccaaggacacagctgtgtccttcctgcacttccacaatgatgtgcctgacatccccagctatggctcctgggatgagttcttccggcagttcatgaagggccaggtgtcctggggccgctactttgattttgccatcaactggaacaagcacctggatggagacaacgtgaagttcatcctgtatgaggacctgaaggagaacctggccgccggcatcaagcagattgctgagttcctgggcttcttcctgaccggggagcagatccagaccatctctgtgcagagcaccttccaggccatgagggccaagagccaggacacccacggggctgtgggccccttcctgttcaggaagggggaggtgggggactggaagaacctcttcagcgagatccagaaccaggagatggatgagaagttcaaggagtgcctggccggcaccagcctgggcgccaagctgaagtatgagagctactgccagggctag

SEQ ID NO: 18433 - DNA, 5343 bp, synthetic construct
  source 1..5343: mol_type = other DNA; note = Synthetic coding sequence
atggagagcaacttcaaccaggagggcgtgccccggcccagctatgtgttttctgctgaccccatcgcccggcccagcgagatcaactttgatggcatcaagctggacctgagccatgagttcagcctggtggcccccaacacagaggccaacagctttgagagcaaggactacctgcaggtgtgcctgcgcatccggcccttcacccagagcgagaaggagctggagagcgagggctgtgtgcacatcctggacagccagacagtggtgctgaaggagccccagtgcatcctgggccgcctgtctgagaagagcagcggccagatggcccagaagttctccttcagcaaggtgtttggacctgccaccacccagaaggagttcttccagggctgcatcatgcagcctgtgaaggacctgctgaagggccagagccgcctcatcttcacctacggcctgaccaacagcggcaagacctacaccttccagggcacagaagaaaatattggcatcctgcccaggaccctgaatgtgctgtttgacagcctgcaggagcggctgtacaccaagatgaacctgaagccccacaggagccgggagtacctgcggctgagcagcgagcaggagaaggaggagatcgccagcaagagcgccctgctgcggcagatcaaggaggtgacagtgcacaatgacagtgatgacaccctgtatggcagcctgaccaacagcctgaacatcagcgagtttgaggagagcatcaaggactatgagcaggccaacctgaacatggccaacagcatcaagttctctgtgtgggtgtccttctttgagatctacaatgagtacatctatgacctgtttgtgcctgtgagcagcaagttccagaagaggaagatgctgcggctgagccaggatgtgaagggctacagcttcatcaaggacctgcagtggatccaggtgtctgacagcaaggaggcctaccgcctgctgaagctgggcatcaagcaccagagcgtggccttcaccaagctgaacaatgccagcagccgcagccacagcatcttcaccgtgaagatcctgcagattgaagattctgagatgagcagggtcatccgggtgtctgagctgagcctgtgtgacctggccggcagcgagaggaccatgaagacccagaatgaaggagagcggctgcgggagaccggcaacatcaacaccagcctgctgaccctgggcaagtgcatcaacgtgctgaagaacagcgagaagagcaagttccagcagcacgtgcccttccgggagagcaagctgacccactacttccagagcttcttcaacgggaagggcaagatctgcatgattgtgaacatcagccagtgctacctggcctatgatgagaccctgaatgtgctgaagttcagcgccatcgcccagaaggtgtgtgtgcctgacaccctgaacagcagccaggagaagctgtttggacctgtgaagagcagccaggatgtgtccctggacagcaacagcaacagcaagatcctgaatgtgaagagggccaccatctcctgggagaacagcctggaggacctgatggaggatgaggacctggtggaggagctggagaatgctgaggagacccagaatgtggagaccaagctgctggatgaggacctggacaagaccctggaggagaacaaggccttcatcagccatgaggagaagaggaagctgctggacctgattgaggacctgaagaagaagctgatcaatgagaagaaggagaagctgaccctggagttcaagatccgggaggaggtgacccaggagttcacccagtactgggcccagcgggaggccgacttcaaggagaccctgctgcaggagcgggagatcctggaggagaatgctgagcggcggctggccatcttcaaggacctggtgggcaaatgtgacacccgggaggaggccgccaaggacatctgtgccaccaaggtggagacagaggaggccacagcctgcctggagctgaagttcaaccagatcaaggccgagctggccaagaccaagggggagctgatcaagaccaaggaggagctgaagaagcgggagaatgaaagtgacagcctcatccaggagctggagaccagcaacaagaagatcatcacccagaaccagaggatcaaggagctgatcaacatcatcgaccagaaggaggacaccatcaatgagttccagaacctgaagagccacatggagaacaccttcaagtgcaatgacaaggctgacaccagcagcctcatcatcaacaacaagctgatctgcaatgagaccgtggaggtgcccaaggacagcaagagcaagatctgcagcgagaggaagagggtgaatgaaaatgagctgcagcaggatgagcccccagccaagaagggcagcatccacgtgtcctctgccatcacagaggaccagaagaagtctgaggaggtgcggcccaacattgctgagattgaggacatccgggtgctgcaggagaacaatgaaggcctgcgggccttcctgctgaccattgaaaatgagctgaagaatgagaaggaggagaaggccgagctgaacaagcagatcgtgcacttccagcaggagctgagcctgtctgagaagaagaacctgaccctgagcaaggaggtgcagcagatccagagcaactatgacatcgccatcgccgagctgcacgtgcagaagagcaagaaccaggagcaggaggagaagatcatgaagctgagcaatgaaattgaaacagccaccaggagcatcaccaacaacgtgtcccagatcaagctgatgcacaccaagattgatgagctgcggaccctggacagcgtgtcccagatcagcaacatcgacctgctgaacctgcgggacctgagcaatggcagcgaggaggacaacctgcccaacacccagctggacctgctgggcaatgactacctggtgtccaagcaggtgaaggagtaccgcatccaggagcccaaccgggagaacagcttccacagcagcattgaggccatctgggaggagtgcaaggagatcgtgaaggccagcagcaagaagagccaccagatcgaggagctggagcagcagatcgagaagctgcaggccgaggtgaagggctacaaggatgagaacaaccggctgaaggagaaggagcacaagaaccaggatgacctgctgaaggagaaggagaccctcatccagcagctgaaggaggagctgcaggagaagaatgtgaccctggatgtgcagatccagcacgtggtggagggcaagagggccctgtctgagctgacccagggcgtgacctgctacaaggccaagatcaaggagctggagaccatcctggagacccagaaggtggagtgcagccacagcgccaagctggagcaggacatcctggagaaggagagcatcatcctgaagctggagaggaacctgaaggagttccaggagcacctgcaggacagcgtgaagaacaccaaggacctgaatgtgaaggagctgaagctgaaggaggagatcacccagctgaccaacaacctgcaggacatgaagcacctgctgcagctgaaggaggaggaggaggagaccaaccggcaggagacagagaagctgaaggaggagctgagcgccagcagcgcccggacccagaacctgaaggctgacctgcagaggaaggaggaggactatgctgacctgaaggagaagctgacagatgccaagaagcagatcaagcaggtgcagaaggaggtgtctgtgatgagagatgaggacaagctgctgcgcatcaagatcaatgagctggagaagaagaagaaccagtgcagccaggagctggacatgaagcagaggaccatccagcagctgaaggagcagctgaacaaccagaaggtggaggaggccatccagcagtatgaaagagcctgcaaggacctgaatgtgaaggagaagatcatcgaggacatgaggatgaccctggaggagcaggagcagacccaggtggagcaggaccaggtgctggaggccaagctggaggaggtggagcggctggccacagagctggagaagtggaaggagaagtgcaatgacctggagaccaagaacaaccagaggagcaacaaggagcacgagaacaacacagatgtgctgggcaagctgaccaacctgcaggatgagctgcaggagagcgagcagaagtacaatgctgacaggaagaagtggctggaggagaagatgatgctgatcacccaggccaaggaggccgagaacatccggaacaaggagatgaagaagtatgcagaagatcgggagcgcttcttcaagcagcagaatgagatggagatcctgacagcccagctgacagagaaggacagcgacctgcagaagtggagggaggagcgggaccagctggtggccgccctggagatccagctgaaggccctgatcagcagcaatgtgcagaaggacaatgaaattgagcagctgaagaggatcatcagcgagaccagcaagattgagacccagatcatggacatcaagcccaagaggatcagcagcgctgaccctgacaagctgcagacagagcccctgagcaccagctttgagatcagcaggaacaagattgaagatggctctgtggtgctggacagctgtgaggtgtccacagaaaatgaccagagcacccgcttccccaagccagagctggagatccagttcacccccctgcagcccaacaagatggctgtgaagcaccctggctgcaccacccctgtgacagtgaagatccccaaggccaggaagaggaagagcaatgagatggaggaggacctggtgaagtgtgagaacaagaagaatgccacccccaggaccaacctgaagttccccatcagtgatgacaggaacagctctgtgaagaaggagcagaaggtggccatccggcccagcagcaagaagacctacagcctgcggagccaggccagcatcattggagtgaacctggccaccaagaagaaggagggcaccctgcagaagtttggagacttcctgcagcacagccccagcatcctgcagagcaaggccaagaagatcatcgagaccatgagcagcagcaagctgagcaatgtggaggccagcaaagaaaatgtgtcccagcccaagagggccaagaggaagctgtacaccagcgagatcagcagccccatcgacatcagcggccaggtgatcctgatggaccagaagatgaaggagagtgaccaccagatcatcaagaggcggctgcggaccaagacagccaagtag

SEQ ID NO: 18434 - DNA, 1371 bp, synthetic construct
  source 1..1371: mol_type = other DNA; note = Synthetic coding sequence
atgaacagcagtgatgaggagaagcagctgcagctgatcaccagcctgaaggagcaggccatcggggagtatgaggacctgcgggcagagaaccagaagaccaaggagaagtgtgacaagatccggcaggagagagatgaggccgtgaagaagctggaggagttccagaagatcagccacatggtgattgaggaggtgaacttcatgcagaaccacctggagattgagaagacctgccgggagagcgctgaggccctggccaccaagctgaacaaggagaacaagaccctgaagaggatctccatgctgtacatggccaagctgggcccagatgtgatcacagaggagatcaacattgatgatgaggacagcaccacagacacagatggagctgctgagacctgtgtgtctgtgcagtgccagaagcagatcaaggagctgcgggaccagatcgtgtctgtgcaggaggagaagaagatcctggccatcgagctggagaacctgaagagcaagctggtggaggtgattgaggaggtgaacaaggtgaagcaggagaagacagtgctgaacagcgaggtgctggagcagaggaaggtgctggagaagtgcaacagagtgtccatgctggccgtggaggagtatgaggagatgcaggtgaacctggagctggagaaggacctgaggaagaaggccgagagctttgcccaggagatgttcatcgagcagaacaagctgaagaggcagagccacctgctgctgcagagcagcatcccagaccagcagctgctgaaggccctggatgaaaatgccaagctgacccagcagctggaggaggagcgcatccagcaccagcagaaggtgaaggagctggaggagcagctggagaatgagaccctgcacaaggagatccacaacctgaagcagcagctggagctgctggaggaggacaagaaggagctggagctgaagtaccagaacagcgaggagaaggccaggaacctgaagcacagcgtggatgagctgcagaagagggtgaaccagagtgaaaattctgtgcccccacctcctcctcctcctccacccctgcccccacctccacccaaccccatccgcagcctgatgtccatgatcaggaagaggagccaccccagcggcagcggggccaagaaggagaaggccacccagcctgagaccacagaggaggtgacagacctgaagaggcaggccgtggaggagatgatggaccgcatcaagaagggcgtgcacctgcggcctgtgaaccagacagcccggcccaagaccaagccagagagcagcaagggctgtgagagcgctgtggatgagctgaagggcatcctggccagccagtag

SEQ ID NO: 18435 - DNA, 630 bp, synthetic construct
  source 1..630: mol_type = other DNA; note = Synthetic coding sequence
atgaagaaggtgcggctgaaggagctggagagccggctgcagcaggtggatggctttgagaagcccaagctgctgctggagcagtaccccacccggccccacatcgccgcctgcatgctgtacaccatccacaacacctatgatgacatcgagaacaaggtggtggccgacctgggctgcggctgcggcgtgctgagcattggaacagccatgctgggcgccggcctgtgtgtgggctttgatattgatgaagatgccctggagatcttcaacagaaatgctgaggagtttgagctgaccaacatcgacatggtgcagtgtgatgtgtgcctgctgagcaacaggatgagcaagagctttgacaccgtcatcatgaaccccccatttggcaccaagaacaacaagggcacagacatggccttcctgaagacagccctggagatggccaggacagctgtgtacagcctgcacaagagcagcacccgggagcacgtgcagaagaaggctgctgagtggaagatcaagattgacatcatcgccgagctgcgctatgacctgcctgccagctacaagttccacaagaagaagtctgtggacatcgaggtggacctgatccgcttctccttctag

SEQ ID NO: 18436 - DNA, 4719 bp, synthetic construct
  source 1..4719: mol_type = other DNA; note = Synthetic coding sequence
atggccagcagcgcccgggagcacctgctgtttgtgagaagaagaaacccccagatgagatacaccctgagccctgagaacctgcagagcctggccgcccagagctccatgcctgagaacatgaccctgcagagggccaacagcgacacagacctggtgaccagcgagagccgcagcagcctgacagcctccatgtatgagtacaccctgggccaggcccagaacctgatcatcttctgggacatcaaggaggaggtggaccccagcgactggattggcctgtaccacattgatgagaacagccctgccaacttctgggacagcaagaacagaggagtgacaggcacccagaagggccagatcgtgtggagaattgagcccggcccctacttcatggagcctgagatcaagatctgcttcaagtactaccacggcatcagcggggccctgcgggccaccaccccctgcatcaccgtgaagaacccagctgtgatgatgggcgctgagggcatggagggcggggccagcggcaacctgcacagcaggaagctggtgtccttcaccctgagtgacctgcgggctgtgggcctgaagaagggcatgttcttcaacccagacccctacctgaagatgagcatccagcccgggaagaagagcagcttccccacctgtgcccaccacggccaggagaggaggagcaccatcatcagcaacaccaccaaccccatctggcaccgggagaagtacagcttctttgccctgctgacagatgtgctggagattgagatcaaggacaagtttgccaagagccggcccatcatcaagcgcttcctgggcaagctgaccatccctgtgcagaggctgctggagcggcaggccatcggggaccagatgctgagctacaacctgggccgccgcctgcctgctgaccacgtgtctggctacctgcagttcaaggtggaggtgaccagctctgtgcatgaagatgccagccctgaggccgtgggcaccatcctgggcgtgaacagcgtgaatggagacctgggcagccccagtgatgatgaggacatgcctggcagccaccacgacagccaggtgtgcagcaatggacctgtgtctgaggacagcgctgctgatggcacccccaagcacagcttccgcaccagcagcaccctggagattgacacagaggagctgaccagcaccagcagcaggaccagccccccccggggccggcaggacagcctgaatgactacctggatgccatcgagcacaacggccacagcaggcctggaacagccacctgcagcgagaggtccatgggcgccagccccaagctgcggagcagcttccccacagacacccggctgaatgccatgctgcacatcgacagtgatgaggaggaccacgagttccagcaggacctgggctaccccagcagcctggaggaggagggcggcctcatcatgttcagccgggccagcagagcagatgatggcagcctgaccagccagaccaagctggaggacaaccctgtggagaatgaggaggccagcacccatgaagctgccagctttgaggacaagccagagaacctgcctgagctggccgagagcagcctgcctgctggccctgcccctgaggagggggagggcggccctgagccccagcccagcgctgaccagggcagcgctgagctgtgtggcagccaggaggtggaccagcccaccagcggggctgacaccggcaccagtgatgccagcggcggcagccggcgggctgtgtctgaaacagagagcctggaccagggcagcgagcccagccaggtgagcagcgagacagagcccagcgaccctgccaggacagagagcgtgtctgaggccagcaccaggcctgagggggagagtgacctggagtgtgccgacagcagctgcaatgaatctgtgaccacccagctgagctctgtggacacccgctgcagcagcctggagagcgcccgcttccctgagaccccagccttcagcagccaggaggaggaggatggagcctgtgccgctgagcccaccagcagcggccctgctgagggcagccaggagagcgtgtgcacagctggcagcctgcctgtggtgcaggtgcccagcggggaggatgagggccctggagctgagagcgccaccgtgcctgaccaggaggagctgggggaggtgtggcagaggcggggcagcctggagggcgctgctgctgctgctgagagccccccccaggaggagggcagcgctggggaggcccagggcacctgtgagggcgccacagcccaggaggagggcgccaccggcggcagccaggccaacggccaccagcccctgcggagcctgcccagcgtgcggcaggatgtgagccgctaccagagggtggatgaggccctgccccccaactgggaggccagaattgacagccacggccgcatcttctacgtggaccacgtgaacagaaccaccacctggcagaggcccacagcccccccagccccccaggtgctgcagaggagcaacagcatccagcagatggagcagctgaacagacgctaccagagcatccggaggaccatgaccaatgaaagacctgaggagaacaccaatgccattgatggagctggggaggaggccgacttccaccaggccagcgctgacttcagaagagagaacatcctgccccacagcaccagccgcagccgcatcaccctgctgctgcagagcccccctgtgaagttcctgatcagccctgagttcttcaccgtgctgcacagcaaccccagcgcctacaggatgttcaccaacaacacctgcctgaagcacatgatcaccaaggtgcggcgggacacccaccactttgagcgctaccagcacaacagagacctggtgggcttcctgaacatgtttgccaacaagcagctggagctgccccggggctgggagatgaagcatgaccaccagggcaaggccttctttgtggaccacaacagcaggaccaccaccttcatcgacccccggctgcccctgcagagcagccggcccaccagcgccctggtgcaccggcagcacctgacccggcagaggagccacagcgctggggaggtgggggaggacagcagacatgctggcccccctgtgctgccccggcccagcagcaccttcaacacagtgtcccggccccagtaccaggacatggtgcctgtggcctacaatgacaagatcgtggccttcctgcggcagcccaacatctttgagatcctgcaggagcggcagcctgacctgaccaggaaccacagcctgcgggagaagatccagttcatcagaacagagggcaccccaggcctggtgcggctgagcagtgatgctgacctggtgatgctgctgagcctgtttgaggaggagatcatgtcctatgtgccccctcatgccctgctgcaccccagctactgccagagcccccggggcagccctgtgagcagcccccagaacagccctggcacccagagggccaatgcccgggccccagccccctacaagagggactttgaggccaagctgaggaacttctacaggaagctggagaccaagggctacggccagggccctgggaagctgaagctgatcatcagaagagaccacctgctggaggatgccttcaaccagatcatgggctacagcaggaaggacctgcagaggaacaagctgtatgtgacctttgtgggggaggagggcctggactacagcggccccagccgggagttcttcttcctggtgtcccgggagctgttcaacccctactacggcctgtttgagtacagcgccaatgacacctacacagtgcagatcagccccatgtctgcctttgtggacaaccaccacgagtggttccgcttcagcggccgcatcctgggcctggccctgatccaccagtacctgctggatgccttcttcacccggcccttctacaaggccctgctgcgcatcctgtgtgacctgagtgacctggagtacctggatgaggagttccaccagagcctgcagtggatgaaggacaatgacatccatgacatcctggacctgaccttcaccgtgaatgaggaggtgtttggccagatcacagagcgggagctgaagccaggaggagccaacatccctgtgacagagaagaacaagaaggagtacatcgagaggatggtgaagtggagaattgaaagaggagtggtgcagcagacagagagcctggtgcggggcttctatgaggtggtggatgcccggctggtgtctgtgtttgatgcccgggagctggagctggtgattgctggaacagctgagattgacctgagtgactggaggaacaacacagagtacagaggaggctaccatgacaaccacatcgtcatccgctggttctgggccgctgtggagcgcttcaacaatgagcagaggctgcggctgctgcagtttgtgacaggcaccagcagcatcccctatgagggctttgccagcctgcggggcagcaatggcccccggcgcttctgtgtggagaagtggggcaagatcacagccctgccccgggcccacacctgcttcaaccggctggacctgcccccctaccccagcttctccatgctgtatgagaagctgctgacagctgtggaggagaccagcaccttcggcctggagtag

SEQ ID NO: 18437 - DNA, 1206 bp, synthetic construct
  source 1..1206: mol_type = other DNA; note = Synthetic coding sequence
atgagctgccgctgctggatcagccgccaccccagctatgagggctggaacctgcagagcatcatcttccacaagcagatccggggcgtggacctggagagcacctttgtgaccaagtttggaaacaactgcagcctgcggctgaatgaaacagtggacatccacaaggagaaggtggcccggcgggagatcggcatcctgaccaccaacaagaacaccagcaggacccacaagatcatcgccccagccaacctggagaggcctgtgcgctacatcaggaagcccatcgactacaccatcctggatgacatcggccacggcgtgaaggtgtccacccagaacatgaagatgggcggcctgcccaggaccaccccacccacccagaagccacccagcccccccatgtctgggaagggcaccctgggccgccacagcccctaccgcaccctggagcctgtgcggccccctgtggtgcccaatgactatgtgcccagccccaccaggaacatggcccccagccagcagagccctgtgaggacagcctctgtgaaccagaggaacagaacctacagcagcagcggcagcagcggcggcagccaccccagcagccgcagcagcagcagagaaaattctggcagcggctctgtgggcgtgcccatcgctgtgcccacccccagccccccatctgtgtttcctggccaccctgtgcagttctacagcatgaacagacctgccagccgccacaccccacccaccatcggcggcagcctgccctaccgccggccccccagcatcaccagccagaccagcctgcagaaccagatgaatggaggccccttctacagccagaaccctgtgtctgacaccccacctcctcctcctcctgtggaggagcctgtgtttgatgagagccccccacctcctcctcctcctgaggactatgaggaggaggaggccgctgtggtggagtacagcgacccctatgcagaagaagatcctccctgggcccccaggagctacctggagaaggtggtggccatctatgactacaccaaggacaaggaggatgagctgtccttccaggagggcgccatcatctacgtgatcaagaagaatgatgatggctggtatgaaggagtgatgaatggagtgacaggcctcttccctggcaactacgtggagagcatcatgcactacagcgagtag

SEQ ID NO: 18438 - DNA, 1428 bp, synthetic construct
  source 1..1428: mol_type = other DNA; note = Synthetic coding sequence
atggccgagctgcagatgctgctggaggaggagatccctgggggccggcgggccctgtttgacagctacaccaacctggagcgggtggccgactactgtgagaacaactacatccagagcgctgacaagcagagggccctggaggagaccaaggcctacaccacccagagcctggcctctgtggcctacctgatcaacaccctggccaacaacgtgctgcagatgctggacatccaggccagccagctgcggaggatggagagcagcatcaaccacatcagccagacagtggacatccacaaggagaaggtggcccggcgggagatcggcatcctgaccaccaacaagaacaccagcaggacccacaagatcatcgccccagccaacctggagaggcctgtgcgctacatcaggaagcccatcgactacaccatcctggatgacattggacatggagtgaaggtgtccacccagaacatgaagatgggcggcctgcccaggaccaccccacccacccagaagccacccagcccccccatgtctgggaagggcaccctgggccgccacagcccctaccgcaccctggagcctgtgcggccccctgtggtgcccaatgactatgtgcccagccccaccaggaacatggcccccagccagcagagccctgtgaggacagcctctgtgaaccagaggaacagaacctacagcagcagcggcagcagcggcggcagccaccccagcagccgcagcagcagccgggagaacagcggcagcggctctgtgggcgtgcccatcgctgtgcccacccccagcccccccagcgtcttccctggccaccctgtgcagttctacagcatgaacagacctgccagccgccacaccccacccaccatcggcggcagcctgccctacagaagacctccttccatcaccagccagaccagcctgcagaaccagatgaatggaggccccttctacagccagaaccctgtgtccctggcccctcctcctccttccatcctgcaggtgaccccccagctgcccctgatgggctttgtggcccgggtgcaggagaacatcagtgacaccccacctcctcctcctcctgtggaggagcctgtgtttgatgagagccccccacctcctcctcctcctgaggactatgaggaggaggaggccgctgtggtggagtacagcgacccctatgcagaagaagatcctccctgggcccccaggagctacctggagaaggtggtggccatctatgactacaccaaggacaaggaggatgagctgtccttccaggagggcgccatcatctacgtgatcaagaagaatgatgatggctggtatgaaggagtgatgaatggagtgacaggcctcttccctggcaactacgtggagagcatcatgcactacagcgagtag

SEQ ID NO: 18439 - DNA, 900 bp, synthetic construct
  source 1..900: mol_type = other DNA; note = Synthetic coding sequence
atgaagatgggcggcctgcccaggaccaccccacccacccagaagccacccagcccccccatgtctgggaagggcaccctgggcagcagcggcagcagcggcggcagccaccccagcagccgcagcagcagccgggagaacagcggcagcggctctgtgggcgtgcccatcgctgtgcccacccccagcccccccagcgtcttccctgccccagctggcagcgctggcaccccacccctgcctgccaccagcgccagcgccccagcccccctggtgcctgccaccgtgcccagcagcacagccccagatgctgctgctgggggcgcccagaccctggctgatggcttcaccagccccaccccacctgtggtgagcagcaccccacccaccggccaccctgtgcagttctacagcatgaacagacctgccagccgccacaccccacccaccatcggcggcagcctgccctaccgccggccccccagcatcaccagccagaccagcctgcagaaccagatgaatggaggccccttctacagccagaaccctgtgtctgacaccccacctcctcctcctcctgtggaggagcctgtgtttgatgagagccccccacctcctcctcctcctgaggactatgaggaggaggaggccgctgtggtggagtacagcgacccctatgcagaagaagatcctccctgggcccccaggagctacctggagaaggtggtggccatctatgactacaccaaggacaaggaggatgagctgtccttccaggagggcgccatcatctacgtgatcaagaagaatgatgatggctggtatgaaggagtgatgaatggagtgacaggcctcttccctggcaactacgtggagagcatcatgcactacagcgagtag

SEQ ID NO: 18440 - DNA, 1926 bp, synthetic construct
  source 1..1926: mol_type = other DNA; note = Synthetic coding sequence
atgggcagaagaagcaccagcagcaccaagagcggcaagttcatgaaccccacagaccaggccaggaaggaggccaggaagcgggagctgaagaagaacaagaagcagaggatgatggtgcgggctgctgtgctgaagatgaaggaccccaagcagatcatccgggacatggagaagctggatgagatggagttcaaccctgtgcagcagccccagctgaatgagaaggtgctgaaggacaagaggaagaagctgcgggagacctttgagcgcatcctgcggctgtatgagaaggaaaatccagacatctacaaggagctgaggaagctggaggtggagtatgagcagaagagggcccagctgagccagtactttgatgctgtgaagaatgcccagcacgtggaggtggagagcatccccctgcctgacatgccccacgcccccagcaacatcctgatccaggacatccccctgcccggggcccagcccccatccatcctgaagaagaccagcgcctacggcccccccaccagggctgtgtccatcctgcccctgctgggccacggcgtgccccggctgcccccaggcaggaagcccccaggccccccacctggccccccaccaccccaggtggtgcagatgtatggcaggaaggtgggctttgccctggacctgccccccaggagaagagatgaggacatgctgtacagccctgagctggcccagaggggccatgatgatgatgtgagcagcaccagtgaagatgatggctacccagaggacatggaccaggacaagcatgatgacagcacagatgacagcgacacagacaagagtgatggagagagtgatggagatgaatttgtgcaccgggacaatggagagcgggacaacaatgaggagaagaagagcggcctgtctgtgcgctttgctgacatgcctgggaagagcaggaagaagaagaagaacatgaaggagctgacccccctgcaggccatgatgctgaggatggccggccaggagatccctgaggagggccgggaggtggaggagttctctgaagatgatgatgaagatgacagtgatgacagcgaggccgagaagcagagccagaagcagcacaaggaggagagccacagtgatggcaccagcacagccagcagccagcagcaggccccaccccagagcgtgccccccagccagatccaggccccacccatgcctggccccccacccctgggccccccaccagccccacccctgcggcccccaggcccccccaccggcctgcccccaggccccccacctggggccccacccttcctgcggcccccaggcatgcctggcctgcggggccccctgccccggctgctgcccccaggccccccacctggccggcccccaggccccccacctggccccccacctggcctgcccccaggccccccaccccggggccccccaccccggctgcccccaccagcccctcctggcatccccccaccccggcccggcatgatgaggcctcccctggtgccccccctgggccctgcccctcctggcctcttccccccagcccccctgcccaaccctggggtgctgagcgccccacccaacctgatccagaggcccaaggcagatgacaccagcgctgccaccatcgagaagaaggccacagccaccatcagcgccaagccccagatcaccaaccccaaggccgagatcaccaggtttgtgcccacagccctgcgggtgcggcgggagaacaagggggccacagctgccccccagaggaagtcagaagatgacagcgctgtgcccctggccaaggccgcccccaagagcggccccagcgtgcctgtgtctgtgcagaccaaggatgatgtgtatgaggccttcatgaaggagatggagggcctgctgtag

SEQ ID NO: 18441 - DNA, 4419 bp, synthetic construct
  source 1..4419: mol_type = other DNA; note = Synthetic coding sequence
atgaagggcagcgaggtgtccctggagaagaagaagaagatcaagatgcctgtgaagaggctgcgggaggtggtgtcccagaaccacggggaccacctggtgctgctgaaggatgagctgccctgtgtgcccccagccctgagcgccaacaagaggctgcctgtgggcaccggcaccagcctgaatggcaccagccggggcagcagtgacctgaccagcgccaggaactgctaccagcccctgctggagaaccccatggtgtctgagagtgacttcagcaaggatgtggccgtgcaggtgctgcccctggacaagattgaggagaacaacaagcagaaggccaatgacatcttcatcagccagtacaccatgggccagaaggatgccctgaggacagtgctgaagcagaaggcccagagcatgcctgtgttcaaggaggtgaaggtgcacctgctggaggatgctggcatcgagaaggatgctgtgacccaggagacccgcatcagccccagcggcattgattctgccaccaccgtggccgccgccacagctgctgccatcgccacagctgcccccctcatcaaggtgcagagcgacctggaggccaaggtgaacagcgtgacagagctgctgagcaagctgcaggagacagacaagcacctgcagagggtgacagagcagcagaccagcatccagaggaagcaggagaagctgcactgccacgaccacgagaagcagatgaatgtgttcatggagcagcacatccgccacctggagaagctgcagcagcagcagattgacatccagacccacttcatctctgctgccctgaagaccagcagcttccagcctgtgtccatgcccagcagcagagctgtggagaagtacagcgtgaagccagagcaccccaacctgggcagctgcaaccccagcctgtacaacacctttgccagcaagcaggcccccctgaaggaggtggaggacaccagctttgacaagcagaagagccccctggagaccccagcccccaggagatttgcccctgtgcctgtgtccagagatgatgagctgagcaagcgggagaacctgctggaggagaaggagaacatggaggtgtcctgccacagaggaaatgtgcggctgctggagcagatcctgaacaacaatgacagcctgaccaggaagtctgagagcagcaacaccaccagcctgaccaggagcaagattggctggaccccagagaagaccaaccgcttccccagctgtgaggagctggagaccaccaaggtgaccatgcagaagagtgatgatgtgctgcatgacctgggccagaaggagaaggagaccaacagcatggtgcagcccaaggagagcctgtccatgctgaagctgcctgacctgccccagaacagcgtgaagctgcagaccaccaacaccaccaggtctgtgctgaaggatgctgagaagatcctgcggggcgtgcagaacaacaagaaggtgctggaggagaacctggaggccatcatccgggccaaggatggagctgccatgtacagcctcatcaatgccctgagcaccaaccgggagatgtctgagaagatccgcatcaggaagacagtggatgagtggatcaagaccatctctgctgagatccagggcctgctgaaggccaccaccgtcatccaggatgaggactacatgctgcaggtgtatggcaagcctgtgtaccagggccacaggagcaccctgaagaagggcccctacctgcgcttcaacagccccagccccaagagccggccccagaggcccaaggtgattgaaagagtgaagggcaccaaggtgaagagcatccgcacccagacagacttctacgccaccaagcccaagaagatggacagcaagatgaagcacagcgtgcctgtgctgccccacggggaccagcagtacctgttcagccccagccgggagatgcccaccttcagcggcaccctggagggccacctgatccccatggccatcctgctgggccagacccagagcaacagcgacaccatgcccccagctggggtgattgtgtccaagccccaccctgtgacagtgaccaccagcatcccccccagcagcaggaaggtggagactggagtgaagaagcccaacatcgccatcgtggagatgaagtctgagaagaaggaccccccccagctgactgtgcaggtgctgcccagcgtggacatcgacagcatcagcaacagcagcgcagatgtgctgagccccctgagcagccccaaggaggccagcctgccccctgtgcagacctggatcaagaccccagagatcatgaaggtggatgaggaggaggtgaagtttcctggcaccaactttgatgagatcattgatgtgatccaggaggaggagaagtgtgatgagatcccagattctgagcccatcctggagttcaacagatctgtgaaggctgacagcaccaagtacaatggaccacccttcccccctgtggccagcaccttccagcccacagctgacatcctggacaaggtgattgaaaggaaggagaccctggagaacagcctcatccagtgggtggagcaggagatcatgagccgcatcatcagcggcctcttccctgtgcagcagcagatcgcccccagcatctctgtgtctgtgtctgagaccagcgagcccctgaccagtgacatcgtggagggcaccagcagcggggccctgcagctgtttgtggatgctggggtgcctgtgaacagcaatgtcatcaagcactttgtgaatgaggccctggccgagaccatcgctgtgatgctgggggaccgggaggccaagaagcagggccctgtggccaccggggtgtctggagatgccagcaccaatgagacctacctgcctgcccgggtgtgcacccccctgcccaccccccagcccaccccaccctgcagccccagcagccctgccaaggaatgtgtgctggtgaagaccccagacagcagcccctgtgacagcgaccatgacatggccttccctgtgaaggagatctgtgccgagaagggagatgacatgcctgccatcatgctggtgaacacccccaccgtgacccccaccaccaccccacctcctgctgctgctgtgttcacccccaccctgagtgacatcagcattgacaagctgaaggtgagcagccctgagctgcccaagccctggggagatggagacctgcccctggaggaggagaaccccaacagcccccaggaggagctgcacccccgggccatcgtgatgtctgtggccaaggatgaggagcctgagagcatggacttccctgcccagcccccacctcctgagcctgtgcccttcatgcccttccctgctggcaccaaggcccccagccccagccagatgcctggcagtgacagcagcaccctggagagcaccctgtctgtgacagtgacagaaacagagaccctggacaagcccatcagcgagggggagatcctcttcagctgtggccagaagctggcccccaagatcctggaggacatcggcctgtacctgaccaacctgaatgacagcctgagcagcaccctgcatgatgctgtggagatggaggatgacccccccagcgagggccaggtgatccgcatgagccacaagaagttccacgcagatgccatcctgagctttgccaagcagaaccaggagagcgctgtgtcccagcaggccgtgtaccacagcgaggacctggagaacagcgtgggggagctgtctgagggccagaggccccagctgacagctgctgctgagaacatcctgatgggccacagcctgtacatgcagccccctgtgaccaacacccagagcctggaccagcagtgtgaccccaagcccctgagccggcagtttgacacagtgtctggcagcatctatgaggacagctgtgccagccacggccccatgagcctgggggagctggagctggagcccaacagcaagctggtgctgcccaccaccctgctgacagcccaggagaatgatgtgaacctgcctgtggccgctgaggacttcagccagtaccagctgaagcagaaccaggatgtgaagcaggtggagcacaagcccagccagagctacctgcgggtgaggaacaagagtgacatcgcccccagccagcagcaggtgtcccctggggacatggacaggacccagatcgagctgaacccctacctgacctgtgtgttcagcggcggcaaggctgtgcccctgagcgccagccagatgcccccagccaagatgtctgtgatgctgcccagcgtgaacctggaggactgcagccagagcctgagcctgagcaccatgcaggaggacatggagagcagtggagctgacaccttctag

SEQ ID NO: 18442 - DNA, 1986 bp, synthetic construct
  source 1..1986: mol_type = other DNA; note = Synthetic coding sequence
atggagggcgctgctgcccctgtggccggggacagaccagacctgggcctgggcgcccctggcagcccccgggaggccgtggccggggccacagctgccctggagcccaggaagccccacggcgtgaagaggcaccaccacaagcacaacctgaagcacagatatgagctgcaggagaccctgggcaagggcacctacggcaaggtgaagagggccacagagcgcttcagcggccgggtggtggccatcaagagcatcaggaaggacaagatcaaggatgagcaggacatggtgcacatcagaagagaaattgagatcatgagcagcctgaaccacccccacatcatcagcatctatgaggtgtttgagaacaaggacaagatcgtcatcatcatggagtatgccagcaaaggagagctgtatgactacatcagcgagcggcggcggctgtctgagcgggagaccaggcacttcttccggcagatcgtgtctgctgtgcactactgccacaagaatggagtggtgcaccgggacctgaagctggagaacatcctgctggatgacaactgcaacatcaagattgctgactttggcctgagcaacctgtaccagaaggacaagttcctgcagaccttctgtggcagccccctgtatgccagccctgagatcgtgaatggccggccctaccggggccctgaggtggacagctgggccctgggcgtgctgctgtacaccctggtgtatggcaccatgccctttgatggctttgaccacaagaacctgatccggcagatcagcagtggagagtaccgggagcccacccagcccagtgatgcccggggcctcatccgctggatgctgatggtgaacccagacagaagagccaccatcgaggacatcgccaaccactggtgggtgaactggggctacaagagctctgtgtgtgactgtgatgccctgcatgattctgagagccccctgctggcccgcatcatcgactggcaccacaggagcacaggcctgcaggccgacacagaggccaagatgaagggcctggccaagcccaccaccagcgaggtgatgctggagcggcagaggagcctgaagaagagcaagaaggaaaatgactttgcccagagcggccaggatgctgtgcctgagagccccagcaagctgagcagcaagaggcccaagggcatcctgaagaagaggagcaacagcgagcacaggagccacagcacaggcttcattgaaggagtggtgggccctgccctgcccagcaccttcaagatggagcaggacctgtgcaggactggagtgctgctgcccagcagccctgaggccgaggtgcctgggaagctgagccccaagcagagcgccaccatgcccaagaagggcatcctgaagaagacccagcagcgggagagcggctactacagcagccctgagaggtctgagagcagcgagctgctggacagcaatgatgtgatgggcagcagcatccccagccccagccccccagaccctgcccgggtgaccagccacagcctgagctgcaggaggaagggcatcctgaagcacagcagcaagtacagcgctggcaccatggaccctgccctggtgtccccagagatgcccaccctggagagcctgtctgagcccggggtgcctgctgagggcctgagccgcagctacagccggcccagcagcgtcatcagtgatgacagcgtgctgagcagtgacagctttgacctgctggacctgcaggagaacagacctgcccggcagaggatccgcagctgtgtgtctgctgagaacttcctgcagatccaggactttgagggcctgcagaaccggccccggccccagtacctgaagcgctacagaaaccggctggccgacagcagcttcagcctgctgacagacatggatgatgtgacccaggtgtacaagcaggccctggagatctgcagcaagctgaactag

SEQ ID NO: 18443 - DNA, 603 bp, synthetic construct
  source 1..603: mol_type = other DNA; note = Synthetic coding sequence
atggccaacattgctgtgcagaggatcaagcgggagttcaaggaggtgctgaagtctgaggagaccagcaagaaccagatcaaggtggacctggtggatgagaacttcacagagctgcggggggagattgctggccccccagacaccccctatgaaggaggccgctaccagctggagatcaagatccctgagacctaccccttcaacccccccaaggtgcgcttcatcaccaagatctggcaccccaacatcagctctgtgactggagccatctgcctggacatcctgaaggaccagtgggccgccgccatgaccctgaggacagtgctgctgagcctgcaggccctgctggccgctgctgagccagatgacccccaggatgctgtggtggccaaccagtacaagcagaaccctgagatgttcaagcagacagcccggctgtgggcccacgtgtatgctggggcccctgtgagcagccctgagtacaccaagaagattgagaacctgtgtgccatgggctttgacagaaatgctgtgattgtggccctgagcagcaagtcctgggatgtggagacagccacagagctgctgctgagcaactag

SEQ ID NO: 18444 - DNA, 5313 bp, synthetic construct
  source 1..5313: mol_type = other DNA; note = Synthetic coding sequence
atgcccaggaggaggaagaacctgggcggcaaccccttcaggaagacagccaaccccaaggaggtggtggtgtcctctgtggccagccgggaggagcccaccaccaccctgcccagcatgggagagaccaaggtggaccaggaggagctgttcaccagcatcagcgagatcttcagtgacctggaccctgatgtggtgtacctgatgctgtctgaatgtgacttcaaggtggagaatgccatggactgcctgctggagctgagcgccacagacaccaagattgaggagagcagcagccagagctttgtggccagcgagaaccaggtgggcgctgctgagagcaagatcatggagaagaggcctgaggaggagagcgaggacagcaagatggacagcttcctggacatgcagctgacagaggacctggacagcctcatccagaatgcctttgagaagctgaacagcagcccagatgaccaggtgtacagcttcctgcccagccaggatgtgaacagcttcaatgacagcagcgagttcatcaacccagacagcagcaacatgacccccatcttcagcacccagaacatgaacctgaatggagagaacctggagaacagcggcagcaccctgagcctgaaccccctgcccagccacagcgtgctgaatgaaagcaagtgcttcatcaaggacaacaccctggccctggagagcaactacccagaggacagcctgctgagcagcagcctgaatgtggccagtgacagcattgctggctgcagcagcctgaaccagaagcagaaggagctgctggagagtgaatgtgtggaggcccagttcagcgaggcccctgtggacctggatgccagcgagccccaggcctgcctgaacctgcccggcctggacctgcccggcactggaggagaccagaagagcaccagggtgtctgatgtgttcctgcccagcgagggcttcaacttcaagccccacaagcaccctgagctgcccaccaagggcaaggatgtgtcctactgccctgtgctggcccccctgcccctgctgctgcccccacctcctcctccacccatgtggaaccccatgatcccagcctttgacctcttccagggcaaccacggctttgtggcccctgtggtgaccacagctgcccactggaggtctgtgaactacaccttcccccccagcgtcatcagccacaccagccccaccaaggtgtggaggaacaaggatggcaccagcgcctaccaggtgcaggagacccctgtgtcccaggtggtgaggaagaagaccagctatgtgggcctggtgctggtgctgctgcggggcctgcccggcagcggcaagagcttcctggcccggaccctgcaggaggacaaccccagcggggtcatcctgagcacagatgactacttctacatcaatggccagtaccagtttgatgtgaagtacctgggggaggcccacgagtggaaccagaacagagccaaggaggcctttgagaagaagatcagccccatcatcatcgacaacaccaacctgcaggcctgggagatgaagccctacgtggccctgagccagaagcacaagtacaaggtgctcttccgggagccagacacctggtggaagttcaagcccaaggagctggcccggaggaacatccatggagtgtccaaggagaagatcaccaggatgctggagcactaccagagatttgtgtctgtgcccatcatcatgagcagctctgtgcctgagaagattgagcgcatcgagctgtgtgcctacagctgtgaggacaggagcaccagccccagagatgatgaggacatcatcagcgagaaggaggagaacatcctgagcctgagcctgaagcacctggagttcacagaggagaagaacctggatgtgaccaaggagaccatgctgcctgaaaatgtggcctacctgagcaatgctgacctgaacaagaggaggaaggagatcagtgacatgaaccccagcatccagagcgccctgatcctggagaccccccacatgtacttcagtgacagcgagagcaagctgcaggccacagacaagtcagaaaatgagcagatcgagatggtggccgtgaagggctacagcaagacagacacagacagctccatggagcgggtgagccccagcacctgctgcagcgagaacaaccaggaggactgtgacctggccaacagcggccccctgcagaatgagaagagcagccctggagaaattgtggaggagcgggccaccgtgaccaagaaggccttcggcaagcagaagagcaagagcaccctggagaagttccccaggcatgagctgagcaactttgtgggggactggcctgtggacaagaccatcggccagaggaccaagaggaacaggaagacagagaagaccagctctgtgcagagcgacaagaagtacaactacccccagagccacaagctggtgaacagcgtgtctgtgaacacagactgtgtgcagcagaggggcagcccccatgaatctgtggaggatggcaggaagagccagtgtgatgatgccagcgagcccctgaacagctacaagtatgatgcctacaagaacatcgacaagaacagcttcaacatcatgggagactggcccagcagtgacagcctggcccagcgggagcacaggagcaggatgcccaagacaggcctgtctgagcccaacctggagatcggcaccaatgacaagatgaatgagatcagcctgagcacagcccacgaggcctgctggggcaccagcagccagaagctgaagaccctgggcagcagcaacctgggcagcagcgagatgctgctgtctgagatgacctgtgagagccagacctgcctgagcaagaagagccacggccagcacaccagcctgcccctgaccttcaccaacagcgcccccaccgtgtctggagtggtggagccccagaccctggccgagtgccaggagcagatgcccaagagggaccccgggaaggaggtgggcatgtgcacccagacagagccccaggactttgccctgctgtggaagattgagaagaacaagatcagcatcagtgacagcatcaaggtgctgaccggccgcctggatggcttcaagcccaaggtgttcaacatcaacaccaagagtgatgtgcaggaggccatcccctacagagtgatgtatgacaagagcacctttgtggaggagagcgagctgaccagcgcagatgaaagtgagaacctgaacatcctgtgcaagctgtttggcagcttcagcctggaggccctgaaggacctgtatgagcgctgcaacaaggacatcatctgggccaccagcctgctgctggacagcgagaccaagctgtgtgaggacacagaatttgagaacttccagaagagctgtgatggcagccagatcggccccttcagcctgggcctgaacctgaaggagatcatcagccagaggggcaccctggagaacagcaacagccctgtgcctgagttcagccatggaattggcatcagcaatgctgacagccagagcacctgtgatgctgagcggggcaacagcgagcaggccgagatgagagctgtgaccccagagaaccacgagagcatgaccagcatcttccccagcgctgctgtgggcctgaagaacaacaatgacatcctgcccaacagccaggaggagctgctgtacagcagcaagcagagcttccctggcatcctgaaggccaccacccccaaggacatgtctgaaacagagaagaacctggtggtgacagagaccggggacaacatccacagccccagccacttcagtgacatcttcaactttgtgagcagcaccagcaacctggagctgaatgaggagatctacttcacagacagcctggagatcaagagaaatgaaaacttccccaaggactatgtgaagttcagtgatgaggaggagttcatgaatgaagatgagaaggagatgaaggagatcctgatggccggcagcagcctgtctgctggggtgtctggagaggacaagacagagatcctgaaccccaccccagccatggccaagagcctgaccatcgactgcctggagctggccctgcccccagagctggccttccagctgaatgagctgtttggacctgtgggcattgattctggcagcctgactgtggaggactgtgtggtgcacatcgacctgaacctggccaaggtgatccacgagaagtggaaggagagcgtgatggagcggcagaggcaggaggaggtgtcctgtgggaagttcatgcaggaccccagcctggtgggccacacaggcctggacaaccctgagcagaagagcagccagaggacaggcaagaagctgctgaagaccctgacagccagcgagatgctgcccctgctggaccactggaacacccagaccaagaaggtgtccctgcgggagatcatgtctgaggagatcgccctgcaggagaagcacaacctgaagcgggagaccctgatgtttgagaaggactgtgccaccaagctgaaggagaagcagctgttcaagatcttccctgccatcaaccagaacttcctggtggacatcttcaaggaccacaactacagcctggagcacacagtgcagttcctgaactgtgtgctggagggggaccctgtgaagacagtggtggcccaggagtttgtgcaccagaatgaaaatgtgaccagccacacaggccagaagagcaaggagaagaagcccaagaagctgaaggagacagaggagaccccatctgagctgtccttccaggactttgagtacccagactatgatgactacagagctgaggccttcctgcaccagcagaagaggatggagtgctacagcaaggccaaggaggcctaccgcatcggcaagaagaatgtggccaccttctacgcccagcagggcaccctgcacgagcagaagatgaaggaggccaaccacctggccgccatcgagatctttgagaaggtgaatgccagcctgctgccccagaatgtgctggacctgcacggcctgcacgtggatgaggccctggagcacctgatgagggtgctggagaagaagacagaggagttcaagcagaatggaggcaagccctacctgagcgtcatcaccggccggggcaaccacagccagggcggcgtggcccgcatcaagccagctgtgatcaagtacctgatcagccacagcttccgcttcagcgagatcaagccaggctgcctgaaggtgatgctgaagtag

SEQ ID NO: 18445 - DNA, 1362 bp, synthetic construct
  source 1..1362: mol_type = other DNA; note = Synthetic coding sequence
atggactggaaggaggtgctgcggcggcggctggccacccccaacacctgccccaacaagaagaagtctgagcaggagctgaaggatgaggagatggacctcttcaccaagtactacagcgagtggaagggcggcaggaagaacaccaatgagttctacaagaccatcccccgcttctactaccgcctgcctgcagaagatgaggtgctgctgcagaagctgcgggaggagagcagagctgtgttcctgcagaggaagagccgggagctgctggacaatgaggagctgcagaacctgtggttcctgctggacaagcaccagaccccacccatgattggagaggaggccatgatcaactatgagaacttcctgaaggtgggggagaaggccggggccaagtgcaagcagttcttcaccgccaaggtgtttgccaagctgctgcacacagacagctatggccgcatcagcatcatgcagttcttcaactacgtgatgaggaaggtgtggctgcaccagaccagaattggcctgagcctgtatgatgtggccggccagggctacctgcgggagagtgacctggagaactacatcctggagctgatccccaccctgccccagctggatggcctggagaagagcttctacagcttctacgtgtgcacagctgtgaggaagttcttcttcttcctggaccccctgaggacaggcaagatcaagatccaggacatcctggcctgcagcttcctggatgacctgctggagctgagagatgaggagctgagcaaggagagccaggagaccaactggttcagcgcccccagcgccctgcgggtgtatggccagtacctgaacctggacaaggaccacaacggcatgctgagcaaggaggagctgagccgctatggaacagccaccatgaccaacgtgttcctggacagagtcttccaggagtgcctgacctatgatggagagatggactacaagacctacctggactttgtgctggccctggagaacaggaaggagcctgctgccctgcagtacatcttcaagctgctggacatcgagaacaagggctacctgaatgtgttcagcctgaactacttcttccgggccatccaggagctgatgaagatccacggccaggaccctgtgtccttccaggatgtgaaggatgagatctttgacatggtgaagcccaaggaccccctgaagatcagcctgcaggacctgatcaacagcaaccagggcgacacagtgaccaccatcctgattgacctgaatggcttctggacctatgagaaccgggaggccctggtggccaatgacagtgaaaattctgctgacctggatgacacctag

SEQ ID NO: 18446 - DNA, 3348 bp, synthetic construct
  source 1..3348: mol_type = other DNA; note = Synthetic coding sequence
atgcctgaggaccaggtgggcaagctggaggccacagagaacaccatcagcgccatggctgctgctgctgctgagcagcagcagttctacctgctgctgggcaacctgctgagcccagacaacgtggtgaggaagcaggccgaggagacctatgagaacatccctggccagagcaagatcaccttcctgctgcaggccatccggaacaccacagctgctgaggaggcccggcagatggctgctgtgctgctgcggcggctgctgagcagcgcctttgatgaggtgtacccagccctgcccagtgatgtgcagacagccatcaagtctgagctgctgatgatcatccagatggagacccagagctccatgaggaagaaggtgtgtgacattgctgctgagctggccaggaacctgattgatgaagatggcaacaaccagtggccagagggcctgaagttcctgtttgattctgtgagcagccagaatgtgggcctgcgggaggccgccctgcacatcttctggaacttccctggcatcttcggcaaccagcagcagcactacctggatgtgatcaagaggatgctggtgcagtgcatgcaggaccaggagcaccccagcatccgcaccctgagcgcccgggccacagctgccttcatcctggccaatgagcacaacgtggccctcttcaagcactttgctgacctgctgcccggcttcctgcaggccgtgaatgacagctgctaccagaatgatgattctgtgctgaagagcctggtggagattgctgacacagtgcccaagtacctgcggccccacctggaggccaccctgcagctgagcctgaagctgtgtggggacaccagcctgaacaacatgcagaggcagctggccctggaggtgattgtgaccctgtctgaaacagctgctgccatgctgaggaagcacaccaacatcgtggcccagaccatcccccagatgctggccatgatggtggacctggaggaggatgaggactgggccaatgctgatgagctggaggatgatgactttgacagcaatgctgtggccggggagagcgccctggacaggatggcctgtggcctgggcggcaagctggtgctgcccatgatcaaggagcacatcatgcagatgctgcagaacccagactggaagtacagacatgctggcctgatggccctgagcgccatcggggagggctgccaccagcagatggagggcatcctgaatgagatcgtgaactttgtgctgctcttcctgcaggacccccacccccgggtgcgctatgctgcctgcaatgctgtgggccagatggccacagactttgcccctggcttccagaagaagttccacgagaaggtgattgctgccctgctgcagaccatggaggaccagggcaaccagagggtgcaggcccacgccgccgccgccctgatcaacttcacagaggactgccccaagagcctgctgatcccctacctggacaacctggtgaagcacctgcacagcatcatggtgctgaagctgcaggagctgatccagaagggcaccaagctggtgctggagcaggtggtgaccagcatcgcctctgtggccgacacagctgaggagaagtttgtgccctactatgacctcttcatgcccagcctgaagcacatcgtggagaatgctgtgcagaaggagctgcggctgctgcggggcaagaccatcgagtgcatcagcctcatcggcctggccgtgggcaaggagaagttcatgcaggatgccagtgatgtgatgcagctgctgctgaagacccagacagacttcaatgacatggaggatgatgacccccagatctcctacatgatcagcgcctgggccaggatgtgcaagatcctgggcaaggagttccagcagtacctgcctgtggtgatgggccccctgatgaagacagccagcatcaagccagaggtggccctgctggacacccaggacatggagaacatgtctgatgatgatggctgggagtttgtgaacctgggggaccagcagagctttggcatcaagacagctggcctggaggagaagagcacagcctgccagatgctggtgtgctacgccaaggagctgaaggagggctttgtggagtacacagagcaggtggtgaagctgatggtgcccctgctgaagttctacttccatgatggagtgcgggtggccgctgctgagagcatgcccctgctgctggagtgtgcccgggtgcggggccctgagtacctgacccagatgtggcacttcatgtgtgatgccctgatcaaggccatcggcacagagccagacagtgatgtgctgtctgagatcatgcacagctttgccaagtgcatcgaggtgatgggagatggctgcctgaacaatgagcactttgaggagctgggcggcatcctgaaggccaagctggaggagcacttcaagaaccaggagctgcggcaggtgaagaggcaggatgaggactatgatgagcaggtggaggagagcctgcaggatgaagatgacaatgatgtgtacatcctgaccaaggtgtctgacatcctgcacagcatcttcagcagctacaaggagaaggtgctgccctggtttgagcagctgctgcccctcatcgtgaacctgatctgcccccaccggccctggccagaccggcagtggggcctgtgcatctttgatgatgtgattgagcactgcagccctgccagcttcaagtatgcagagtacttcctgcggcccatgctgcagtatgtgtgtgacaacagccctgaggtgcggcaggccgccgcctacggcctgggcgtgatggcccagtatggaggagacaactaccggcccttctgcacagaggccctgcccctgctggtgcgggtcatccagagcgctgacagcaagaccaaggaaaatgtgaatgccacagagaactgcatctctgctgtgggcaagatcatgaagttcaagccagactgtgtgaatgtggaggaggtgctgccccactggctgtcctggctgcccctgcacgaggacaaggaggaggccgtgcagaccttcaactacctgtgtgacctgattgagagcaaccaccccatcgtgctgggccccaacaacaccaacctgcccaagatcttcagcatcatcgccgagggggagatgcatgaggccatcaagcatgaggacccctgtgccaagaggctggccaacgtggtgcggcaggtgcagaccagcggcggcctgtggacagaatgtattgcccagctgagccctgagcagcaggccgccatccaggagctgctgaacagcgcctag

SEQ ID NO: 18447 - DNA, 1929 bp, synthetic construct
  source 1..1929: mol_type = other DNA; note = Synthetic coding sequence
atgaagaggagctctgtgagcagcggcggggccggccgcctgtccatgcaggagctgcggagccaggatgtgaacaagcagggcctgtacaccccccagaccaaggagaagcccaccttcggcaagctgagcatcaacaagcccaccagcgagaggaaggtgtccctgtttgggaagaggaccagcggccacggcagcaggaacagccagctgggcatcttcagcagcagcgagaagatcaaggacccccggcccctgaatgacaaggccttcatccagcagtgcatccggcagctgtgtgagttcctgacagaaaatggctacgcccacaacgtgtccatgaagagcctgcaggcccccagcgtgaaggacttcctgaagatcttcaccttcctgtatggcttcctgtgccccagctatgagctgcctgacaccaagtttgaggaggaggtgccccgcatcttcaaggacctgggctacccctttgccctgagcaagagctccatgtacacagtgggcgccccccacacctggccccacatcgtggccgccctggtgtggctgattgactgcatcaagatccacacagccatgaaggagagcagccccctgtttgatgatggccagccctggggcgaggagacagaagatggcatcatgcacaacaagctgttcctggactacaccatcaagtgctatgagagcttcatgtctggagctgacagctttgatgagatgaatgctgagctgcagagcaagctgaaggacctcttcaacgtggatgccttcaagctggagagcctggaggccaagaacagagccctgaatgagcagatcgcccggctggagcaggagcgggagaaggagcccaaccggctggagagcctgaggaagctgaaggccagcctgcagggagatgtgcagaagtaccaggcctacatgagcaacctggagagccacagcgccatcctggaccagaagctgaatggcctgaatgaggagatcgcccgggtggagctggagtgtgagaccatcaagcaggagaacacccggctgcagaacatcatcgacaaccagaagtacagcgtggccgacatcgagcgcatcaaccatgaaagaaatgagctgcagcagaccatcaacaagctgaccaaggacctggaggccgagcagcagaagctgtggaatgaggagctgaagtatgcccggggcaaggaggccatcgagacccagctggccgagtaccacaagctggccaggaagctgaagctgatccccaagggagctgagaacagcaagggctatgactttgagatcaagttcaaccctgaggccggggccaactgcctggtgaagtaccgggcccaggtgtatgtgcccctgaaggagctgctgaatgaaacagaggaggagatcaacaaggccctgaacaagaagatgggcctggaggacaccctggagcagctgaatgccatgatcacagagagcaagaggtctgtgaggaccctgaaggaggaggtgcagaagctggatgacctgtaccagcagaagatcaaggaggccgaggaggaggatgagaagtgtgccagcgagctggagagcctggagaagcacaagcacctgctggagagcacagtgaaccagggcctgtctgaggccatgaatgagctggatgctgtgcagcgggagtaccagctggtggtgcagaccaccacagaggagaggaggaaggtgggcaacaacctgcagaggctgctggagatggtggccacccacgtgggctctgtggagaagcacctggaggagcagatcgccaaggtggaccgggagtatgaggagtgcatgtctgaggacctgtctgagaacatcaaggagatccgggacaagtatgagaagaaggccaccctcatcaagagcagcgaggagtag

SEQ ID NO: 18448 - DNA, 4770 bp, synthetic construct
  source 1..4770: mol_type = other DNA; note = Synthetic coding sequence
atgagcctgcccttctaccagcgctgccaccagcactatgacctgagctacagaaacaaggatgtgcgcagcacagtgagccactaccagcgggagaagaagaggtctgctgtgtacacccagggcagcacagcctacagcagccgcagcagcgctgcccacagaagagagagcgaggccttccggcgggccagcgccagcagcagccagcagcaggccagccagcacgccctgagcagcgaggtgtccaggaaggccgccagcgcctatgactatggcagcagccacggcctgacagacagcagcctgctgctggatgactacagcagcaagctgagccccaagcccaagagggccaagcacagcctgctgtctggagaggagaaggagaacctgcccagcgactacatggtgcccatcttcagcggccggcagaagcacgtgtctggcatcacagacacagaggaggagcgcatcaaggaggccgccgcctacatcgcccagaggaacctgctggccagcgaggagggcatcaccaccagcaagcagagcacagccagcaagcagaccacagccagcaagcagagcacagccagcaagcagagcacagccagcaagcagagcacagccagccggcagagcacagccagccggcagagcgtggtgtccaagcaggccaccagcgccctgcagcaggaggagaccagcgagaagaagagcaggaaggtggtgatccgggagaaggccgagcggctgagcctgaggaagaccctggaggagacagagacctaccacgccaagctgaatgaagaccacctgctgcacgcccctgagttcatcatcaagcccaggagccacacagtgtgggagaaggaaaatgtgaagctgcactgcagcattgctggctggccagagccccgggtgacctggtacaagaaccaggtgcccatcaacgtgcacgccaaccctgggaagtacatcatcgagagccgctatggcatgcacaccctggagatcaatggctgtgactttgaggacacagcccagtaccgggccagcgccatgaatgtgaagggggagctgagcgcctatgcctctgtggtggtgaagcgctacaagggggagtttgatgagacccgcttccacgccggggccagcaccatgcccctgagctttggagtgaccccctacggctacgccagcagatttgagatccactttgatgacaagtttgatgtgtcctttggccgggagggggagaccatgagcctgggctgccgggtggtgatcaccccagagatcaagcacttccagcctgagatccagtggtacagaaatggagtgcccctgagccccagcaagtgggtgcagaccctgtggagcggggagcgggccaccctgaccttcagccacctgaacaaggaggatgagggcctgtacaccatccgggtgaggatgggagagtactatgagcagtacagcgcctacgtgtttgtgagagatgctgatgctgagattgagggcgccccagctgcccccctggatgtgaagtgcctggaggccaacaaggactacatcatcatctcctggaagcagcctgctgtggatggcggcagccccatcctgggctacttcatcgacaagtgtgaggtgggcacagacagctggagccagtgcaatgacacccctgtgaagtttgcccgcttccctgtgacaggcctgattgagggccgcagctacatcttccgggtgcgggctgtgaacaagatgggcatcggcttccccagccgggtgtctgagcctgtggccgccctggaccctgctgagaaggcccggctgaagagccggcccagcgccccctggacaggccagatcatcgtgacagaggaggagcccagcgagggcatcgtgcccggccccccaacagacctgtctgtgacagaggccaccaggagctatgtggtgctgtcctggaagcccccaggccagaggggccacgagggcatcatgtactttgtggagaagtgtgaggccggcacagagaactggcagagggtgaacacagagctgcctgtgaagagccccaggtttgccctgtttgacctggccgagggcaagagctactgcttccgggtgcgctgcagcaacagcgctggggtgggggagcccagcgaggccacagaggtgacagtggtgggggacaagctggacatccccaaggcccctgggaagatcatccccagcaggaacacagacacctctgtggtggtgtcctgggaggagagcaaggatgccaaggagctggtgggctactacatcgaggcctctgtggccggcagcggcaagtgggagccctgcaacaacaaccctgtgaagggcagccgcttcacctgccacggcctggtgacaggccagagctacatcttccgggtgcgggctgtgaatgctgctggcctgtctgagtacagccaggacagcgaggccatcgaggtgaaggccgccatcgccccacccagccccccctgtgacatcacctgcctggagagcttccgggacagcatggtgctgggctggaagcagcctgacaagattggaggagctgagatcaccggctactacgtgaactaccgggaggtgattgatggagtgcctgggaagtggagggaggccaacgtgaaggctgtgtctgaggaggcctacaagatcagcaacctgaaggagaacatggtgtaccagttccaggtggccgccatgaacatggccggcctgggcgcccccagcgctgtgtctgagtgcttcaagtgtgaggagtggaccatcgctgtgcccggccccccccacagcctgaagtgcagcgaggtgaggaaggacagcctggtgctgcagtggaagccccctgtgcacagcggccgcacccctgtgacaggctactttgtggacctgaaggaggccaaggccaaggaggaccagtggaggggcctgaatgaagctgccatcaagaatgtgtacctgaaggtgcggggcctgaaggagggcgtgtcctatgtgttccgggtgcgggccatcaaccaggccggcgtgggcaagcccagcgacctggccggccctgtggtggccgagaccaggcctggcaccaaggaggtggtggtgaatgtggatgatgatggagtcatcagcctgaactttgaatgtgacaagatgacccccaagtctgagttctcctggagcaaggactatgtgtccacagaggacagcccccggctggaggtggagagcaaaggaaacaagaccaagatgaccttcaaggacctgggcatggatgacctgggcatctacagctgtgatgtgacagacacagatggcatcgccagcagctacctgattgatgaggaggagctgaagaggctgctggccctgagccatgagcacaagttccccaccgtgcctgtgaagtctgagctggccgtggagatcctggagaagggccaggtgcgcttctggatgcaggccgagaagctgtctggaaatgccaaggtgaactacatcttcaatgagaaggagatctttgagggccccaagtacaagatgcacatcgacaggaacacaggcatcatcgagatgttcatggagaagctgcaggatgaagatgagggcacctacaccttccagctgcaggacggcaaggccaccaaccacagcacagtggtgctggtgggagatgtgttcaagaagctgcagaaggaggccgagttccagaggcaggagtggatcaggaagcagggcccccactttgtggagtacctgtcctgggaggtgactggagaatgtaatgtgctgctgaagtgcaaggtggccaacatcaagaaggagacccacatcgtgtggtacaaggatgagcgggagatctctgtggatgagaagcatgacttcaaggatggcatctgcaccctgctgatcacagagttcagcaagaaggatgctggcatctatgaggtgatcctgaaggatgaccggggcaaggacaagagccggctgaagctggtggatgaggccttcaaggagctgatgatggaggtgtgcaagaagatcgccctgagcgccacagacctgaagatccagagcacagctgagggcatccagctgtacagctttgtgacctactacgtggaggacctgaaggtgaactggagccacaatggaagtgccatccgctacagcgacagagtgaagacaggagtgactggagagcagatctggctgcagatcaatgagcccaccccaaatgacaagggcaagtatgtgatggagctgtttgatggcaagacaggccaccagaagacagtggacctgagcggccaggcctatgatgaggcctatgcagagttccagaggctgaagcaggccgccatcgccgagaagaacagagcccgggtgctgggcggcctgcctgatgtggtgaccatccaggagggcaaggccctgaacctgacctgcaatgtgtggggagaccccccacctgaggtgtcctggctgaagaatgagaaggccctggccagtgatgaccactgcaacctgaagtttgaagctggccgcacagcctacttcaccatcaacggggtgtccacagctgacagcggcaagtatggcctggtggtgaagaacaagtatggcagcgagaccagtgacttcaccgtgtctgtgttcatccctgaggaggaggccaggatggccgccctggagagcctgaagggcggcaagaaggccaagtag

SEQ ID NO: 18449 - DNA, 546 bp, synthetic construct
  source 1..546: mol_type = other DNA; note = Synthetic coding sequence
atgggcggcttcttcagcagcatcttcagcagcctgtttggcacccgggagatgaggatcctgatcctgggcctggatggagctgggaagaccaccatcctgtaccgcctgcaggtgggggaggtggtgaccaccatccccaccatcggcttcaacgtggagaccgtgacctacaagaacctgaagttccaggtgtgggacctgggcggccagaccagcatccggccctactggcgctgctactacagcaacacagatgctgtgatctacgtggtggacagctgtgaccgggaccgcatcggcatcagcaagtctgagctggtggccatgctggaggaggaggagctgaggaaggccatcctggtggtgtttgccaacaagcaggacatggagcaggccatgaccagcagcgagatggccaacagcctgggcctgcctgccctgaaggacaggaagtggcagatcttcaagaccagcgccaccaagggcaccggcctggatgaggccatggagtggctggtggagaccctgaagagccggcagtag

SEQ ID NO: 18450 - DNA, 1269 bp, synthetic construct
  source 1..1269: mol_type = other DNA; note = Synthetic coding sequence
atggctgctgctgctgtggtggagttccagagggcccagagcctgctgagcacagaccgggaggccagcattgacatcctgcacagcatcgtgaagagggacatccaggagaatgatgaggaggccgtgcaggtgaaggagcagagcatcctggagctgggcagcctgctggccaagacaggccaggccgctgagctgggcggcctgctgaagtatgtgcggcccttcctgaacagcatcagcaaggccaaggccgcccggctggtgcgcagcctgctggacctcttcctggacatggaggccgccaccggccaggaggtggagctgtgcctggagtgcatcgagtgggccaagtctgagaagaggaccttcctgcggcaggccctggaggcccggctggtgtccctgtactttgacaccaagcgctaccaggaggccctgcacctgggcagccagctgctgcgggagctgaagaagatggatgacaaggccctgctggtggaggtgcagctgctggagagcaagacctaccacgccctgagcaacctgcccaaggcccgggccgccctgaccagcgcccggaccacagccaatgccatctactgcccccccaagctgcaggccaccctggacatgcagagcggcatcatccatgctgctgaggagaaggactggaagacagcctacagctacttctatgaggcctttgagggctatgacagcattgacagccccaaggccatcaccagcctgaagtacatgctgctgtgcaagatcatgctgaacaccccagaagatgtgcaggccctggtgtctgggaagctggccctgcgctatgccggccggcagacagaggccctgaagtgtgtggcccaggccagcaagaacagaagcctggccgactttgagaaggccctgacagactacagagctgagctgagagatgaccccatcatcagcacccacctggccaagctgtatgacaacctgctggagcagaacctgatccgggtgattgagcccttcagccgggtgcagatcgagcacatcagcagcctcatcaagctgagcaaggcagatgtggagaggaagctgagccagatgatcctggacaagaagttccacggcatcctggaccagggcgagggcgtgctgatcatctttgatgagccccctgtggacaagacctatgaagctgccctggagaccatccagaacatgagcaaggtggtggacagcctgtacaacaaggccaagaagctgacctag

SEQ ID NO: 18451 - DNA, 1449 bp, synthetic construct
  source 1..1449: mol_type = other DNA; note = Synthetic coding sequence
atggccagcctgggccctgctgctgctggggagcaggccagcggggctgaggccgagcccggccctgctggccccccacctccacccagccccagcagcctgggccccctgctgcccctgcagcgggagcccctgtacaactggcaggccaccaaggccagcctgaaggagagatttgccttcctgttcaacagcgagctgctgagtgatgtgcgctttgtgctgggcaagggcagaggagctgctgctgctgggggcccccagaggatcccagcccacagatttgtgctggccgccggcagcgctgtgtttgatgccatgtttaatggaggcatggccaccaccagcgctgagattgagctgcctgatgtggagcctgctgccttcctggccctgctgcgcttcctgtacagtgatgaggtgcagatcggccctgagaccgtgatgaccaccctgtacacagccaagaagtatgctgtgcctgccctggaggcccactgtgtggagttcctgaccaagcacctgcgggctgacaatgccttcatgctgctgacccaggcccggctgtttgatgagccccagctggccagcctgtgcctggacaccatcgacaagagcaccatggatgccatctctgctgagggcttcacagacattgatattgacaccctgtgtgctgtgctggagcgggacaccctgagcatccgggagagccggctgtttggagctgtggtgcgctgggccgaggccgagtgccagaggcagcagctgcctgtgacctttggaaacaagcagaaggtgctgggcaaggccctgagcctcatccgcttccccctgatgaccatcgaggagtttgctgctggccctgcccagagcggcatcctgagtgaccgggaggtggtgaacctcttcctgcacttcaccgtgaaccccaagccccgggtggagtacatcgaccggccccgctgctgcctgcggggcaaggagtgctgcatcaaccgcttccagcaggtggagagccgctggggctacagcggcaccagtgaccgcatccgcttcaccgtgaacagacgcatcagcatcgtgggcttcggcctgtatggcagcatccacggccccacagactaccaggtgaacatccagatcattgaatatgagaagaagcagaccctgggccagaatgacaccggcttcagctgtgatggaacagccaacaccttccgggtgatgttcaaggagcccatcgagatcctgcccaacgtgtgctacacagcctgtgccaccctgaagggccctgacagccactacggcaccaagggcctgaagaaggtggtgcatgagaccccagctgccagcaagacagtgttcttcttcttcagcagccctggcaacaacaacggcaccagcattgaagatggccagatccctgagatcatcttctacacctag

SEQ ID NO: 18452 - DNA, 2883 bp, synthetic construct
  source 1..2883: mol_type = other DNA; note = Synthetic coding sequence
atgagccggctgattgtgaagaacctgcccaacggcatgaaggaggagcgcttccggcagctgtttgctgccttcggcaccctgacagactgcagcctgaagttcaccaaggatggcaagttcaggaagtttggcttcatcggcttcaagtctgaggaggaggcccagaaggcccagaagcacttcaacaagagcttcatcgacaccagccgcatcaccgtggagttctgcaagagctttggagaccctgccaagccccgggcctggagcaagcacgcccagaagcccagccagcccaagcagccccccaaggacagcaccaccccagagatcaagaaggatgagaagaagaagaaggtggccggccagctggagaagctgaaggaggacacagagttccaggagttcctgtctgtgcaccagaggcgggcccaggccgccacctgggccaatgatggcctggatgctgagcccagcaagggcaagagcaagccagccagtgactacctgaactttgacagcgacagcggccaggagagcgaggaggagggcgctggggaggacctggaggaggaggccagcctggagcccaaggctgctgtgcagaaggagctgagtgacatggactacctgaagagcaagatggtgaaggccggcagcagcagcagcagcgaggaggaggagagtgaagatgaagctgtgcactgtgatgagggcagcgaggccgaggaggaggacagcagcgccacccctgtgctgcaggagcgggacagcaaaggagctggccaggagcagggcatgcctgctgggaagaagaggcctcctgaggcccgggcagagacagagaagccagccaaccagaaggagcccaccacctgccacacagtgaagctgcggggggcccccttcaacgtgacagagaagaatgtgatggagttcctggcccccctgaagcctgtggccatccgcatcgtgagaaatgcccacggcaacaagacaggctacatctttgtggacttcagcaatgaggaggaggtgaagcaggccctgaagtgcaaccgggagtacatgggcggccgctacatcgaggtgttccgggagaagaatgtgcccaccaccaagggggcccccaagaacaccaccaagtcctggcagggccgcatcctgggagaaaatgaggaggaggaggacctggccgagagcggccgcctgtttgtgaggaacctgccctacaccagcacagaggaggacctggagaagctgttcagcaaatatggccccctgtctgagctgcactaccccatcgacagcctgaccaagaagcccaagggctttgccttcatcaccttcatgtttcctgagcacgctgtgaaggcctacagcgaggtggatggccaggtgttccagggccgcatgctgcacgtgctgcccagcaccatcaagaaggaggcctctgaagatgccagcgccctgggcagcagcagctacaagaagaagaaggaggcccaggacaaggccaacagcgccagcagccacaactggaacaccctcttcatgggccccaatgctgtggctgatgccatcgcccagaagtacaatgccaccaagagccaggtgtttgaccacgagaccaagggctctgtggccgtgcgggtggccctgggggagacccagctggtgcaggaggtgcggcgcttcctgattgacaacggggtgtccctggacagcttcagccaggccgctgctgagaggagcaagacagtcatcctggtgaagaacctgcctgctggcaccctggccgcccagctgcaggagaccttcggccacttcggcagcctgggccgggtgctgctgcctgagggcggcatcacagccatcgtggagttcctggagcccctggaggccaggaaggccttccgccacctggcctacagcaagttccaccacgtgcccctgtacctggagtgggcccctgtgggcgtcttcagcagcacagccccccagaagaagaagctgcaggacaccccatctgagcccatggagaaggaccctgctgagcctgagaccgtgcctgatggagagaccccagaagatgagaaccccacagaggagggcgctgacaacagcagcgccaagatggaggaggaggaggaggaggaggaggaggaggaggagagcctgcccggctgcaccctcttcatcaagaacctgaactttgacaccacagaggagaagctgaaggaggtgttcagcaaggtgggcaccgtgaagagctgcagcatcagcaagaagaagaacaaggccggcgtgctgctgtccatgggcttcggctttgtggagtacaggaagccagagcaggcccagaaggccctgaagcagctgcagggccacgtggtggatggccacaagctggaggtgcgcatcagcgagcgggccaccaagccagctgtgaccctggccaggaagaagcaggtgcccaggaagcagaccaccagcaagatcctggtgaggaacatccccttccaggcccacagccgggagatccgggagctgttcagcacctttggagagctgaagacagtgcggctgcccaagaagatgacaggcaccggcacccaccggggcttcggctttgtggacttcctgaccaagcaggatgccaagagggccttcaatgccctgtgccacagcacccacctgtatggaagaaggctggtgctggagtgggccgacagcgaggtgaccctgcaggccctgcggaggaagacagctgcccacttccacgagccccccaagaagaagaggtctgtggtgctggatgagatcctggagcagctggagggcagtgacagcgacagcgaggagcagaccctgcagctgtag

SEQ ID NO: 18453 - DNA, 2919 bp, synthetic construct
  source 1..2919: mol_type = other DNA; note = Synthetic coding sequence
atggccacccggggccacgtgcaggaccccaatgaccggcggctgcggcccatctatgactacctggacaatggaaacaacaagatggccatccagcaggccgacaagctgctgaagaagcacaaggacctgcactgtgccaaggtgctgaaggccatcggcctgcagaggacaggcaagcaggaggaggccttcaccctggcccaggaggtggccgccctggagcccacagatgacaacagcctgcaggccctgaccatcctgtaccgggagatgcacaggcctgagctggtgaccaagctgtatgaggccgctgtgaagaaggtgcccaacagcgaggagtaccacagccacctgttcatggcctatgcccgggtgggggagtacaagaagatgcagcaggccggcatggccctgtacaagatcgtgcccaagaacccctactacttctggagcgtgatgagcctcatcatgcagagcatcagcgcccaggatgagaacctgagcaagaccatgttcctgcccctggccgagaggatggtggagaagatggtgaaggaggacaagattgaggccgaggccgaggtggagctgtactacatgatcctggagcggctgggcaagtaccaggaggccctggatgtgatccggggcaagctgggggagaagctgaccagcgagatccagagccgggagaacaagtgcatggccatgtacaagaagctgagccgctggccagaatgtaatgccctgagccggcggctgctgctgaagaacagtgatgactggcagttctacctgacctactttgacagcgtcttccggctgattgaggaggcctggagccccccagctgagggggagcacagcctggagggggaggtgcactacagcgctgagaaggctgtgaagttcattgaagatcgcatcacagaggagagcaagagcagccgccacctgcggggcccccacctggccaagctggagctgatccggcggctgcggagccagggctgcaatgatgagtacaagctgggggaccctgaggagctgatgttccagtacttcaagaagtttggagacaagccctgctgcttcacagacctgaaggtgtttgtggacctgctgcctgccacccagtgcaccaagttcatcaaccagctgctgggcgtggtgcccctgagcacccccacagaggacaagctggccctgcctgctgacatccgggccctgcagcagcacctgtgtgtggtgcagctgacccggctgctgggcctgtaccacaccatggacaagaaccagaagctgtctgtggtgcgggagctgatgctgcgctaccagcacggcctggagtttgggaagacctgcctgaagacagagctgcagttcagtgactactactgcctgctggccgtgcacgccctgattgatgtgtggagggagactggagatgagaccaccgtgtggcaggccctgaccctgctggaggagggcctgacccacagccccagcaatgcccagttcaagctgctgctggtgcgcatctactgcatgctgggcgcctttgagcctgtggtggacctgtacagcagcctggatgccaagcacatccagcacgacaccatcggctacctgctgaccaggtatgcagagagcctgggccagtatgctgctgccagccagagctgcaactttgccctgcgcttcttccacagcaaccagaaggacaccagcgagtacatcatccaggcctacaagtatggagcctttgagaagatccctgagttcatcgccttcaggaaccggctgaacaacagcctgcactttgcccaggtgaggacagagaggatgctgctggacctgctgctggaggccaacatcagcaccagcctggccgagagcatcaagtccatgaacctgcggcctgaggaggatgacatcccctgggaggacctgcgggacaacagagacctgaatgtgttcttctcctgggaccccaaggacagagatgtgtctgaggagcacaagaagctgagcctggaggaggagaccctgtggctgcgcatccgcagcctgaccctgcggctcatcagcggcctgcccagcctgaaccaccctgtggagcccaagaacagcgagaagacagcagaaaatggagtgagcagcagaattgacatcctgcggctgctgctgcagcagctggaggccaccctggagaccgggaagcgcttcatcgagaaggacatccagtaccccttcctgggccctgtgcccaccaggatgggcggcttcttcaacagcggctgcagccagtgccagatcagcagcttctacctggtgaatgacatctatgagctggacaccagcggcctggaggacaccatggagatccaggagagaattgagaacagcttcaagagcctgctggaccagctgaaggatgtgttcagcaagtgcaagggggacctgctggaggtgaaggatggcaacctgaagacccaccccaccctgctggagaacctggtgttctttgtggagaccatcagcgtcatcctgtgggtgagcagctactgtgagagcgtgctgcggccctacaagctgaacctgcagaagaagaagaagaagaagaaggagaccagcatcatcatgcctcctgtgttcaccagcttccaggactatgtgacaggcctgcagaccctcatcagcaatgtggtggaccacatcaagggcctggagacccacctgattgccctgaagctggaggagctgatcctggaggacaccagcctgagccctgaggagaggaagttcagcaagacagtgcagggcaaggtgcagagcagctacctgcacagcctgctggagatgggagagctgctgaagaagaggctggagaccaccaagaagctgaagatctag

SEQ ID NO: 18454 - DNA, 2166 bp, synthetic construct
  source 1..2166: mol_type = other DNA; note = Synthetic coding sequence
atggccgagaagtttgagagcctgatgaacatccacggctttgacctgggcagccgctacatggacctgaagcccctgggctgcggcggcaatggcctggtgttttctgctgtggacaatgactgtgacaagagggtggccatcaagaagatcgtgctgacagacccccagagcgtgaagcacgccctgcgggagatcaagatcatccggcggctggaccatgacaacatcgtgaaggtgtttgagatcctgggccccagcggcagccagctgacagatgatgtgggcagcctgacagagctgaacagcgtgtacatcgtgcaggagtacatggagacagacctggccaacgtgctggagcagggccccctgctggaggagcacgcccggctcttcatgtaccagctgctgcggggcctgaagtacatccacagcgccaacgtgctgcaccgggacctgaagccagccaacctcttcatcaacacagaggacctggtgctgaagattggagactttggcctggcccgcatcatggacccccactacagccacaagggccacctgtctgagggcctggtgaccaagtggtaccgcagcccccggctgctgctgagccccaacaactacaccaaggccatcgacatgtgggccgccggctgcatctttgctgagatgctgaccgggaagaccctgtttgctggggcccacgagctggagcagatgcagctgatcctggagagcatccctgtggtgcatgaggaggaccggcaggagctgctgagcgtcatccctgtgtacatcagaaatgacatgacagagccccacaagcccctgacccagctgctgcccggcatcagccgggaggccctggacttcctggagcagatcctgaccttcagccccatggaccggctgacagctgaggaggccctgagccacccctacatgagcatctacagcttccccatggatgagcccatcagcagccaccccttccacattgaagatgaggtggatgacatcctgctgatggatgagacccacagccacatctacaactgggagcgctaccatgactgccagttcagcgagcatgactggcctgtgcacaacaactttgatattgatgaggtgcagctggacccccgggccctgagtgatgtgacagatgaggaggaggtgcaggtggaccccaggaagtacctggatggagaccgggagaagtacctggaggaccctgcctttgacaccaactacagcacagagccctgctggcagtacagcgaccaccacgagaacaagtactgtgacctggagtgcagccacacctgcaactacaagaccaggagcagcagctacctggacaacctggtgtggagggagagcgaggtgaaccactactatgagcccaagctgatcatcgacctgagcaactggaaggagcagagcaaggagaagagtgacaagaagggcaagagcaaatgtgaaagaaatggcctggtgaaggcccagatcgccctggaggaggccagccagcagctggccggcaaggagcgggagaagaaccagggctttgattttgacagcttcatcgccggcaccatccagctgagcagccagcacgagcccacagatgtggtggacaagctgaatgacctgaacagctctgtgtcccagctggagctgaagagcctcatcagcaagtctgtgtcccaggagaagcaggagaagggcatggccaacctggcccagctggaggccctgtaccagagctcctgggacagccagtttgtgtctggaggagaggactgcttcttcatcaaccagttctgtgaggtgaggaaggatgagcaggtggagaaggagaacacctacaccagctacctggacaagttcttcagcaggaaagaagacacagagatgctggagacagagcctgtggaggatggcaagctgggggagcggggccacgaggagggcttcctgaacaacagcggggagttcctgttcaacaagcagctggagagcatcggcatcccccagttccacagccctgtgggcagccccctgaagagcatccaggccaccctgacccccagcgccatgaagagcagcccccagatcccccaccagacctacagcagcatcctgaagcacctgaactag

SEQ ID NO: 18455 - DNA, 948 bp, synthetic construct
  source 1..948: mol_type = other DNA; note = Synthetic coding sequence
atggctgctggggtgccctgtgccctggtgaccagctgcagctctgtgttcagcggggaccagctggtgcagcacatcctgggcacagaggacctgattgtggaggtgaccagcaatgatgctgtgcgcttctacccctggaccatcgacaacaagtactacagcgctgacatcaacctgtgtgtggtgcccaacaagttcctggtgacagctgagattgctgagagcgtgcaggcctttgtggtgtactttgacagcacccagaagagcggcctggacagcgtgtcctcctggctgcccctggccaaggcctggctgcctgaggtgatgatcctggtgtgtgacagagtgtctgaagatggcatcaaccggcagaaggcccaggagtggtgcatcaagcacggctttgagctggtggagctgagccctgaggagctgcctgaagaagatgatgacttccctgagagcactggagtgaagagaattgtgcaggccctgaatgccaacgtgtggagcaatgtggtgatgaagaatgacaggaaccagggcttcagcctgctgaacagcctgaccggcaccaaccacagcatcggcagcgctgacccctgccaccctgagcagccccacctgcctgctgctgacagcacagagagcctgagtgaccaccggggcggggccagcaacaccacagatgcccaggtggacagcatcgtggaccccatgctggacctggacatccaggagctggccagcctgaccaccggcggcggagatgtggagaactttgagcggctcttcagcaagctgaaggagatgaaggacaaggccgccaccctgccccatgagcagaggaaggtgcacgccgagaaggtggccaaggccttctggatggccatcggcggggacagagatgaaattgagggcctgagcagtgatgaggagcactag

SEQ ID NO: 18456 - DNA, 1338 bp, synthetic construct
  source 1..1338: mol_type = other DNA; note = Synthetic coding sequence
atggccgcccctgaggagcgggacctgacccaggagcagacagagaagctgctgcagttccaggacctgaccggcatcgagagcatggaccagtgccgccacaccctggagcagcacaactggaacattgaagctgctgtgcaggaccggctgaatgagcaggagggcgtgcccagcgtcttcaaccccccacccagccggcccctgcaggtgaacacagctgaccaccgcatctacagctatgtggtgtcccggccccagccccggggcctgctgggctggggctactacctgatcatgctgcccttccgcttcacctactacaccatcctggacatcttccgctttgccctgcgcttcatccggccagaccccaggagccgggtgacagatcctgtgggggacatcgtgtccttcatgcacagctttgaggagaagtatggccgggcccaccctgtgttctaccagggcacctacagccaggccctgaatgatgccaagcgggagctgcgcttcctgctggtgtacctgcatggagatgaccaccaggacagtgatgagttctgcaggaacaccctgtgtgcccctgaggtgatcagcctcatcaacaccaggatgctgttctgggcctgcagcaccaacaagccagagggctacagagtgtcccaggccctgcgggagaacacctaccccttcctggccatgatcatgctgaaggacaggaggatgacagtggtgggccgcctggagggcctcatccagccagatgacctgatcaaccagctgaccttcatcatggatgccaaccagacctacctggtgtctgagcggctggagcgggaggagaggaaccagacccaggtgctgcggcagcagcaggatgaggcctacctggccagcctgcgggctgaccaggagaaggagaggaagaagcgggaggagcgggagaggaagaggaggaaggaggaggaggtgcagcagcagaagctggccgaggagcggcggcggcagaacctgcaggaggagaaggagaggaagctggagtgcctgcccccagagcccagcccagatgatcctgagagcgtgaagatcatcttcaagctgcccaatgacagccgggtggagcggcgcttccacttcagccagagcctgaccgtcatccatgacttcctgttcagcctgaaggagagccctgagaagttccagatcgaggccaacttccccaggagagtgctgccctgcatccccagcgaggagtggcccaacccccccaccctgcaggaggccggcctgagccacacagaggtgctgtttgtgcaggacctgacagatgaatag

SEQ ID NO: 18457 - DNA, 2724 bp, synthetic construct
  source 1..2724: mol_type = other DNA; note = Synthetic coding sequence
atggccaccccagaccagaagagccccaacgtgctgctgcagaacctgtgctgccgcatcctgggccgctctgaggctgatgtggcccagcagttccagtatgctgtgcgggtgattggcagcaactttgcccccaccgtggagagagatgagttcctggtggccgagaagatcaagaaggagctgatccggcagaggcgggaggctgatgctgccctcttcagcgagctgcacaggaagctgcacagccagggcgtgctgaagaacaagtggagcatcctgtacctgctgctgagcctgtctgaggacccccggcggcagcccagcaaggtgtcctcctatgccaccctgtttgcccaggccctgcccagagatgcccacagcaccccctactactatgcccggccccagaccctgcccctgagctaccaggacagaagtgcccagagcgcccagagcagcggctctgtgggcagcagcggcatcagcagcatcggcctgtgtgccctgagcggccctgccccagccccccagagcctgctgcccggccagagcaaccaggcccctggggtgggggactgcctgcggcagcagctgggcagccggctggcctggaccctgacagccaaccagcccagcagccaggccaccaccagcaagggcgtgcccagcgctgtgtccaggaacatgaccaggagccggcgggagggggacacaggaggcaccatggagatcacagaggccgccctggtgcgggacatcctgtatgtgttccagggcattgatggcaagaacatcaagatgaacaacacagagaactgctacaaggtggagggcaaggccaacctgagccgcagcctgcgggacacagctgtgcggctgtctgagctgggctggctgcacaacaagatccgccgctacacagaccagaggagcctggacaggagctttggcctggtgggccagagcttctgtgccgccctgcaccaggagctgcgggagtactaccgcctgctgtctgtgctgcacagccagctgcagctggaggatgaccagggcgtgaacctgggcctggagagcagcctgaccctgcggcggctgctggtgtggacctatgaccccaagatccggctgaagaccctggccgccctggtggaccactgccagggcaggaagggcggggagctggccagcgctgtgcacgcctacaccaagacaggagacccctacatgaggagcctggtgcagcacatcctgagcctggtgagccaccctgtgctgtccttcctgtaccgctggatctatgatggagagctggaggacacctaccacgagttctttgtggccagtgaccccaccgtgaagacagaccggctgtggcatgacaagtacaccctgaggaagtccatgatccccagcttcatgaccatggaccagagcaggaaggtgctgctgattggcaagagcatcaacttcctgcaccaggtgtgccacgaccagacccccaccaccaagatgattgctgtgaccaagtctgctgagagcccccaggatgctgctgacctcttcacagacctggagaatgccttccagggcaagattgatgctgcctactttgagaccagcaagtacctgctggatgtgctgaacaagaagtacagcctgctggaccacatgcaggccatgaggcgctacctgctgctgggccagggcgacttcatccgccacctgatggacctgctgaagccagagctggtgcggcctgccaccaccctgtaccagcacaacctgaccggcatcctggagacagctgtgcgggccaccaatgcccagtttgacagccctgagatcctgcggcggctggatgtgcggctgctggaggtgtcccctggggacaccggctgggatgtgttcagcctggactaccacgtggatggccccatcgccaccgtcttcacccgggagtgcatgagccactacctgcgggtcttcaacttcctgtggagggccaagaggatggagtacatcctgacagacatcaggaagggccacatgtgcaatgccaagctgctgaggaacatgcctgagttcagcggcgtgctgcaccagtgccacatcctggccagcgagatggtgcacttcatccaccagatgcagtactacatcacctttgaggtgctggagtgctcctgggatgagctgtggaacaaggtgcagcaggcccaggacctggaccacatcatcgccgcccacgaggtgttcctggacaccatcatcagccgctgcctgctggacagcgacagccgggccctgctgaaccagctgcgggctgtgtttgaccagatcatcgagctgcagaatgcccaggatgccatctacagagctgccctggaggagctgcagaggcggctgcagtttgaggagaagaagaagcagcgggagattgagggccagtggggcgtgacagctgctgaggaggaggaggagaacaagagaattggagagttcaaggagagcatccccaagatgtgcagccagctgcgcatcctgacccacttctaccagggcatcgtgcagcagttcctggtgctgctgaccaccagcagtgatgagagcctgcgcttcctgtccttccggctggacttcaatgagcactacaaggcccgggagccccggctgcgggtgtccctgggcacccggggccgccgcagcagccacacctag

SEQ ID NO: 18458 - DNA, 1086 bp, synthetic construct
  source 1..1086: mol_type = other DNA; note = Synthetic coding sequence
atgaccgggaaggccggggaggccctgagcaagcccaagtctgagaccgtggccaagagcaccagcggcggggccccagcccgctgcaccggcttcggcatccaggagatcctgggcctgaacaaggagccccccagcagccaccccagggctgccctggatggcctggcccctggccacctgctggccgcccggtctgtgctgagccctgctggggtgggcggcatgggcctgctgggccctgggggcctgcccggcttctacacccagcccaccttcctggaggtgctgagtgacccccagagcgtgcacctgcagcccctgggccgggccagcggccccctggacaccagccagacagccagcagtgacagtgaagatgtgagcagcagtgacaggaagatgagcaagagcgccctgaaccagaccaagaagaggaagaagagaagacacaggaccatcttcaccagctaccagctggaggagctggagaaggccttcaatgaggcccactacccagatgtgtatgcccgggagatgctggccatgaagacagagctgcctgaagatcgcatccaggtgtggttccagaacagaagagccaagtggaggaagcgggagaagtgctggggccgcagctctgtgatggccgagtatggcctgtatggagccatggtgcgccacagcatccccctgcctgagagcatcctgaagagcgccaaggatggcatcatggacagctgtgccccctggctgctgggcatgcacaagaagagcctggaggccgctgctgagagcggcaggaagccagagggggagcggcaggccctgcccaagctggacaagatggagcaggatgagcggggcccagatgcccaggccgccatcagccaggaggagctgagagaaaattccattgctgtgctgcgggccaaggcccaggagcacagcaccaaggtgctgggcaccgtgtctggccctgacagcctggcccggagcacagagaagccagaggaggaggaggccatggatgaagatagacctgctgagcggctgagccccccccagctggaggacatggcctag

SEQ ID NO: 18459 - DNA, 2073 bp, synthetic construct
  source 1..2073: mol_type = other DNA; note = Synthetic coding sequence
atggaggagagccccctgagccgggcccccagcagaggaggagtgaacttcctgaatgtggcccggacctacatccccaacaccaaggtggagtgccactacaccctgcccccaggcaccatgcccagcgccagtgactggattggcatcttcaaggtggaggccgcctgtgtgcgggactaccacacctttgtgtggagctctgtgcctgagagcaccacagatggcagccccatccacacctctgtgcagttccaggccagctacctgcccaagccaggggcccagctgtaccagttccgctacgtgaaccggcagggccaggtgtgtggccagagcccccccttccagttccgggagccccggcccatggatgagctggtgaccctggaggaggctgatggcggcagtgacatcctgctggtggtgcccaaggccaccgtgctgcagaaccagctggatgagagccagcaggagagaaatgacctgatgcagctgaagctgcagctggagggccaggtgacagagctgcggagccgggtgcaggagctggagcgggccctggccacagcccggcaggagcacacagagctgatggagcagtacaagggcatcagccgcagccatggagagatcacagaggagcgggacatcctgagccggcagcagggcgaccacgtggcccgcatcctggagctggaggatgacatccagaccatcagcgagaaggtgctgaccaaggaggtggagctggaccggctgcgggacacagtgaaggccctgacccgggagcaggagaagctgctgggccagctgaaggaggtgcaggccgacaaggagcagagcgaggccgagctgcaggtggcccagcaggagaaccaccacctgaacctggacctgaaggaggccaagtcctggcaggaggagcagagcgcccaggcccagaggctgaaggacaaggtggcccagatgaaggacaccctgggccaggcccagcagagggtggccgagctggagcccctgaaggagcagctgcggggggcccaggagctggccgccagcagccagcagaaggccaccctgctgggggaggagctggccagcgctgctgctgcccgggacaggaccatcgccgagctgcacaggagccggctggaggtggccgaggtgaatggccgcctggccgagctgggcctgcacctgaaggaggagaagtgccagtggagcaaggagagagctggcctgctgcagagcgtggaggccgagaaggacaagatcctgaagctgtctgctgagatcctgcggctggagaaggctgtgcaggaggagaggacccagaaccaggtgttcaagacagagctggcccgggagaaggacagcagcctggtgcagctgtctgagagcaagcgggagctgacagagctgcggagcgccctgcgggtgctgcagaaggagaaggagcagctgcaggaggagaagcaggagctgctggagtacatgaggaagctggaggcccggctggagaaggtggctgatgagaagtggaatgaagatgccaccacagaagatgaggaggccgctgtgggcctgagctgcccagctgccctgacagattctgaagatgagagccctgaggacatgaggctgcccccctacggcctgtgtgagcggggggaccccggcagcagccctgctggcccccgggaggccagccccctggtggtgatcagccagcctgcccccatcagcccccacctgagcggccctgctgaggacagcagcagtgacagcgcagaagatgagaagtctgtgctgatggctgctgtgcagagcggcggggaggaggccaacctgctgctgcctgagctgggcagcgccttctatgacatggccagcggcttcaccgtgggcaccctgtctgagaccagcactggaggccctgccacccccacctggaaggagtgccccatctgcaaggagcgcttccctgctgagagtgacaaggatgccctggaggaccacatggatggccacttcttcttcagcacccaggaccccttcacctttgaatag

SEQ ID NO: 18460 - DNA, 1980 bp, synthetic construct
  source 1..1980: mol_type = other DNA; note = Synthetic coding sequence
atgagcctgcccccagagaaggccagcgagctgaagcagctgatccaccagcagctgagcaagatggatgtgcacggccgcatccgggagatcctggccgagaccatccgggaggagctggccccagaccagcagcacctgagcacagaggacctgatcaaggccctgcggcggcggggcatcattgatgatgtgatgaaggagctgaactttgtgacagattctgtggagcaggagctgcccagcagccccaagcagcccatctgctttgaccggcagagcaccctgaagaagaccaacatcgaccccacccggcgctacctgtacctgcaggtgctgggcggcaaggccttcctggagcacctgcaggagcctgagcccctgcccggccaggtgtgcagcaccttcaccctgtgcctgcactacagaaaccagcgcttccgcagcaagcctgtgccctgtgcctgtgagccagacttccatgatggcttcctgctggaggtgcaccgggagagcctgggagatggcaccaggatggctgacagcaccaccatgctgagcatcagtgaccccatccacatggtgctgatcaagacagacatctttggagagaccaccctggtggccagctacttcctggagtggaggtctgtgctgggctctgaaaatggagtgaccagcctgactgtggagctgatgggcgtgggcacagagagcaaggtgtctgtgggcatcctgaacatcaagctggagatgtacccacccctgaaccagaccctgagccaggaggtggtgaacacccagctggccctggagcggcagaagacagctgagaaggagcggctcttcctggtgtatgccaagcagtggtggagggagtacctgcagatccggcccagccacaacagccggctggtgaagatctttgcccaggatgaaaatggcatcaacagacctgtgtgcagctatgtgaagcccctgcgggccggccgcctgctggacaccccccggcaggccgccaggtttgtgaatgtgctgggctatgaaagagcccctgtgattggaggcggcggcaagcaggagcagtggtgcaccctgctggccttcctgtgcaggaacaagggggactgtgaggaccacgccaacctgctgtgcagcctgctgctgggctacggcctggaggcctttgtgtgtgtgggcaccaaggccaagggcgtgccccacgcctgggtgatgacctgtggcacagatggagccatcaccttctgggagagcctgaccggccaccgctacatccacaagcccaccaacccagatgagccccctgtggccgagcagcccaagcccctgtacccctaccgcaccatcggctgtgtgttcaaccaccagatgttcctgggcaactgccagcccagtgatgctgtggagacctgtgtgtttgacctgaatgatgagagcaagtggaagcccatgtctgaggaggccatcaagtctgtgtgtgcccctggggccaccaccagcctgccccccttcccccccctgtgtgccagcaccattgatgcctctgtgaccagcaatgaaattgagatgcagctgcggctgctggtgtctgagcacaggaaggacctgggcctgaccaccgtgtgggaggaccagctgagctacctgctgagccctgccctggccagctatgaatttgagaggaccaccagcatctctgctggaaatgaggagttccaggatgccatccggcgggctgtgcctgatggccacaccttcaagggcttccccatccactttgtgtacagaaatgcccggcgggcctttgccacctgcctgcggagccccttctgtgaggagatcatctgctgccgcggggaccaggtgcggctggccgtgcgggtgcgggtcttcacctacccagagagcgcctgtgctgtgtggatcatgtttgcctgcaagtacagatctgtgctgtag

SEQ ID NO: 18461 - DNA, 1500 bp, synthetic construct
  source 1..1500: mol_type = other DNA; note = Synthetic coding sequence
atgctggagcggcccccagccctggccatgcccatgcccacagagggcaccccaccacccctgagcggcacccccatccctgtgcctgcctacttcagacatgctgagcccggcttcagcctgaagaggccccggggcctgagccgcagcctgcccccacctcctccagccaagggcagcatccccatcagccgcctcttcccccccaggaccccaggctggcaccagctgcagccccggcgggtgtccttccggggggaggccagcgagaccctgcagagccctggctatgaccccagcaggcctgagagcttcttccagcagagcttccagaggctgagccggctgggccacggcagctatggagaggtgttcaaggtgcgcagcaaagaagatggccgcctgtatgctgtgaagaggtccatgagccccttccggggccccaaggaccgggccaggaagctggccgaggtgggcagccatgagaaggtgggccagcacccctgctgcgtgcggctggagcaggcctgggaggagggcggcatcctgtacctgcagacagagctgtgtggccccagcctgcagcagcactgtgaggcctggggcgccagcctgcctgaggcccaggtgtggggctacctgcgggacaccctgctggccctggcccacctgcacagccagggcctggtgcacctggatgtgaagccagccaacatcttcctgggcccccggggccgctgcaagctgggggactttggcctgctggtggagctgggcacagctggagctggggaggtgcaggagggggacccccgctacatggcccctgagctgctgcagggcagctatggaacagctgctgatgtgttcagcctgggcctgaccatcctggaggtggcctgcaacatggagctgccccatggaggagagggctggcagcagctgcggcagggctacctgcccccagagttcaccgctggcctgagcagcgagctgcggtctgtgctggtgatgatgctggagccagaccccaagctgcgggccacagctgaggccctgctggccctgcctgtgctgcggcagccccgggcctggggcgtgctgtggtgcatggctgctgaggccctgagccggggctgggccctgtggcaggccctgctggccctgctgtgctggctgtggcacggcctggcccacccagcctcctggctgcagcccctgggccccccagccaccccacctggcagccccccctgcagcctgctgctggacagcagcctgagcagcaactgggatgatgacagcctgggccccagcctgagccctgaggccgtgctggccaggacagtgggcagcaccagcacccccaggagccgctgcaccccaagagatgccctggacctgagtgacatcaacagcgagcccccccggggcagcttccccagctttgagcccaggaacctgctgagcctgtttgaggacaccctggaccccacctag

SEQ ID NO: 18462 - DNA, 486 bp, synthetic construct
  source 1..486: mol_type = other DNA; note = Synthetic coding sequence
atggatgtgttcctgatgatccgccgccacaagaccaccatcttcacagatgccaaggagagcagcacagtgtttgagctgaagagaattgtggagggcatcctgaagaggcccccagatgagcagaggctgtacaaggatgaccagctgctggatgatggcaagaccctgggagaatgtggcttcaccagccagacagcccggccccaggccccagccaccgtgggcctggccttccgggcagatgacacctttgaggccctgtgcatcgagcccttcagcagccccccagagctgcctgatgtgatgaagccccaggacagcggcagcagcgccaatgagcaggccgtgcacctgcacgtgcacagccagaccatggccaagagcaggaacacctcctggagccagtgccccggcctgacagcctgcagcacccgggagccccaggacggccccacccaggtgcacccccgctggggcctgtag

SEQ ID NO: 18463 - DNA, 1521 bp, synthetic construct
  source 1..1521: mol_type = other DNA; note = Synthetic coding sequence
atgaccggggagaagatccgcagcctgcggcgggaccacaagcccagcaaggaggagggggacctgctggagcctggagatgaggaggccgccgccgccctgggcggcaccttcaccaggagcagaattggaaaaggaggcaaggcctgccacaagatcttcagcaaccaccaccaccggctgcagctgaaggccgccccagccagcagcaaccccccaggggccccagccctgcccctgcacaacagctctgtgacagccaacagccagagccctgccctgctggccggcaccaaccctgtggccgtggtggctgatggcggcagctgcccagcccactaccctgtgcatgaatgtgtgttcaagggagatgtgcggcggctgagcagcctcatccgcacccacaacatcggccagaaggacaaccacggcaacacccccctgcacctggccgtgatgctgggcaacaaggtgacagccctgctgaggaagctgaagcagcagagccgggagagcgtggaggagaagaggccccggctgctgaaggccctgaaggagctgggggacttctacctggagctgcactgggacttccagagctgggtgcccctgctgagccgcatcctgcccagtgatgcctgcaagatctacaagcagggcatcaacatccggctggacaccaccctgattgacttcacagacatgaagtgccagagaggagacctgtccttcatcttcaatggagatgctgcccccagcgagagctttgtggtgctggacaatgagcagaaggtgtaccagaggatccaccacgaggagagcgagatggagacagaggaggaggtggacatcctgatgagcagtgacatctacagcgccaccctgagcaccaagagcatctccttcacccgggcccagacaggctggctgttccgggaggacaagacagagcgggtgggcaacttcctggccgacttctacctggtgaatggcctggtgctggagagcaggaagagaagagagcacctgtctgaggaggacatcctgaggaacaaggccatcatggagagcctgagcaagggcggcaacatcatggagcagaactttgagcccatccggcggcagagcctgaccccaccaccccagaacaccatcacctgggaggagtacatctctgcagaaaatggcaaggccccccacctgggccgggagctggtgtgcaaggagagcaagaagaccttcaaggccaccatcgccatgagccaggagttccccctgggcatcgagctgctgctgaatgtgctggaggtggtggcccccttcaagcacttcaacaagctgcgggagtttgtgcagatgaagctgcccccaggcttccctgtgaagctggacatccctgtgttccccaccatcacagccaccgtgaccttccaggagttccgctatgatgaatttgatggcagcatcttcaccatcccagatgactacaaggaggaccccagccgcttcccagacctgtag

SEQ ID NO: 18464 - DNA, 699 bp, synthetic construct
  source 1..699: mol_type = other DNA; note = Synthetic coding sequence
atgcagcccccagcccccccagctgagctggccgcccccctgcccagccccctgcctgagcagcccctggacagccctgctgccccagccctgagccccagcggcctgggcctgcagcccggccctgagaggaccagcaccaccaagagcaaggagctgagccctggcagcgcccagaagggcagccctggcagcagccagggcacagcctgtgccggcacccagcccggggcccagcccggggcccagcccggggccagccccagccccagccagcccccagctgaccagagcccccacaccctgaggaaggtgtccaagaagctggcccccatcccccccaaggtgcccttcggccagcccggggccatggctgaccagagcgctggccagcccagccctgtgtccctgagccccaccccacccagcacccccagcccctacggcctgagctacccccagggctacagcctggccagcggccagctgagccctgctgctgccccacccctggccagccccagcgtcttcaccagcaccctgagcaagagccggcccacccccaagccccggcagaggcccaccctgcccccaccccagcccccaacagtgaacctgagcgccagcagcccccagagcacagaggcccccatgctggatggcatgagccctggagagagcatgagcacagctgtgtag

SEQ ID NO: 18465 - DNA, 1221 bp, synthetic construct
  source 1..1221: mol_type = other DNA; note = Synthetic coding sequence
atgcaccctgctgtgttcctgagcctgcctgacctgcgctgcagcctgctgctgctggtgacctgggtgttcacccctgtgaccacagagatcaccagcctggacacagaaaatattgatgagatcctgaacaatgctgatgtggccctggtgaacttctatgctgactggtgccgcttcagccagatgctgcaccccatctttgaggaggccagtgatgtgatcaaggaggagttccccaatgaaaaccaggtggtgtttgcccgggtggactgtgaccagcacagcgacatcgcccagcgctaccgcatcagcaagtaccccaccctgaagctgttcagaaatggcatgatgatgaagcgggagtaccggggccagaggtctgtgaaggccctggccgactacatccggcagcagaagagtgaccccatccaggagatccgggacctggccgagatcaccaccctggacaggagcaagaggaacatcatcggctactttgagcagaaggacagcgacaactacagagtgtttgagcgggtggccaacatcctgcatgatgactgtgccttcctgagcgcctttggagatgtgtccaagccagagcgctacagcggggacaacatcatctacaagcccccaggccacagcgccccagacatggtgtacctgggcgccatgaccaactttgatgtgacctacaactggatccaggacaagtgtgtgcccctggtgcgggagatcacctttgaaaatggagaggagctgacagaggagggcctgcccttcctgatcctcttccacatgaaggaggacacagagagcctggagatcttccagaatgaggtggcccggcagctgatcagcgagaagggcaccatcaacttcctgcatgctgactgtgacaagttccgccaccccctgctgcacatccagaagaccccagctgactgccctgtgattgccatcgacagcttccgccacatgtatgtgtttggagacttcaaggatgtgctgatccctgggaagctgaagcagtttgtgtttgacctgcacagcggcaagctgcaccgggagttccaccacggccctgaccccacagacacagcccctggagagcaggcccaggatgtggccagcagccccccagagagcagcttccagaagctggcccccagcgagtaccgctacaccctgctgcgggacagagatgagctgtag

SEQ ID NO: 18466 - DNA, 5601 bp, synthetic construct
  source 1..5601: mol_type = other DNA; note = Synthetic coding sequence
atggaccctgtgggcctgcagctgggcaacaagaacctgtggagctgcctggtgcggctgctgaccaaggaccctgagtggctgaatgccaagatgaagttcttcctgcccaacacagacctggacagcagaaatgagaccctggaccctgagcagagggtcatcctgcagctgaacaagctgcacgtgcagggcagtgacacctggcagagcttcatccactgtgtgtgcatgcagctggaggtgcccctggacctggaggtgctgctgctgagcaccttcggctatgatgatggcttcaccagccagctgggcgctgagggcaagagccagcctgagagccagctgcaccacggcctgaagaggccccaccagagctgtggcagcagccccaggaggaagcagtgcaagaagcagcagctggagctggccaagaagtacctgcagctgctgcggaccagcgcccagcagcgctaccgcagccagatccctggcagcggccagccccacgccttccaccaggtgtatgtgccccccatcctgcggcgggccacagccagcctggacaccccagagggcgccatcatgggagatgtgaaggtggaggatggagcagatgtgtccatcagtgacctcttcaacaccagggtgaacaagggcccccgggtgacagtgctgctgggcaaggccggcatgggcaagaccaccctggcccaccggctgtgccagaagtgggccgagggccacctgaactgcttccaggccctcttcctgtttgagttccggcagctgaacctgatcacccgcttcctgacccccagcgagctgctgtttgacctgtacctgagccctgagagtgaccatgacaccgtcttccagtacctggagaagaatgctgaccaggtgctgctgatctttgatggcctggatgaggccctgcagcccatgggcccagatggccctggccctgtgctgaccctcttcagccacctgtgcaatggcaccctgctgcccggctgccgggtgatggccaccagcaggcctgggaagctgcctgcctgcctgcctgctgaggccgccatggtgcacatgctgggctttgatggcccccgggtggaggagtatgtgaaccacttcttcagcgcccagcccagccgggagggcgccctggtggagctgcagaccaacggccgcctgcggagcctgtgtgctgtgcctgccctgtgccaggtggcctgcctgtgcctgcaccacctgctgcctgaccacgcccctggccagagcgtggccctgctgcccaacatgacccagctgtacatgcagatggtgctggccctgagccccccaggccacctgcccaccagcagcctgctggacctgggggaggtggccctgcggggcctggagaccgggaaggtgatcttctacgccaaggacatcgccccacccctgattgcctttggagccacccacagcctgctgaccagcttctgtgtgtgcaccggccctggccaccagcagacaggctacgccttcacccacctgagcctgcaggagttcctggccgccctgcacctgatggccagccccaaggtgaacaaggacaccctgacccagtatgtgaccctgcacagccgctgggtgcagaggaccaaggcccggctgggcctgagtgaccacctgcccaccttcctggccggcctggccagctgcacctgccggcccttcctgagccacctggcccagggcaatgaagactgtgtgggcgccaagcaggccgctgtggtgcaggtgctgaagaagctggccaccaggaagctgaccggccccaaggtggtggagctgtgccactgtgtggatgagacccaggagcctgagctggccagcctgacagcccagagcctgccctaccagctgcccttccacaacttccccctgacctgcacagacctggccaccctgaccaacatcctggagcaccgggaggcccccatccacctggactttgatggctgccccctggagccccactgcccagaggccctggtgggctgcggccagatcgagaacctgtccttcaagagcaggaaatgtggagatgcctttgctgaggccctgagccgcagcctgcccaccatgggccgcctgcagatgctgggcctggccggcagcaagatcacagcccggggcatcagccacctggtgaaggccctgcccctgtgcccccagctgaaggaggtgtccttccgggacaaccagctgagtgaccaggtggtgctgaacatcgtggaggtgctgccccacctgccccggctgaggaagctggacctgagcagcaacagcatctgtgtgtccaccctgctgtgcctggcccgggtggccgtgacctgccccaccgtgaggatgctgcaggcccgggaggccgacctgatcttcctgctgagccccccaacagagaccacagctgagctgcagagggccccagacctgcaggagagtgatggccagaggaagggggcccagagccgcagcctgaccctgcggctgcagaagtgccagctgcaggtgcatgatgctgaggccctgattgccctgctgcaggagggcccccacctggaggaggtggacctgagcggcaaccagctggaggatgagggctgccgcctgatggccgaggccgccagccagctgcacatcgccaggaagctggacctgagcaacaacggcctgtctgtggccggcgtgcactgtgtgctgcgggctgtgtctgcctgctggaccctggccgagctgcacatcagcctgcagcacaagacagtcatcttcatgtttgcccaggagcctgaggagcagaagggcccccaggagcgggccgccttcctggacagcctgatgctgcagatgcccagcgagctgcccctgagcagcaggaggatgaggctgacccactgcggcctgcaggagaagcacctggagcagctgtgcaaggccctgggcggcagctgccacctgggccacctgcacctggacttctctggaaatgccctgggagatgagggcgccgcccggctggcccagctgctgcccggcctgggcgccctgcagagcctgaacctgtctgaaaatggcctgagcctggatgctgtgctgggcctggtgcgctgcttcagcaccctgcagtggctgttccggctggacatcagctttgagagccagcacatcctgctgcggggggacaagaccagccgggacatgtgggccaccggcagcctgcctgacttccctgctgctgccaagttcctgggcttccggcagcgctgcatccccaggagcctgtgcctgtctgagtgccccctggagccccccagcctgacccggctgtgtgccaccctgaaggactgccccggccccctggagctgcagctgagctgtgagttcctgagtgaccagagcctggagaccctgctggactgcctgccccagctgccccagctgagcctgctgcagctgagccagacaggcctgagccccaagagccccttcctgctggccaacaccctgagcctgtgcccccgggtgaagaaggtggacctgcggagcctgcaccacgccaccctgcacttccgcagcaatgaggaggaggagggcgtgtgctgcggccgcttcaccggctgcagcctgagccaggagcacgtggagagcctgtgctggctgctgagcaagtgcaaggacctgagccaggtggacctgagcgccaacctgctgggggacagcggcctgcgctgcctgctggagtgcctgccccaggtgcccatcagcggcctgctggacctgagccacaacagcatcagccaggagagcgccctgtacctgctggagaccctgcccagctgcccccgggtgcgggaggcctctgtgaacctgggcagcgagcagagcttccgcatccacttcagccgggaggaccaggccggcaagaccctgcggctgtctgagtgcagcttccggcctgagcacgtgtcccggctggccaccggcctgagcaagagcctgcagctgacagagctgaccctgacccagtgctgcctgggccagaagcagctggccatcctgctgagcctggtgggccggcctgctggcctcttcagcctgcgggtgcaggagccctgggccgaccgggcccgggtgctgagcctgctggaggtgtgtgcccaggccagcggctctgtgacagagatcagcatcagcgagacccagcagcagctgtgtgtgcagctggagttcccccggcaggaggagaaccctgaggccgtggccctgcggctggcccactgtgacctgggcgcccaccacagcctgctggtgggccagctgatggagacctgtgcccggctgcagcagctgagcctgagccaggtgaacctgtgtgaagatgatgatgccagcagcctgctgctgcagagcctgctgctgagcctgtctgagctgaagaccttccggctgaccagcagctgtgtgtccacagagggcctggcccacctggccagcggcctgggccactgccaccacctggaggagctggacctgagcaacaaccagtttgatgaggagggcaccaaggccctgatgagggccctggagggcaagtggatgctgaagaggctggacctgagccacctgctgctgaacagcagcaccctggccctgctgacccaccggctgagccagatgacctgcctgcagagcctgcggctgaacagaaattccattggagatgtgggctgctgccacctgtctgaggccctgcgggccgccaccagcctggaggagctggacctgagccacaaccagattggagatgctggggtgcagcacctggccaccatcctgcccggcctgcctgagctgaggaagattgacctgagcggcaacagcatcagcagcgctggaggagtgcagctggccgagagcctggtgctgtgccggcggctggaggagctgatgctgggctgcaatgccctgggggaccccacagccctgggcctggcccaggagctgccccagcacctgcgggtgctgcacctgcccttcagccacctgggccctgggggcgccctgagcctggcccaggccctggatggcagcccccacctggaggagatcagcctggccgagaacaacctggccggcggcgtgctgcgcttctgcatggagctgcccctgctgcggcagattgacctggtgtcctgcaagattgacaaccagacagccaagctgctgaccagcagcttcaccagctgcccagccctggaggtgatcctgctgtcctggaacctgctgggagatgaggccgctgctgagctggcccaggtgctgccccagatgggccgcctgaagagggtggacctggagaagaaccagatcacagccctgggcgcctggctgctggccgagggcctggcccagggcagcagcatccaggtgatccggctgtggaacaaccccatcccctgtgacatggcccagcacctgaagagccaggagccccggctggactttgccttctttgacaaccagccccaggccccctggggcacctag

SEQ ID NO: 18467 - DNA, 897 bp, synthetic construct
  source 1..897: mol_type = other DNA; note = Synthetic coding sequence
atgatgaatgtgaacacccggggcacctacctggccagcaaggcctgcatcccctacctgaagaagagcaaggtggcccacatcctgaacatcagcccccccctgaacctgaaccctgtgtggttcaagcagcactgtgcctacaccatcgccaagtatggcatgtccatgtatgtgctgggcatggccgaggagttcaagggggagattgctgtgaatgccctgtggcccaagacagccatccacacagctgccatggacatgctgggcggccctggcatcgagagccagtgcaggaaggtggacatcatcgcagatgctgcctacagcatcttccagaagcccaagagcttcaccggcaactttgtgattgatgagaacatcctgaaggaggagggcattgaaaattttgatgtgtatgccatcaagccaggccaccccctgcagcctgacttcttcctggatgagtacccagaggccgtgtccaagaaggtggagagcactggagctgtgcctgagttcaaggaggagaagctgcagctgcagcccaagcccaggtctggagctgtggaggagaccttccgcatcgtgaaggacagcctgagtgatgatgtggtgaaggccacccaggccatctacctgtttgagctgagcggggaggatggcggcacctggttcctggacctgaagagcaagggcggcaatgtgggctacggggagcccagcgaccaggctgatgtggtgatgtccatgaccacagatgactttgtgaagatgttttctgggaagctgaagcccaccatggccttcatgtctgggaagctgaagatcaagggcaacatggccctggccatcaagctggagaagctgatgaaccagatgaatgcccggctgtag

SEQ ID NO: 18468 - DNA, 4026 bp, synthetic construct
  source 1..4026: mol_type = other DNA; note = Synthetic coding sequence
atgtggaggaggaagcaccccaggaccagcggcggcacccggggcgtgctgagcggcaacagaggagtggagtatggcagcggccggggccacctgggcacctttgagggccgctggaggaagctgcccaagatgcctgaggccgtgggcacagaccccagcaccagcaggaagatggccgagctggaggaggtgaccctggatggcaagcccctgcaggccctgcgggtgacagacctgaaggccgccctggagcagaggggcctggccaagagcggccagaagagcgccctggtgaagaggctgaagggggccctgatgctggagaacctgcagaagcacagcacccctcatgctgccttccagcccaacagccagattggagaggagatgagccagaacagcttcatcaagcagtacctggagaagcagcaggagctgctgcggcagaggctggagcgggaggcccgggaggccgctgagctggaggaggccagcgctgagagtgaagatgagatgatccaccctgagggcgtggccagcctgctgcccccagacttccagagcagcctggagaggcctgagctggagctgagccgccacagccccaggaagagcagcagcatcagcgaggagaagggggacagtgatgatgagaagcccaggaaaggagagcggcgcagcagccgggtgcggcaggcccgggccgccaagctgtctgagggcagccagcctgctgaggaggaggaggaccaggagacccccagcaggaacctgcgggtgcgggctgacaggaacctgaagacagaggaggaggaggaggaggaggaggaggaggaggaggatgatgaggaggaggagggagatgatgagggccagaagagccgggaggcccccatcctgaaggagttcaaggaggagggggaggagatcccccgggtgaagccagaggagatgatggatgagcggcccaagaccaggagccaggagcaggaggtgctggagcggggcggccgcttcaccaggagccaggaggaggccaggaagagccacctggcccggcagcagcaggagaaggagatgaagaccaccagccccctggaggaggaggagcgggagatcaagagcagccagggcctgaaggagaagagcaagagccccagccccccccggctgacagaggacaggaagaaggccagcctggtggccctgcctgagcagacagccagcgaggaggagaccccaccacccctgctgaccaaggaggccagcagccccccaccccacccccagctgcacagcgaggaggagattgagcccatggagggccctgccccagctgtgctgatccagctgagcccccccaacacagatgctgacacccgggagctgctggtgtcccagcacacagtgcagctggtgggcggcctgagccccctgagcagccccagcgacaccaaggccgagagccctgctgagaaggtgcctgaggagagcgtgctgcccctggtgcagaagagcaccctggccgactacagcgcccagaaggacctggagcctgagagtgacagaagtgcccagcccctgcccctgaagattgaggagctggccctggccaagggcatcacagaagaatgtctgaagcagcccagcctggagcagaaggagggccggcgggccagccacaccctgctgcccagccaccggctgaagcagagcgctgacagcagcagcagccgcagcagcagcagcagcagcagcagcagccgcagccgcagccgcagcccagacagcagcggcagccgcagccacagccccctgcggagcaagcagagagatgtggcccaggcccggacccacgccaacccccggggccggcccaagatgggcagccgcagcaccagcgagagccgcagccgcagccgcagccgcagccgcagcgccagcagcaacagcaggaagagcctgagccctggggtgtcccgggacagcagcaccagctacacagagaccaaggaccccagcagcggccaggaggtggccaccccacctgtgccccagctgcaggtgtgtgagcccaaggagaggaccagcaccagcagcagctctgtgcaggcccggcggctgagccagcctgagagcgctgagaagcacgtgacccagaggctgcagcctgagcggggcagccccaagaagtgtgaggccgaggaggccgagcccccagctgccacccagccccagaccagcgagacccagaccagccacctgcctgagagcgagcgcatccaccacacagtggaggagaaggaggaggtgaccatggacaccagcgagaacagaccagaaaatgatgtgcctgagccccccatgcccatcgctgaccaggtgtccaatgatgacaggcctgagggctctgtggaggatgaggagaagaaggagagcagcctgcccaagagcttcaagaggaagatctctgtggtgtctgccaccaagggcgtgcctgctggcaacagcgacacagagggcggccagcccggcaggaagaggcgctggggcgccagcacagccaccacccagaagaagcccagcatcagcatcaccacagagagcctgaagagcctcatcccagacatcaagcccctggccggccaggaggccgtggtggacctgcacgcagatgacagccgcatcagtgaagatgaaacagaaagaaatggagatgatggcacccatgacaagggcctgaagatctgcaggacagtgacccaggtggtgcctgctgagggccaggagaatggccagcgggaggaggaggaggaggagaaggagcctgaggccgagccccctgtgcccccccaggtgtctgtggaggtggccctgcccccacctgctgagcacgaggtgaagaaggtgaccctgggggacaccctgaccaggaggagcatcagccagcagaagtctggagtgtccatcaccattgatgatcctgtgaggacagcccaggtgcccagccccccccggggcaagatcagcaacatcgtgcacatcagcaacctggtgcggcccttcaccctgggccagctgaaggagctgctgggccgcacaggcaccctggtggaggaggccttctggattgacaagatcaagagccactgctttgtgacctacagcacagtggaggaggccgtggccaccaggacagccctgcacggcgtgaagtggccccagagcaaccccaagttcctgtgtgccgactatgcagagcaggatgagctggactaccaccggggcctgctggtggaccggcccagcgagaccaagacagaggagcagggcatcccccggcccctgcaccccccacctcctcctcctgtgcagcccccccagcaccccagggctgagcagcgggagcaggagagagctgtgcgggagcagtgggccgagcgggagcgggagatggagcggcgggagaggaccaggtctgagcgggagtgggaccgggacaaggtgcgggagggccccaggagccgcagccgcagccgggacagaagaaggaaggagcgggccaagagcaaggagaagaagtctgagaagaaggagaaggcccaggaggagcccccagccaagctgctggatgacctcttcaggaagaccaaggccgccccctgcatctactggctgcccctgacagacagccagatcgtgcagaaggaggccgagcgggcagagcgggccaaggagcgggagaagaggaggaaggagcaggaggaggaggagcagaaggagcgggagaaggaggccgagcgggagaggaaccggcagctggagcgggagaagaggcgggagcacagccgggagcgggaccgggagcgggagcgggagcgggagcgggacagaggagaccgggaccgggaccgggagcgggaccgggagcggggccgggagcgggaccggcgggacaccaagaggcacagccgcagccgcagccgcagcacccctgtgcgggaccggggcggcagaagatag

SEQ ID NO: 18469 - DNA, 600 bp, synthetic construct
  source 1..600: mol_type = other DNA; note = Synthetic coding sequence
atgagcagtggaaatgccaagattggccacccagcccccaacttcaaggccacagctgtgatgccagatggccagttcaaggacatcagcctgagtgactacaagggcaagtatgtggtgttcttcttctaccccctggacttcacctttgtgtgccccacagagatcatcgccttcagtgacagagctgaggagttcaagaagctgaactgccaggtgattggagcctctgtggacagccacttctgccacctggcctgggtgaacacccccaagaagcagggcggcctgggccccatgaacatccccctggtgtctgaccccaagaggaccatcgcccaggactatggagtgctgaaggcagatgagggcatctccttccggggcctcttcatcattgatgacaagggcatcctgcggcagatcaccgtgaatgacctgcctgtgggccgctctgtggatgagaccctgcggctggtgcaggccttccagttcacagacaagcatggagaggtgtgcccagctggctggaagccaggcagtgacaccatcaagccagatgtgcagaagagcaaggagtacttcagcaagcagaagtag

SEQ ID NO: 18470 - DNA, 1077 bp, synthetic construct
  source 1..1077: mol_type = other DNA; note = Synthetic coding sequence
atggagaagaagaagatggtgacccagggcaaccaggagcccaccaccaccccagatgccatggtgcagcccttcaccaccatccccttccccccaccaccccagaatggcatccccacagaatatggagtgccccacacccaggactatgccggccagacaggagagcacaacctgaccctgtatggcagcacccaggcccacggggagcagagcagcaacagccccagcacccagaatggcagcctgaccacagaaggaggagcccagacagatggccagcagagccagacccagagcagcgagaacagcgagagcaagagcacccccaagaggctgcacgtgagcaacatccccttccgcttccgggaccctgacctgcggcagatgtttggaggcttcggctttgtgacctttgagaacagcgcagatgctgaccgggcccgggagaagctgcatggaacagtggtggagggcaggaagattgaggtgaacaatgccacagcccgggtgatgaccaacaagaagatggtgaccccctatgccaacggctggaagctgagccctgtggtgggcgctgtgtatggccctgagctgtatgctgccagcagcttccaggctgatgtgtccctgggcaatgatgctgctgtgcccctgagcggccggggcggcatcaacacctacatccccctcatcatccctggcttcccctaccccacagctgccaccacagctgctgccttccggggggcccacctgcggggccggggccgcacagtgtatggagctgtgcgggctgtgcccccaacagccatcccagcctacccaggagtggtgtaccaggacggcttctatggagctgacctgtatggaggctacgccgcctaccgctatgcccagcctgccacagccacagctgccacagctgctgctgctgctgctgctgcctacagtgatggctacggccgggtgtacacagctgacccctaccacgccctggccccagctgccagctatggagtgggcgctgtggccagcctgtaccggggcggctacagcagatttgccccctactag

SEQ ID NO: 18471 - DNA, 1596 bp, synthetic construct
  source 1..1596: mol_type = other DNA; note = Synthetic coding sequence
atgagctacccagcagatgattatgagagcgaggccgcctatgacccctatgcctaccccagcgactatgacatgcacactggagaccccaagcaggacctggcctatgaaaggcagtatgagcagcagacctaccaggtgattcctgaggtgatcaagaacttcatccagtacttccacaagacagtgtctgacctgattgaccagaaggtgtatgagctgcaggccagccgggtgtccagtgatgtgattgaccagaaggtgtatgagatccaggacatctatgagaacagctggaccaagctgacagagcgcttcttcaagaacaccccctggccagaggccgaggccatcgccccccaggtgggcaatgatgctgtgttcctgatcctgtacaagatcctgcaggcccacggccctgcccccctggagctgcccaaccagtggctgtgggacatcattgatgagttcatctaccagttccagagcttcagccagtaccgctgcaagacagccaagaagtctgaggaggagattgacttcctgcggagcaaccccaagatctggaatgtgcacagcgtgctgaatgtgctgcacagcctggtggacaagagcaacatcaaccggcagctggaggtgtacaccagcggcggggaccctgagagcgtggccggggagtatggccgccacagcctgtacaagatgctgggctacttcagcctggtgggcctgctgcggctgcacagcctgctgggggactactaccaggccatcaaggtgctggagaacatcgagctgaacaagaagtccatgtacagccgggtgcctgagtgccaggtgaccacctactactacgtgggctttgcctacctgatgatgaggcgctaccaggatgccatccgggtgtttgccaacatcctgctgtacatccagaggaccaagtccatgttccagaggaccacctacaagtatgagatgatcaacaagcagaatgagcagatgcacgccctgctggccatcgccctgaccatgtaccccatgagaattgatgagagcatccacctgcagctgcgggagaagtatggagacaagatgctgaggatgcagaagggggacccccaggtgtatgaggagctgttctcctacagctgccccaagttcctgagccctgtggtgcccaactatgacaacgtgcaccccaactaccacaaggagcccttcctgcagcagctgaaggtgttcagtgatgaggtgcagcagcaggcccagctgagcaccatccgctccttcctgaagctgtacaccaccatgcctgtggccaagctggccggcttcctggacctgacagagcaggagttccgcatccagctgctggtgttcaagcacaagatgaagaacctggtgtggaccagcggcatcagcgccctggatggagagttccagagcgccagcgaggtggacttctacatcgacaaggacatgatccacatcgctgacaccaaggtggcccggcgctacggggacttcttcatccggcagatccacaagtttgaggagctgaacagaaccctgaagaagatgggccagaggccctag

SEQ ID NO: 18472 - DNA, 5952 bp, synthetic construct
  source 1..5952: mol_type = other DNA; note = Synthetic coding sequence
atgagcggcaacaagaggggcagccgggccagctgcccccacagaggagctgagtgcctgctgccctgggccgccctgaacctgcagggcttccagctgctgctgctgcaccccagcgccacagccatgatggatgtgtctgagctgggggagagcgcccgctacctgcggcagggctaccaggagatgaccaaggtgcacaccatcccctgggatggcaagaagagggtgtgggtgcctgatgagcaggatgcctacgtggaggccgaggtgaagtctgaggccaccggcggccgggtgacagtggagaccaaggaccagaaggtgctgatggtgcgggaggccgagctgcagcccatgaacccccccaggtttgacctgctggaggacatggccatgatgacccacctgaatgaggcctctgtgctgcacaacctgcggcagagatatgcccgctggatgatctacacctacagcggcctcttctgtgtgaccatcaacccctacaagtggctgcctgtgtacacagcctctgtggtggccgcctacaagggcaagagaagaagtgacagccccccccacatctatgctgtggccgacaatgcctacaatgacatgctgaggaacagagacaaccagagcatgctgatcaccggggagagcggggccggcaagacagtgaacaccaagagggtcatccagtactttgccatcgtggccgccctgggagatggccctgggaagaaggcccagttcctggccaccaagacaggaggcaccctggaggaccagatcatcgaggccaacccagccatggaggcctttggaaatgccaagaccctgagaaatgacaacagcagcagatttgggaagttcatccgcatccacttcggccccagcggcaagctggccagcgctgacatcgacagctacctgctggagaagagcagggtcatcttccagctgcctggagagaggagctaccacgtgtactaccagatcctgagcggcaggaagccagagctgcaggacatgctgctgctgtccatgaacccctatgactaccacttctgcagccagggcgtcatcaccgtggacaacatgaatgatggagaggagctgattgccacagaccacgccatggacatcctgggcttctctgtggatgagaagtgtgcctgctacaagatcgtgggcgccctgctgcacttcggcaacatgaagttcaagcagaagcagcgggaggagcaggccgaggctgatggaacagaatctgctgacaaggccgcctacctgatgggcgtgtcctctggggacctgctgaagggcctgctgcacccccgggtgcgggtgggcaatgaatatgtgaccaagggccagagcgtggagcaggtggtgtttgctgtgggcgccctggccaaggccacctatgacaggctcttccgctggctggtgagccgcatcaaccagaccctggacaccaagctgccccggcagttcttcatcggcgtgctggacattgctggctttgagatctttgagttcaacagctttgagcagctgtgcatcaacttcaccaatgagaagctgcagcagttcttcaaccagcacatgtttgtgctggagcaggaggagtacaagcgggagggcatcgactgggtgttcatcgactttggcctggacctgcagccctgcatcgacctgattgagaagcccctgggcatcctgagcatcctggaggaggagtgcatgttccccaaggccagtgatgccagcttccgggccaagctgtatgacaaccacgccggcaagagccccaacttccagcagcccaggccagacaagaagaggaagtaccaggcccactttgaggtggtgcactacgccggcgtggtgccctacagcatcgtgggctggctggagaagaacaaggaccccctgaatgagaccgtggtgcccatcttccagaagagccagaaccggctgctggccaccctgtatgagaactatgccggcagctgcagcacagagccccccaagtctggagtgaaggagaagaggaagaaggccgccagcttccagacagtgtcccagctgcacaaggagaacctgaacaagctgatgaccaacctgcgggccacccagccccactttgtgcgctgcatcgtgcccaatgaaaacaagaccccaggagtgatggatgccttcctggtgctgcaccagctgcgctgcaatggagtgctggagggcatccgcatctgccggcagggcttccccaaccggctgctgtacacagacttccggcagcgctaccgcatcctgaaccccagcgccatcccagatgacaccttcatggacagcaggaaggccacagagaagctgctgggcagcctggacctggaccacacccagtaccagtttggccacaccaaggtgttcttcaaggccggcctgctgggcgtgctggaggagctgcgggaccagaggctggccaaggtgctgaccctgctgcaggcccggagccggggccgcctgatgaggctggagtaccagaggctgctgggcggcagagatgccctcttcaccatccagtggaacatccgggccttcaatgctgtgaagaactggagctggatgaagctgttcttcaagatgaagcccctgctgcggagcgcccaggccgaggaggagctggccgccctgcgggcagagctgcggggcctgcggggggccctggccgctgctgaggccaagaggcaggagctggaggagacccacgtgtccatcacccaggagaagaatgacctggccctgcagctgcaggccgagcaggacaacctggctgatgctgaggagcgctgccacctgctgatcaagagcaaggtgcagctggagggcaaggtgaaggagctgtctgagcggctggaggatgaggaggaggtgaatgctgacctggccgcccggcggaggaagctggaggatgaatgtacagagctgaagaaggacattgatgacctgaagctgaccctggccaaggccgagaaggagaagcaggccacagagaacaaggtgaagaacctgacagaggagatggccgccctggatgaatctgtggcccggctgaccaaggagaagaaggccctgcaggaggcccaccagcaggccctgggggacctgcaggccgaggaggacagagtgtctgccctgaccaaggccaagctgcggctggagcagcaggtggaggacctggagtgcagcctggagcaggagaagaagctgaggatggacacagagcgggccaagaggaagctggagggggacctgaagctgacccaggagagcgtggctgatgctgcccaggacaagcagcagctggaggagaagctgaagaagaaggacagcgagctgagccagctgagcctgcgggtggaggatgagcagctgctgggcgcccagatgcagaagaagatcaaggagctgcaggcccgggcagaggagctggaggaggagctggaggccgagcgggccgcccgggcccgggtggagaagcagagagctgaggccgcccgggagctggaggagctgtctgagcggctggaggaggccggcggggccagcgctggccagcgggagggctgcaggaagcgggaggccgagctgggccgcctgcggcgggagctggaggaggccgccctgcggcatgaggccaccgtggccgccctgcggaggaagcaggccgagggcgctgctgagctgggggagcaggtggacagcctgcagagggtgcggcagaagctggagaaggagaagtctgagctgaggatggaggtggatgacctggccgccaacgtggagaccctgacccgggccaaggccagcgctgagaagctgtgcaggacctatgaggaccagctgtctgaggccaagatcaaggtggaggagctgcagaggcagctggctgatgccagcacccagaggggccgcctgcagacagaaagtggagagctgagccggctgctggaggagaaggagtgcctgatcagccagctgagccggggcaaggccctggccgcccagagcctggaggagctgcggcggcagctggaggaggagagcaaggccaagagcgccctggcccatgctgtgcaggccctgcggcatgactgtgacctgctgcgggagcagcacgaggaggaggccgaggcccaggccgagctgcagaggctgctgagcaaggccaatgctgaggtggcccagtggaggagcaaatatgaagcagatgccatccagaggacagaggagctggaggaggccaagaagaagctggccctgcggctgcaggaggccgaggagggcgtggaggccgccaatgccaagtgcagcagcctggagaaggccaagctgcggctgcagacagaaagtgaagatgtgaccctggagctggagcgggccaccagcgctgctgctgccctggacaagaagcagaggcacctggagcgggccctggaggagcggcggcggcaggaggaggagatgcagcgggagctggaggccgcccagcgggagagccggggcctgggcacagagctgttccggctgcggcacggccacgaggaggccctggaggccctggagaccctgaagcgggagaacaagaacctgcaggaggagatcagtgacctgacagaccaggtgtccctgagcggcaagagcatccaggagctggagaagaccaagaaggccctggagggggagaagtctgagatccaggccgccctggaggaggccgagggcgccctggagctggaggagaccaagaccctgcgcatccagctggagctgagccaggtgaaggccgaggtggacaggaagctggccgagaaggatgaagaatgtgccaacctgcggaggaaccaccagagagctgtggagagcctgcaggccagcctggatgctgagacccgggccagaaatgaggccctgcggctgaagaagaagatggagggggacctgaatgacctggagctgcagctgggccacgccacccggcaggccacagaggcccaggccgccacccggctgatgcaggcccagctgaaggaggagcaggccggcagagatgaggagcagaggctggccgctgagctgcacgagcaggcccaggccctggagcggcgggccagcctgctggccgctgagctggaggagctgcgggccgccctggagcagggcgagaggagccggcggctggccgagcaggagctgctggaggccacagagcggctgaacctgctgcacagccagaacacaggcctgctgaaccagaagaagaagctggaggccgacctggcccagctgtctggagaggtggaggaggccgcccaggagcggcgggaggccgaggagaaggccaagaaggccatcacagatgctgccatgatggccgaggagctgaagaaggagcaggacaccagcgcccacctggagaggatgaagaagaccctggagcagacagtgcgggagctgcaggcccggctggaggaggccgagcaggccgccctgcggggcggcaagaagcaggtgcagaagctggaggccaaggtgcgggagctggaggccgagctggatgctgagcagaagaagcatgctgaggccctgaagggcgtgaggaagcatgagcggcgggtgaaggagctggcctaccaggccgaggaggacaggaagaacctggccaggatgcaggacctggtggacaagctgcagagcaaggtgaagagctacaagaggcagtttgaggaggccgagcagcaggccaacaccaacctggccaagtacaggaaggcccagcacgagctggatgatgctgaggagagagctgacatggccgagacccaggccaacaagctgcgggcccggaccagagatgccctgggccccaagcacaaggagtag

SEQ ID NO: 18473 - DNA, 2730 bp, synthetic construct
  source 1..2730: mol_type = other DNA; note = Synthetic coding sequence
atggagcgggccatggagcagctgaaccggctgaccaggagcctgcggcgggccaggacagtggagctgcctgaagataatgaaacagctgtgtacaccctgatgcccatggtgatggctgaccagcacaggtctgtgtctgagctgctgagcaacagcaagtttgatgtgaactatgccttcggccgggtgaagaggagcctgctgcacatcgccgccaactgtggctctgtggagtgcctggtgctgctgctgaagaagggggccaaccccaactaccaggacatcagcggctgcacccccctgcacctggccgccagaaatggccagaagaagtgcatgagcaagctgctggagtacagcgcagatgtgaacatctgcaacaatgaaggcctgacagccatccactggctggccgtgaatggaagaacagagctgctgcatgacctggtgcagcacgtgtctgatgtggatgtggaggatgccatgggccagacagccctgcacgtggcctgccagaatggccacaagaccaccgtgcagtgcctgctggacagcggggctgacatcaaccggcccaacgtgtctggggccacccccctgtactttgcctgcagccacggccagagggacacagcccagatcctgctgctgcggggggccaagtacctgcctgacaagaatggagtgacccccctggacctgtgtgtgcagggcggctatggagagacctgtgaggtgctgatccagtaccaccccaggctcttccagaccatcatccagatgacccagaatgaagacctgcgggagaacatgctgcggcaggtgctggagcacctgagccagcagagcgagagccagtacctgaagatcctgaccagcctggccgaggtggccaccaccaacggccacaagctgctgagcctgagcagcaactatgatgcccagatgaagagcctgctgagaattgtgaggatgttctgccacgtgttcagaattggccccagcagccccagcaatggcatcgacatgggctacaatggaaacaagacccccaggagccaggtgttcaagcccctggagctgctgtggcacagcctggatgagtggctggtgctgattgccacagagctgatgaagaacaagagggacagcacagagatcaccagcatcctgctgaagcagaagggccaggaccaggatgctgccagcatccccccatttgagcccccaggccctggcagctatgagaacctgagcacaggcacccgggagagcaagccagatgccctggccggccggcaggaggccagcgctgactgccaggatgtgatctccatgacagccaaccggctgtctgctgtgatccaggccttctacatgtgctgcagctgccagatgcctcctggcatgaccagcccccgcttcattgaatttgtgtgcaagcatgatgaggtgctgaagtgctttgtgaacagaaaccccaagatcatctttgaccacttccacttcctgctggagtgcccagagctgatgagccgcttcatgcacatcatcaaggcccagcccttcaaggacagatgtgagtggttctatgagcacctgcacagcggccagcctgacagcgacatggtgcacaggcctgtgaatgaaaatgacatcctgctggtgcaccgggacagcatcttccgcagcagctgtgaggtggtgtccaaggccaactgtgccaagctgaagcagggcattgctgtgcgcttccatggagaggagggcatgggccagggcgtggtgcgggagtggtttgacatcctgagcaatgagatcgtgaacccagactatgccctcttcacccagagcgcagatggcaccaccttccagcccaacagcaacagctatgtgaacccagaccacctgaactacttccgctttgctggccagatcctgggcctggccctgaaccaccggcagctggtgaacatctacttcaccaggagcttctacaagcacatcctgggcatccctgtgaactaccaggatgtggccagcattgatcctgaatatgccaagaacctgcagtggatcctggacaatgacatcagtgacctgggcctggagctgaccttctctgtggagacagatgtgtttggagccatggaggaggtgcccctgaagccaggcggcggcagcatcctggtgacccagaacaacaaggccgagtatgtgcagctggtgacagagctgaggatgacccgggccatccagccccagatcaatgccttcctgcagggcttccacatgttcatcccccccagcctcatccagctgtttgatgaatatgagctggagctgctgctgagcggcatgcctgagattgatgtgtctgactggatcaagaacacagagtacaccagcggctatgaaagagaagatcctgtgatccagtggttctgggaggtggtggaggacatcacccaggaggagcgggtgctgctgctgcagtttgtgacaggcagcagccgggtgccccatggaggctttgccaacatcatgggcggcagcggcctgcagaacttcaccatcgctgctgtgccctacacccccaacctgctgcccaccagcagcacctgcatcaacatgctgaagctgcctgagtaccccagcaaggagatcctgaaggaccggctgctggtggccctgcactgcggcagctatggctacaccatggcctag

SEQ ID NO: 18474 - DNA, 2679 bp, synthetic construct
  source 1..2679: mol_type = other DNA; note = Synthetic coding sequence
atgaggaaggtgaagaagctgcggctggacaaggagaacacaggctcctggaggagcttcagcctgaacagcgagggcgctgagaggatggccaccaccggcacccccacagctgacagaggagatgctgctgccacagatgatcctgctgcccgcttccaggtgcagaagcacagctgggatggcctgcggagcatcatccacggcagcaggaagtacagcggcctgattgtgaacaaggcccctcatgacttccagtttgtgcagaagacagatgagagcggcccccacagccaccggctgtactacctgggcatgccctacggcagccgggagaacagcctgctgtacagcgagatccccaagaaggtgaggaaggaggccctgctgctgctgtcctggaagcagatgctggaccacttccaggccaccccccaccacggcgtgtacagccgggaggaggagctgctgcgggagaggaagaggctgggcgtgtttggcatcaccagctatgacttccacagcgagagcggcctcttcctgttccaggccagcaacagcctcttccactgcagagatggcggcaagaatggcttcatggtgagccccatgaagcccctggagatcaagacccagtgcagcggccccaggatggaccccaagatctgcccagctgaccctgccttcttctccttcatcaacaacagcgacctgtgggtggccaacattgaaacaggagaggagcggcggctgaccttctgccaccagggcctgagcaatgtgctggatgaccccaagtctgctggggtggccacctttgtgatccaggaggagtttgaccgcttcaccggctactggtggtgccccacagcctcctgggagggcagcgagggcctgaagaccctgcgcatcctgtatgaggaggtggatgagagcgaggtggaggtgatccacgtgcccagccctgccctggaggagaggaagacagacagctaccgctaccccaggacaggcagcaagaaccccaagatcgccctgaagctggccgagttccagacagacagccagggcaagatcgtgtccacccaggagaaggagctggtgcagcccttcagcagcctcttccccaaggtggagtacatcgcccgggccggctggaccagagatggcaagtatgcctgggccatgttcctggaccggccccagcagtggctgcagctggtgctgctgcccccagccctcttcatccccagcacagaaaatgaggagcagaggctggccagcgcccgggctgtgcccagaaatgtgcagccctacgtggtgtatgaggaggtgaccaacgtgtggatcaacgtgcatgacatcttctaccccttcccccagagtgaaggagaagatgagctgtgcttcctgcgggccaatgaatgcaagacaggcttctgccacctgtacaaggtgacagctgtgctgaagagccagggctatgactggagcgagcccttcagccctggagaagatgagttcaagtgccccatcaaggaggagatcgccctgaccagcggggagtgggaggtgctggcccggcacggcagcaagatctgggtgaatgaggagaccaagctggtgtacttccagggcaccaaggacacccccctggagcaccacctgtatgtggtgtcctatgaagctgctggggagatcgtgcggctgaccaccccaggcttcagccacagctgcagcatgagccagaactttgacatgtttgtgagccactacagctctgtgtccaccccaccctgtgtgcacgtgtacaagctgagcggcccagatgatgaccccctgcacaagcagccccgcttctgggcctccatgatggaggccgccagctgccccccagactatgtgcccccagagatcttccacttccacaccaggagtgatgtgcggctgtatggcatgatctacaagccccacgccctgcagcccgggaagaagcaccccaccgtgctgtttgtgtatggaggcccccaggtgcagctggtgaacaacagcttcaagggcatcaagtacctgcggctgaacaccctggccagcctgggctatgctgtggtggtgattgatggccggggcagctgccagaggggcctgcgctttgagggcgccctgaagaaccagatgggccaggtggagattgaggaccaggtggagggcctgcagtttgtggccgagaagtatggcttcatcgacctgagccgggtggccatccacggctggagctatggaggcttcctgagcctgatgggcctcatccacaagccccaggtgttcaaggtggccatcgccggggcccctgtgacagtgtggatggcctatgacaccggctacacagagcgctacatggatgtgcctgagaacaaccagcacggctatgaggccggctctgtggccctgcacgtggagaagctgcccaatgagcccaaccggctgctgatcctgcacggcttcctggatgaaaatgtgcacttcttccacaccaacttcctggtgtcccagctgatccgggccggcaagccctaccagctgcagatctacccaaatgaaagacacagcatccgctgcccagagagcggggagcactatgaggtgaccctgctgcacttcctgcaggagtacctgtag

SEQ ID NO: 18475 - DNA, 1533 bp, synthetic construct
  source 1..1533: mol_type = other DNA; note = Synthetic coding sequence
atggctgctgagctggtggaggccaagaacatggtgatgtccttccgggtgtctgacctgcagatgctgctgggctttgtgggccgcagcaagagcggcctgaagcatgagctggtgacccgggccctgcagctggtgcagtttgactgcagccctgagctgttcaagaagatcaaggagctgtatgagaccaggtatgccaagaagaacagcgagcccgccccccagccccaccggcccctggaccccctgaccatgcacagcacctatgacagagctggagctgtgcccaggacccccctggccggccccaacatcgactaccctgtgctgtatggcaagtacctgaatggcctgggccgcctgcctgccaagaccctgaagccagaggtgcggctggtgaagctgcccttcttcaacatgctggatgagctgctgaagcccacagagctggtgccccagaacaatgagaagctgcaggagagcccctgcatctttgccctgaccccccggcaggtggagctgatccggaacagccgggagctgcagcccggggtgaaggctgtgcaggtggtgctgcgcatctgctacagcgacaccagctgcccccaggaggaccagtacccacccaacattgctgtgaaggtgaaccacagctactgcagcgtgcccggctactaccccagcaacaagccaggagtggagcccaagaggccctgccggcccatcaacctgacccacctgatgtacctgagcagcgccaccaaccgcatcaccgtgacctggggcaactacggcaagagctacagcgtggccctgtacctggtgcggcagctgaccagcagcgagctgctgcagaggctgaagaccatcggcgtgaagcaccctgagctgtgcaaggccctggtgaaggagaagctgcggctggaccctgattctgaaattgccaccaccggggtgcgggtgtccctcatctgccccctggtgaagatgaggctgtctgtgccctgcagagctgagacctgtgcccacctgcagtgctttgatgctgtgttctacctgcagatgaatgagaagaagcccacctggatgtgccctgtgtgtgacaagccagccccctatgaccagctgatcattgatggcctgctgagcaagatcctgtctgaatgtgaagatgctgatgaaattgagtacctggtggatggctcctggtgccccatccgggcagagaaggagaggagctgcagcccccagggcgccatcctggtgctgggccccagtgatgccaacggcctgctgcctgcccccagcgtgaatggaagtggggccctgggcagcactggaggcggcggccctgtgggctccatggagaatggcaagccaggagcagatgtggtggacctgaccctggacagcagcagcagcagtgaagatgaggaggaggaggaggaggaggaggaggatgaagatgaggagggcccccggcccaagaggcgctgccccttccagaagggcctggtgcctgcctgctag

SEQ ID NO: 18476 - DNA, 684 bp, synthetic construct
  source 1..684: mol_type = other DNA; note = Synthetic coding sequence
atggccgcccagaggcccctgcgggtgctgtgcctggccggcttccggcagagcgagcggggcttccgggagaagacaggagccctgaggaaggccctgcggggccgggcagagctggtgtgcctgagcggcccccaccctgtgcctgaccccccaggccctgagggcgcccggagtgactttggcagctgccccccagaggagcagccccggggctggtggttcagcgagcaggaggctgatgtgttcagcgccctggaggagcctgctgtgtgccggggcctggaggagagcctgggcatggtggcccaggccctgaaccggctgggcccctttgatggcctgctgggcttcagccagggcgccgccctggccgccctggtgtgtgccctgggccaggccggggacccccgcttccccctgccccgcttcatcctgctggtgtctggcttctgcccccggggcatcggcttcaaggagagcatcctgcagaggcccctgagcctgcccagcctgcacgtgtttggagacacagacaaggtgatccccagccaggagagcgtgcagctggccagccagtttcctggggccatcaccctgacccacagcggcggccacttcatcccagctgctgccccccagaggcaggcctacctgaagttcctggaccagtttgctgagtag

SEQ ID NO: 18477 - DNA, 1656 bp, synthetic construct
  source 1..1656: mol_type = other DNA; note = Synthetic coding sequence
atggaggaggccgagctggtgaagggccgcctgcaggccatcacagacaagaggaagatccaggaggagatcagccagaagaggctgaagattgaggaggacaagctgaagcaccagcacctgaagaagaaggccctgcgggagaagtggctgctggatggcatcagcagcggcaaggagcaggaggagatgaagaagcagaaccagcaggaccagcaccagatccaggtgctggagcagagcatcctgcggctggagaaggagatccaggacctggagaaggccgagctgcagatcagcaccaaggaggaggccatcctgaagaagctgaagagcattgaaagaaccacagaggacatcatccgctctgtgaaggtggagcgggaggagcgggcagaggagagcattgaggacatctatgccaacatcccagacctgcccaagagctacatccccagccggctgaggaaggagatcaatgaggagaaggaggatgatgagcagaacaggaaggccctgtatgccatggagatcaaggtggagaaggacctgaagacaggagagagcacagtgctgagcagcatccccctgcccagtgatgacttcaagggcaccggcatcaaggtgtatgatgatggccagaagtctgtgtatgctgtgagcagcaaccacagcgctgcctacaatggaacagatggcctggcccctgtggaggtggaggagctgctgcggcaggccagcgagaggaacagcaagagccccacagagtaccacgagcctgtgtatgccaaccccttctaccggcccaccaccccccagcgggagaccgtgaccccaggccccaacttccaggagcgcatcaagatcaagaccaacggcctgggcatcggcgtgaatgaaagcatccacaacatgggaaatggcctgtctgaggagcggggcaacaacttcaaccacatcagccccatcccccctgtgccccaccccaggagcgtcatccagcaggccgaggagaagctgcacaccccccagaagaggctgatgaccccctgggaggagagcaatgtgatgcaggacaaggatgcccccagccccaagccccggctgagcccccgggagaccatctttgggaagtctgagcaccagaacagcagccccacctgccaggaggatgaagaagatgtgcgctacaacatcgtgcacagcctgcccccagacatcaatgacacagagcctgtgaccatgatcttcatgggctaccagcaggccgaggacagcgaggaggacaagaagttcctgaccggctatgatggcatcatccacgccgagctggtggtgattgatgatgaggaggaggaggatgaaggagaggccgagaagcccagctaccaccccatcgccccccacagccaggtgtaccagcctgccaagcccacccccctgcccaggaagaggtctgaggccagcccccatgagaacaccaaccacaagagcccccacaagaacagcatcagcctgaaggagcaggaggagagcctgggcagccctgtgcaccacagcccctttgatgcccagaccactggagatggaacagaggaccccagcctgacagccctgaggatgaggatggccaagctgggcaagaaggtgatctag

SEQ ID NO: 18478 - DNA, 1701 bp, synthetic construct
  source 1..1701: mol_type = other DNA; note = Synthetic coding sequence
atgtttgtgtctgacttcaggaaggagttctatgaggtggtgcagagccagagggtgctgctgtttgtggccagtgatgtggatgccctgtgtgcctgcaagatcctgcaggccctcttccagtgtgaccacgtgcagtacaccctggtgcctgtgtctggctggcaggagctggagacagccttcctggagcacaaggagcagttccactacttcatcctgatcaactgtggggccaacgtggacctgctggacatcctgcagccagatgaggacaccatcttctttgtgtgtgacacccacaggcctgtgaatgtggtgaatgtgtacaatgacacccagatcaagctgctgatcaagcaggatgatgacctggaggtgcctgcctatgaggacatcttcagagatgaggaggaggatgaggagcacagcggaaatgacagtgatggcagcgagcccagcgagaagaggacccggctggaggaggagatcgtggagcagaccatgagaagacggcagaggcgggagtgggaggccaggagaagagacatcctgtttgattatgagcagtatgagtaccacggcaccagcagcgccatggtgatgtttgagctggcctggatgctgagcaaggacctgaatgacatgctgtggtgggccatcgtgggcctgacagaccagtgggtgcaggacaagatcacccagatgaagtatgtgacagatgtgggcgtgctgcagagacatgtgagccgccacaaccacagaaatgaagatgaggagaacaccctgtctgtggactgcacccgcatcagctttgaatatgacctgcggctggtgctgtaccagcactggagcctgcatgacagcctgtgcaacaccagctacacagctgcccgcttcaagctgtggagcgtgcacggccagaagaggctgcaggagttcctggccgacatgggcctgcccctgaagcaggtgaagcagaagttccaggccatggacatcagcctgaaggagaacctgcgggagatgattgaggagagcgccaacaagtttggcatgaaggacatgagggtgcagaccttcagcatccacttcggcttcaagcacaagttcctggccagtgatgtggtgtttgccaccatgagcctgatggagagccctgagaaggatggcagcggcacagaccacttcatccaggccctggacagcctgagccgcagcaacctggacaagctgtaccacggcctggagctggccaagaagcagctgcgggccacccagcagaccatcgccagctgcctgtgcaccaacctggtgatcagccagggccccttcctgtactgcagcctgatggagggcaccccagatgtgatgctgttcagcaggcctgccagcctgagcctgctgagcaagcacctgctgaagagctttgtgtgcagcaccaagaacagacgctgcaagctgctgcccctggtgatggccgcccccctgtccatggagcacggcaccgtgacagtggtgggcatccccccagagacagacagcagtgacaggaagaacttcttcggccgggcctttgagaaggctgctgagagcaccagcagcaggatgctgcacaaccactttgacctgtctgtgattgagctgaaggccgaggacaggagcaagttcctggatgccctgatcagcctgctgtcctag

SEQ ID NO: 18479 - DNA, 1461 bp, synthetic construct
  source 1..1461: mol_type = other DNA; note = Synthetic coding sequence
atgtctgtgacctatgatgacagcgtgggcgtggaggtgtccagtgacagcttctgggaggtgggcaactacaagaggacagtgaagagaattgatgatggccaccggctgtgcagcgacctgatgaactgcctgcacgagcgggccagaattgagaaggcctatgcccagcagctgacagagtgggcccggcgctggaggcagctggtggagaagggcccccagtatggcaccgtggagaaggcctggatggccttcatgtctgaggccgagcgggtgtctgagctgcacctggaggtgaaggccagcctgatgaatgatgactttgagaagatcaagaactggcagaaggaggccttccacaagcagatgatgggcggcttcaaggagaccaaggaggctgaagatggcttcaggaaggcccagaagccctgggccaagaagctgaaggaggtggaggccgccaagaaggcccaccacgccgcctgcaaggaggagaagctggccatcagccgggaggccaacagcaaggctgaccccagcctgaaccctgagcagctgaagaagctgcaggacaagattgagaagtgcaagcaggatgtgctgaagaccaaggagaagtatgagaagagcctgaaggagctggaccagggcaccccccagtacatggagaacatggagcaggtgtttgagcagtgccagcagtttgaggagaagaggctgcgcttcttccgggaggtgctgctggaggtgcagaagcacctggacctgagcaatgtggccggctacaaggccatctaccatgacctggagcagagcatccgggctgctgatgctgtggaggacctgcgctggttccgggccaaccacggccctggcatggccatgaactggccccagtttgaggagtggagcgctgacctgaacagaaccctgagccggcgggagaagaagaaggccacagatggagtgaccctgaccggcatcaaccagacaggagaccagagcctgcccagcaagcccagcagcaccctgaatgtgcccagcaacccagcccagagcgcccagagccagagcagctacaacccctttgaagatgaagatgacaccggcagcacagtgtctgagaaggatgacaccaaggccaagaatgtgtcctcctatgagaagacccagagctaccccacagactggagcgatgatgagagcaacaaccccttcagcagcacagatgccaatggagacagcaacccctttgatgatgatgccaccagcggcacagaggtgcgggtgcgggccctgtatgactatgagggccaggagcatgatgagctgtccttcaaggctggagatgagctgaccaagatggaggatgaagatgagcagggctggtgcaagggccgcctggacaatggccaggtgggcctgtacccagccaactacgtggaggccatccagtag

SEQ ID NO: 18480 - DNA, 2262 bp, synthetic construct
  source 1..2262: mol_type = other DNA; note = Synthetic coding sequence
atgatggaggagagagctgctgctgctgtggccgctgctgccagcagctgccggcccctgggcagcggggccggccctggccccactggagctgcccctgtgtctgccccagcccctggccctggccctgctgggaagggcggcggcggcggcggcagccctggccccacagctggccctgagcccctgagcctgcccggcatcctgcacttcatccagcacgagtgggccaggtttgaagctgagaaggcccgctgggaggccgagagagctgagctgcaggcccaggtggccttcctgcagggcgagaggaagggccaggagaacctgaagacagacctggtgcggcgcatcaagatgctggagtatgccctgaagcaggagcgggccaagtaccacaagctgaagtttggaacagacctgaaccagggcgagaagaaggcagatgtgtctgagcaggtgtccaatggacctgtggagagcgtgaccctggagaacagccccctggtgtggaaggagggccggcagctgctgcggcagtacctggaggaggtgggctacacagacaccatcctggacatgaggagcaagagggtgcgcagcctgctgggccgcagcctggagctgaatggagctgtggagcccagcgagggcgccccccgggcccctcctggccctgctggcctgagcggcggggagagcctgctggtgaagcagatcgaggagcagatcaagagaaatgctgctgggaaggatggcaaggagcggctgggcggctctgtgctgggccagatccccttcctgcagaactgtgaagatgaggacagtgatgaagatgatgagctggacagcgtgcagcacaagaagcagagggtgaagctgcccagcaaggccctggtgcctgagatggaggatgaagatgaagaagatgacagtgaagatgccatcaatgaatttgacttcctgggcagcggggaggatggagagggcgccccagacccccggcgctgcaccgtggatggcagcccccatgagctggagagcagaagagtgaagctgcagggcatcctggccgacctgagagatgtggatggcctgccccccaaggtgactggacctcctcctggcaccccccagccccggccccatgaagatgtgttcatcatggacaccatcggcggcggggaggtgtccctgggggacctggccgacctgactgtgaccaatgacaatgacctgagctgtgacctgagtgacagcaaggatgccttcaagaagacctggaaccccaagttcaccctgcggagccactatgatggcatccgcagcctggccttccaccacagccagagcgccctgctgacagcctctgaagatggcaccctgaagctgtggaacctgcagaaggctgtgacagccaagaagaatgctgccctggatgtggagcccatccacgccttccgggcccaccggggccctgtgctggccgtggccatgggcagcaacagcgagtactgctacagcggcggcgcagatgcctgcatccacagctggaagatcccagacctgtccatggacccctatgatggctatgaccccagcgtgctgagccacgtgctggagggccatggagatgctgtgtggggcctggccttcagccccaccagccagaggctggccagctgcagcgcagatggcaccgtgcgcatctgggaccccagcagcagcagccctgcctgcctgtgcaccttccccacagccagcgagcacggcgtgcccacctctgtggccttcaccagcacagagcccgcccacatcgtggccagcttccgcagcggggacacagtgctgtatgacatggaggtgggcagcgccctgctgaccctggagagccggggcagcagcggccccacccagatcaaccaggtggtgagccaccccaaccagcccctgaccatcacagcccatgatgaccggggcatccgcttcctggacaacagaacaggcaagcctgtgcacagcatggtggcccacctggatgctgtgacctgcctggccgtggaccccaacggggccttcctgatgagcggcagccatgactgcagcctgcggctgtggagcctggacaacaagacctgtgtgcaggagatcacagcccacaggaagaagcatgaggaggccatccatgctgtggcctgccaccccagcaaggccctgattgccagcgctggagcagatgccctggccaaggtgtttgtgtag

SEQ ID NO: 18481 - DNA, 1596 bp, synthetic construct
  source 1..1596: mol_type = other DNA; note = Synthetic coding sequence
atgaggatgcacacccggctgagcctgcccggccccccccaccacgtgggcgccgcctacccacctgctgggggcaacagaagtgaaaatgccggctcctggggcggggccggggccagctctgtggagcccctggccaggagagtggccagcggggaggccaccctggccatggaccagcctgctggcctgcaggtggactatgtgttccggggcgtggagcacgctgtgcgggtgatggtgtctggccaggtgctggagctggaggtggaggacaggatgacagctgaccagtggagaggagaatttgatgctggcttcatcgaggacctgacccacaagacaggcaacttcaagcagttcaacatcttctgccacatgctggagagcgccctgacccagagcagcgagagcgtgaccctggacctgctgacctacacagacctggagagcctgaggaacaggaagatgggcggccggcccggcagcctggcccccaggtctgcccagctgaacagcaagcgctacctgatcctgatctacagcgtggagtttgaccgcatccactaccccctgcccctgccctaccagggcaagccagaccctgtggtgctgcagggcatcatccgcagcctgaaggaggagctgggccgcctgcagggcctggatggccagaacacccgggacacccgggagaatgagatctggcacctgcgggagcaggtgtcccggctggccagcgagaagcgggagctggaggcccagctgggccgcagccgggaggaggccctggccggccgggccgcccggcaggaggccgaggccctgcggggcctggtgcggggcctggagctggagctgcggcaggagcggggcctgggccaccgggtggccggccggcggggccaggactgccggcggctggccaaggagctggaggaggccaaggccagcgagaggagcctgcgggcccggctgaagaccctgaccagcgagctggccctgtacaagagaggaggccggggcagccggggccggggccgcccagcccggcccagccccagccccactggaggccgggccctgcgctttgaccccacagcctttgtgaaggccaaggagaggaagcagcgggagatccagatgaagcagcagcagaggaaccggctgggcagcggcggcagcggagatggccccagcgtgtcctggagccggcagacccagcccccagctgccctgaccggcagaggagatgcccccaacagaagcaggaacagaagcagctctgtggacagcttccgcagccgctgcagcagcgccagcagctgcagcgacctggaggacttcagcgagagcctgagccggggcggccacagaagaagaggcaagccacccagccccaccccctggagcggcagcaacatgaagagcccccctgtggagaggagccaccaccagaagagcctggccaacagcggcggctgggtgcccatcaaggagtacagcagcgagcaccaggccgctgacatggccgagattgatgcccggctgaaggccctgcaggagtacatgaaccggctggacatgaggagctag

SEQ ID NO: 18482 - DNA, 1452 bp, synthetic construct
  source 1..1452: mol_type = other DNA; note = Synthetic coding sequence
atggccagcctgctgtggggcggagatgctggagctgctgagagcgagcggctgaacagccacttcagcaacctgagccagcccaggaagaacctgtggggcatcaagagcacagctgtgagaaatattgatggcagcatcaacaacatcaatgaagatgatgaggaggatgtggtggacctggccgccaacagcctgctgaacaagctgatccaccagagcctggtggagagcagccaccgggtggaggtgctgcagaaggaccccagcagccccctgtacagcgtgaagacctttgaggagctgcggctgaaggaggagctgctgaagggcatctatgccatgggcttcaaccggcccagcaagatccaggagatggccctgcccatgatgctggcccaccccccccagaacctgattgcccagagccagagcggcaccgggaagacagctgcctttgtgctggccatgctgagccgggtgaatgccctggagctgttcccccagtgcctgtgcctggcccccacctatgagctggccctgcagacaggccgggtggtggagcagatgggcaagttctgtgtggatgtgcaggtgatgtatgccatccggggcaaccgcatcccccggggcacagacatcaccaagcagatcatcatcggcaccccaggcaccgtgctggactggtgcttcaagctgaagctgattgacctgaccaagatccgggtgtttgtgctggatgaagcagatgtgatgattgacacccagggcttcagtgaccacagcatccgcatccagagggccctgcccagcgagtgccagatgctgctcttcagcgccacctttgaagattctgtgtggcactttgctgagcgcatcatcccagaccccaacgtcatcaagctgaggaaggaggagctgaccctgaacaacatccggcagtactacgtgctgtgtgagcacaggaaggacaagtaccaggccctgtgcaacatctacggcagcatcaccatcggccaggccatcatcttctgccagaccaggagaaatgccaagtggctgactgtggagatgatccaggacggccaccaggtgtccctgctgtctggagagctgactgtggagcagagggccagcatcatccagcgcttcagagatggcaaggagaaggtgctgatcaccaccaacgtgtgtgcccggggcattgatgtgaagcaggtgaccatcgtggtgaactttgacctgcctgtgaagcagggcgaggagccagactatgagacctacctgcaccgcatcggccgcacaggccgctttgggaagaagggcctggccttcaacatgattgaggtggatgagctgcccagcctgatgaagatccaggaccacttcaacagcagcatcaagcagctgaatgctgaggacatggatgaaattgagaagattgactactag

SEQ ID NO: 18483 - DNA, 1014 bp, synthetic construct
  source 1..1014: mol_type = other DNA; note = Synthetic coding sequence
atggctgatgctgccccccagctgggcaagaggaagcgggagctggatgtggaggaggcccacgccgccagcacagaggagaaggaggccggcgtgggcaatggcacctgtgcccctgtgcggctgcccttcagcggcttccggctgcagaaggtgctgcgggagagcgcccgggacaagatcatcttcctgcacggcaaggtgaatgaggccagcggagatggagatggagaagatgctgtggtgatcctggagaagacccccttccaggtggagcaggtggcccagctgctgaccggcagccctgagctgcagctgcagttcagcaatgacatctacagcacctaccacctgttccccccccggcagctgaatgatgtgaagaccaccgtggtgtacccagccacagagaagcacctgcagaagtacctgcggcaggacctgcggctcatccgggagactggagatgactacagaaacatcaccctgccccacctggagagccagagcctgagcatccagtgggtgtacaacatcctggacaagaaggccgaggccgacagaattgtgtttgagaacccagaccccagtgatggctttgtgctgatcccagacctgaagtggaaccagcagcagctggatgacctgtacctgattgccatctgccaccggcggggcatccgcagcctgcgggacctgaccccagagcacctgcccctgctgaggaacatcctgcaccagggccaggaggccatcctgcagcgctacaggatgaagggggaccacctgcgggtgtacctgcactacctgcccagctactaccacctgcacgtgcacttcaccgccctgggctttgaggcccctggcagcggcgtggagcgggcccacctgctggccgaggtgattgagaacctggagtgtgaccccaggcactaccagcagaggaccctgacctttgccctgcgggcagatgaccccctgctgaagctgctgcaggaggcccagcagagctag

SEQ ID NO: 18484 - DNA, 1782 bp, synthetic construct
  source 1..1782: mol_type = other DNA; note = Synthetic coding sequence
atgaagctgcaggccgtgatggagaccctgctgcagaggcagcagagggcccggcaggagctggaggcccggcagcagctgcccccagaccccccagctgcccctcctggccgggcccgggccgccccagatgaagatcgggagcctgagagcgccaggatgcagagggcccagatggccgccctggccgccatgagagctgctgctgctggcctgggccacccagccagccctgggggctctgaagatggccccccaggcagcgaggaggaggatgctgcccgggagggcaccccaggcagccctggccggggccgggagggccctggagaggagcactttgaggacatggccagtgatgaggacatgaagcccaagtgggaggaggaggagatggaggaggacctgggggaggatgaggaggaggaggaggaggactatgaagatgaggaggaggaggaggatgaggagggcctgggccccccaggccctgccagcctgggcaccacagccctcttccccaggaaggcccagcccccccaggccttcagaggagatggagtgccccgggtgctgggcggccaggagcggcccggccctggccctgcccaccctggaggagctgcccacgtggccccccagctgcagcccccagaccacggggactggacctatgaggagcagttcaagcagctgtatgagctggatggagaccccaagaggaaggagttcctggatgacctcttctccttcatgcagaagaggggcacccctgtgaaccgcatccccatcatggccaagcaggtgctggacctcttcatgctgtatgtgctggtgacagagaagggcggcctggtggaggtgatcaacaagaagctgtggagggagatcaccaagggcctgaacctgcccaccagcatcaccagcgctgccttcaccctgcggacccagtacatgaagtacctgtacccctatgaatgtgagaagaggggcctgagcaaccccaatgagctgcaggccgccatcgacagcaacagaagagagggccggcggcagagctttggaggcagcctgtttgcctacagccctggaggagcccacggcatgctgagcagccccaagctgcctgtgagcagcctgggcctggccgccagcaccaacggcagcagcatcaccccagcccccaagatcaagaaggaggaggacagcgccatccccatcaccgtgcccggccgcctgcctgtgtccctggccggccaccctgtggtggccgcccaggccgctgctgtgcaggccgccgccgcccaggccgctgtggccgcccaggccgccgccctggagcagctgcgggagaagctggagagcgctgagcccccagagaagaagatggccctggtggctgatgagcagcagaggctgatgcagagggccctgcagcagaacttcctggccatggccgcccagctgcccatgagcatccgcatcaacagccaggccagcgagagccggcaggacagcgctgtgaacctgaccggcaccaacggcagcaacagcatctccatgtctgtggagatcaatggcatcatgtacacaggagtgctgtttgcccagcccccagcccccacccccaccagcgcccccaacaagggcggcggcggcggcggcggcagcagcagcaatgccggcggccggggcggcaacacaggcaccagcggcggccaggccggccctgctggcctgagcacccccagcaccagcaccagcaacaacagcctgccctag

SEQ ID NO: 18485 - DNA, 6192 bp, synthetic construct
  source 1..6192: mol_type = other DNA; note = Synthetic coding sequence
atggctgatggagccccccggccccagctgtacagatctgtgtccttcaagctgctggagcgctggagcggcggccctggcctgcgggaggaggacacagacaccccaggcctgcggcggcgggccagctgccggcccaccacagctgcccggggccagcccagccggcgggtgtccaagctggccagcggccccctggccgccccagcccagccccggcccctgcggagcctgagccccagcgtgcggcagctgagcagaagatttgatgccccccggctggatgatggcagcgctggcaccagagatggaggagtgctgcctgctgctgctgaggaggccgctgagggccctgcccggggggcctggcccagcgtgacagagatgaggaagctgtttggaggccctggcagcagaagacccagcgctgacagcgagagccctggcacccccagcccagatggagctgcctgggagcccccagcccgggagagccggcagccccccaccccaccacccaggacctgcttccccctggccggcctgcggagcgcccggcccctgactggacctgagacagagggccgcctgcggcggccccagcagcagcaggagcgggcccagaggcctgcagatggcctgcacagctggcacatcttcagccagccccaggccggggcccgggccagctgcagcagcagcagcattgctgccagctaccctgtgagccgcagcagagctgccagcagcagcgaggaggaggaggagggccccccccagctgcccggggcccagagccctgcctaccacggcggccacagcagcggcagtgatgatgacagagatggagagggcggccaccgctggggcggccggcccggcctgcggcccggcagcagcctgctggaccaggactgcaggccagacagtgatggcctgaacctgagctccatgaacagcgctggggtgtctggcagccctgagccccccaccagcccccgggccccccgggaggagggcctgcgggagtggggcagcggcagccccccctgtgtgcccggcccccaggagggcctgcggcccatgtctgattctgtgggcggggccttccgggtggccaaggtgtccttccccagctacctggccagccctgctggcagccggggcagcagccgctacagcagcacagagaccctgaaggatgatgacctgtggagcagccggggcagcggcggctggggcgtgtaccgcagccccagctttggagctggggagggcctgctgcggagccaggcccggacccgggccaagggccctgggggcaccagccgggccctgagagatggcggctttgagcctgagaagagccggcagaggaagagcctgagcaacccagacatcgccagcgagaccctgaccctgctgtccttcctgcggagtgacctgtctgagctgcgggtgaggaagccaggcggcagcagcggggaccggggcagcaaccccctggatggccgggacagccccagcgctgggggccctgtgggccagctggagcccatccccatcccagccccagccagccctggcacccggcccaccctgaaggacctgacagccaccctgcggcgggccaagagcttcacctgcagcgagaagcccatggcccggcggctgcccaggaccagcgccctgaagagcagcagcagcgagctgctgctgaccggccctggagctgaggaggaccccctgcccctcatcgtgcaggaccagtatgtgcaggaggcccggcaggtgtttgagaagatccagaggatgggcgcccagcaggatgatggcagtgatgcccctcctggcagcccagactgggccggagatgtgacccggggccagaggagccaggaggagctgagcggccctgagagcagcctgacagatgagggcatcggggctgaccctgagccccctgtggccgccttctgtggcctgggcaccaccggcatgtggaggcccctgagcagcagcagcgcccagaccaaccaccacggccctggaacagaggacagcctgggcggctgggccctggtgtccccagagaccccacccacccctggggccctgcggcggcggaggaaggtgcccccatctggcagcggcggcagcgagctgagcaatggagaggccggggaggcctaccgcagcctgagtgaccccatcccccagaggcaccgggccgccaccagcgaggagcccaccggcttctctgtggacagcaacctgctgggcagcctgagccccaagacaggcctgcctgccaccagcgccatggatgagggcctgaccagcggccacagcgactggagcgtgggcagcgaggagagcaagggctaccaggaggtgatccagagcatcgtgcagggccctggcaccctgggccgggtggtggatgacagaattgctgggaaggcccccaagaagaagagcctgagtgaccccagcagaagaggagagctggccggccctggctttgagggccctggaggagagcccatccgggaggtggagcccatgctgccccccagcagcagcgagcccatcctggtggagcagagagctgagcctgaggagcccggggccaccaggagccgggcccagagcgagcgggccctgcctgaggccctgcccccaccagccacagcccacaggaacttccacctggaccccaagctggccgacatcctgagccccaggctcatcagaagaggcagcaagaagaggcctgcccggagcagccaccaggagctgcggagagatgagggcagccaggaccagacaggcagcctgagccgggcccggcccagcagccgccacgtgagacatgcctctgtgcctgccaccttcatgcccatcgtggtgcctgagccccccacctctgtgggcccccctgtggccgtgcctgagcccatcggcttccccacccgggcccaccccaccctgcaggcccccagcctggaggatgtgaccaagcagtacatgctgaacctgcacagcggggaggtgcctgcccctgtgcctgtggacatgccctgcctgcccctggccgcccctccttctgctgaggccaagcccccagaggccgcccggccagcagatgagcccaccccagccagcaagtgctgcagcaagccccaggtggacatgaggaagcacgtggccatgaccctgctggacacagagcagagctatgtggagagcctgcggaccctgatgcagggctacatgcagcccctgaagcagcctgagaacagcgtgctgtgtgaccccagcctggtggatgagatctttgaccagatccctgagctgctggagcaccacgagcagttcctggagcaggtgcgccactgcatgcagacctggcacgcccagcagaaggtgggcgccctgctggtgcagagcttcagcaaggatgtgctggtgaacatctacagcgcctacatcgacaacttcctgaatgccaaggatgctgtgcgggtggccaaggaggcccggcctgccttcctgaagttcctggagcagagcatgagggagaacaaggagaagcaggccctgagtgacctgatgatcaagcctgtgcagaggatccccaggtatgagctgctggtgaaggacctgctgaagcacaccccagaggaccacccagaccaccccctgctgctggaggcccagaggaacatcaagcaggtggccgagcgcatcaacaagggcgtgcgctctgctgaggaggccgagagacatgcccgggtgctgcaggagattgaggcccacatcgagggcatggaggacctgcaggcccccctgcggcgcttcctgcggcaggagatggtgattgaggtgaaggccatcggcggcaagaaggacaggagcctcttcctgttcacagacctgattgtgtgcaccaccctgaagaggaagagcggcagcctgcggcgcagctccatgagcctgtacacagctgcctctgtgattgacacagccagcaagtacaagatgctgtggaagctgcccctggaggatgctgacatcatcaagggggccagccaggccaccaaccgggagaacatccagaaggccatcagccggctggatgaggacctgaccaccctgggccagatgagcaagctgtctgagagcctgggcttcccccaccagagcctggatgatgccctgcgggacctgtctgctgccatgcaccgggacctgtctgagaagcaggccctgtgctacgccctgtccttcccccccaccaagctggagctgtgtgccaccaggcctgagggcacagacagctacatctttgagttcccccacccagatgcccggctgggctttgagcaggcctttgatgaggccaagaggaagctggccagcagcaagagctgcctggaccctgagttcctgaaggccatccccatcatgaagaccaggagcggcatgcagttcagctgtgccgcccccaccctgaacagctgcccagagcccagccctgaggtgtgggtgtgcaacagtgatggctacgtgggccaggtgtgcctgctgagcctgcgggcagagccagatgtggaggcctgcatcgctgtgtgcagcgcccgcatcctgtgcattggagctgtgcccggcctgcagccccgctgccaccgggagcccccacccagcctgcggagccccccagagacagcccctgagcccgccggccctgagctggatgtggaggccgctgctgatgaggaggccgccaccctggccgagcccggcccccagccctgcctgcacatcagcattgctggcagcggcctggagatgaccccaggcctgggggagggggaccccaggcctgagctggtgccctttgacagcgacagtgatgatgagagcagccccagccccagcggcaccctgcagagccaggccagccgcagcaccatcagcagcagctttggaaatgaggagacccccagcagcaaggaggccacagctgagaccaccagcagcgaggaggagcaggagcccggcttcctgcccctgagcggcagctttggacctgggggcccctgtggcaccagccccatggatggccgggccctgcggcgcagcagccacggcagcttcacccggggcagcctggaggacctgctgtctgtggaccctgaggcctaccagagctctgtgtggctgggcacagaagatggctgtgtgcacgtgtaccagagcagtgacagcatccgggacagaagaaattccatgaagctgcagcacgccgcctctgtgacctgcatcctgtacctgaacaaccaggtgtttgtgtccctggccaacggggagctggtggtgtaccagcgggaggccggccacttctgggacccccagaacttcaagtctgtgaccctgggcacccagggcagccccatcaccaagatggtgtctgtgggcggccgcctgtggtgtggctgccagaacagagtgctggtgctgagcccagacaccctgcagctggagcacatgttctacgtgggccaggacagcagccgctgtgtggcctgcatggtggacagcagcctgggcgtgtgggtgaccctgaagggcagcgcccacgtgtgcctgtaccacccagacacctttgagcagctggccgaggtggatgtgaccccacctgtgcacaggatgctggccggcagtgatgccatcatccggcagcacaaggccgcctgcctgcgcatcacagccctgctggtgtgtgaggagctgctgtgggtgggcaccagcgctggggtggtgctgaccatgcccaccagccctggcaccgtgtcctgcccccgggcccccctgagccccaccggcctgggccagggccacacaggccacgtgcgcttcctggccgctgtgcagctgcctgatggcttcaacctgctgtgccccaccccacctcctcctccagacaccggccctgagaagctgcccagcctggagcaccgggacagcccctggcaccggggccctgccccagcccggcccaagatgctggtgatctctggaggagatggctatgaggacttccggctgagcagcggcggcggcagcagcagcgagaccgtgggcagagatgacagcaccaaccacctgctgctgtggagggtgtag

SEQ ID NO: 18486 - DNA, 2499 bp, synthetic construct
  source 1..2499: mol_type = other DNA; note = Synthetic coding sequence
atgtctgaggccggcggggccggccctgggggctgtggggccggggccggggccggggccggccctggggccctgcccccccagcctgctgccctgcccccagccccaccccagggcagcccctgtgccgctgctgctgggggcagcggggcctgtggccctgccacagctgtggccgctgctggaacagctgagggccctgggggcggcggcagcgccagaattgctgtgaagaaggcccagctgcggagcgccccccgggccaagaagctggagaagctgggcgtgtacagcgcctgcaaggccgaggagagctgcaagtgcaatggctggaagaaccccaaccccagccccaccccacccagggctgacctgcagcagatcatcgtgtccctgacagagagctgccgcagctgcagccacgccctggccgcccacgtgagccacctggagaatgtgtctgaggaggagatgaaccggctgctgggcatcgtgctggatgtggagtacctgttcacctgtgtgcacaaggaggaggatgctgacaccaagcaggtgtacttctacctgttcaagctgctgaggaagagcatcctgcagaggggcaagcctgtggtggagggcagcctggagaagaagcccccatttgagaagcccagcattgagcagggcgtgaacaactttgtgcagtacaagttcagccacctgcctgccaaggagcggcagaccatcgtggagctggccaagatgttcctgaaccgcatcaactactggcacctggaggcccccagccagaggcggctgcggagccccaatgatgacatcagcggctacaaggagaactacacccgctggctgtgctactgcaatgtgccccagttctgtgacagcctgcccaggtatgagaccacccaggtgtttggaagaaccctgctgcggagcgtcttcaccgtgatgaggcggcagctgctggagcaggcccggcaggagaaggacaagctgcccctggagaagaggaccctcatcctgacccacttccccaagttcctgtccatgctggaggaggaggtgtacagccagaacagccccatctgggaccaggacttcctgagcgccagcagcaggaccagccagctgggcatccagaccgtcatcaaccccccacctgtggccggcaccatctcctacaacagcaccagcagcagcctggagcagcccaatgccggcagcagcagccctgcctgcaaggccagcagcggcctggaggccaaccctggagagaagaggaagatgacagacagccacgtgctggaggaggccaagaagccccgggtgatgggagacatccccatggagctgatcaatgaggtgatgagcaccatcacagatcctgctgccatgctgggccctgagaccaacttcctgagcgcccacagcgccagagatgaggccgcccggctggaggagcggcggggcgtcatcgagttccacgtggtgggcaacagcctgaaccagaagcccaacaagaagatcctgatgtggctggtgggcctgcagaatgtgttcagccaccagctgcccaggatgcccaaggagtacatcacccggctggtgtttgaccccaagcacaagaccctggccctgatcaaggatggccgggtgattggaggcatctgcttcaggatgttccccagccagggcttcacagaaattgtgttctgtgctgtgaccagcaatgagcaggtgaagggctacggcacccacctgatgaaccacctgaaggagtaccacatcaagcatgacatcctgaacttcctgacctatgcagatgaatatgccatcggctacttcaagaagcagggcttcagcaaggagatcaagatccccaagaccaagtatgtgggctacatcaaggactatgagggcgccaccctgatgggctgtgagctgaacccccgcatcccctacacagagttcagcgtcatcatcaagaagcagaaggagatcatcaagaagctgattgaaaggaagcaggcccagatcaggaaggtgtacccaggcctgagctgcttcaaggatggagtgcggcagatccccatcgagagcatccctggcatccgggagaccggctggaagcccagcggcaaggagaagagcaaggagccccgggaccctgaccagctgtacagcaccctgaagagcatcctgcagcaggtgaagagccaccagagcgcctggcccttcatggagcctgtgaagaggacagaggcccctggctactatgaagtcatccgcttccccatggacctgaagaccatgtctgagcggctgaagaaccgctactacgtgtccaagaagctgttcatggctgacctgcagagggtcttcaccaactgcaaggagtacaaccccccagagagcgagtactacaagtgtgccaacatcctggagaagttcttcttcagcaagatcaaggaggccggcctgattgacaagtag

SEQ ID NO: 18487 - DNA, 4950 bp, synthetic construct
  source 1..4950: mol_type = other DNA; note = Synthetic coding sequence
atggccggcggccgcggggcccctggccggggcagagatgagcccccagagagctacccccagaggcaggaccacgagctgcaggccctggaggccatctacggggctgacttccaggacctgcggccagatgcctgtggccctgtgaaggagcccccagagatcaacctggtgctgtacccccagggcctgactggagaggaggtgtatgtgaaggtggacctgcgggtgaagtgcccccccacctacccagatgtggtgcctgagattgagctgaagaatgccaagggcctgagcaatgaatctgtgaacctgctgaagagccggctggaggagctggccaagaagcactgtggggaggtgatgatctttgagctggcctaccacgtgcagagcttcctgtctgagcacaacaagcccccacccaagagcttccacgaggagatgctggagcggcgggcccaggaggagcagcagaggctgctggaggccaagaggaaggaggagcaggagcagcgggagatcctgcacgagatccagaggaggaaggaggagatcaaggaggagaagaagaggaaggagatggccaagcaggagcggctggagatcgccagcctgagcaaccaggaccacaccagcaagaaggaccccggcggccacaggacagctgccatcctgcatggaggcagcccagactttgtgggcaatggcaagcaccgggccaacagcagcggccgcagccggcgggagcggcagtacagcgtgtgcaacagcgaggacagccctggcagctgtgagatcctgtacttcaacatgggcagcccagaccagctgatggtgcacaagggcaagtgcatcggcagtgatgagcagctgggcaagctggtgtacaatgccctggagacagccaccggcggctttgtgctgctgtatgagtgggtgctgcagtggcagaagaagatgggccccttcctgaccagccaggagaaggagaagattgacaagtgcaagaagcagatccagggcacagaaacagagttcaacagcctggtgaagctgagccaccccaacgtggtgcgctacctggccatgaacctgaaggagcaggatgacagcatcgtggtggacatcctggtggagcacatctctggagtgtccctggccgcccacctgagccacagcggccccatccctgtgcaccagctgcggcgctacacagcccagctgctgagcggcctggactacctgcacagcaacagcgtggtgcacaaggtgctgagcgccagcaatgtgctggtggatgctgagggcaccgtgaagatcacagactacagcatcagcaagaggctggccgacatctgcaaggaggatgtgtttgagcagaccagggtgcgcttcagtgacaatgccctgccctacaagacaggcaagaagggagatgtgtggaggctgggcctgctgctgctgagcctgagccagggccaggagtgtggggagtaccctgtgaccatccccagcgacctgcctgctgacttccaggacttcctgaagaagtgtgtgtgcctggatgacaaggagcgctggagcccccagcagctgctgaagcacagcttcatcaacccccagcccaagatgcccctggtggagcagagcccagaagattctgagggccaggactatgtggagaccgtcatccccagcaaccggctgcccagcgctgccttcttcagcgagacccagaggcagttcagccgctacttcatcgagtttgaggagctgcagctgctgggcaagggggcctttggagctgtgatcaaggtgcagaacaagctggatggctgctgctatgctgtgaagaggatccccatcaacccagccagccggcagttccgccgcatcaagggggaggtgaccctgctgagccggctgcaccacgagaacatcgtgcgctactacaatgcctggattgaaagacatgagaggcctgctggccctggcaccccacctccagacagcggccccctggccaaggatgacagagctgcccggggccagcctgccagtgacacagatggcctggacagcgtggaggccgccgcccccccacccatcctgagcagctctgtggagtggagcaccagcggggagaggtctgccagcgcccgcttccctgccaccggccctggcagcagtgatgatgaagatgatgatgaagatgaacatggaggagtcttcagccagagcttcctgcctgccagtgacagcgagagtgacatcatctttgacaatgaagatgagaacagcaagagccagaaccaggatgaggactgcaatgagaagaatggctgccacgagagcgagcccagcgtgaccacagaggccgtgcactacctgtacatccagatggagtactgtgagaagagcaccctgcgggacaccatcgaccagggcctgtacagagacacagtgcggctgtggaggctcttccgggagatcctggatggcctggcctacatccacgagaagggcatgatccaccgggacctgaagcctgtgaacatcttcctggacagtgatgaccacgtgaagatcggggactttggcctggccacagaccacctggccttctctgctgacagcaagcaggatgaccagacaggagacctgatcaagagtgaccccagcggccacctgaccggcatggtgggcacagccctgtatgtgtccccagaggtgcagggcagcaccaagagcgcctacaaccagaaggtggacctcttcagcctgggcatcatcttctttgagatgagctaccaccccatggtgacagccagcgagcgcatctttgtgctgaaccagctgcgggaccccaccagccccaagtttcctgaggactttgatgatggagaacatgccaagcagaagagcgtcatctcctggctgctgaaccacgaccctgccaagaggcccacagccacagagctgctgaagtctgagctgctgcccccaccccagatggaggagagcgagctgcacgaggtgctgcaccacaccctgaccaacgtggatggcaaggcctaccgcaccatgatggcccagatcttcagccagaggatcagccctgccatcgactacacctatgacagcgacatcctgaagggcaacttcagcatcagaacagccaagatgcagcagcacgtgtgtgagaccatcatccgcatcttcaagagacatggagctgtgcagctgtgcacccccctgctgctgcccaggaaccggcagatctatgagcacaatgaagctgccctcttcatggaccacagcggcatgctggtgatgctgccctttgacctgcgcatcccctttgcccgctacgtggccaggaacaacatcctgaacctgaagcgctactgcatcgagagggtcttccggcccaggaagctggaccgcttccaccccaaggagctgctggagtgtgcctttgatattgtgaccagcaccaccaacagcttcctgcccacagctgagatcatctacaccatctatgagatcatccaggagttccctgccctgcaggagaggaactacagcatctacctgaaccacaccatgctgctgaaggccatcctgctgcactgcggcatccctgaggacaagctgagccaggtgtacatcatcctgtatgatgctgtgacagagaagctgacccggcgggaggtggaggccaagttctgcaacctgagcctgagcagcaacagcctgtgccgcctgtacaagttcatcgagcagaagggggacctgcaggacctgatgcccaccatcaacagcctcatcaagcagaagacaggcatcgcccagctggtgaagtatggcctgaaggacctggaggaggtggtgggcctgctgaagaagctgggcatcaagctgcaggtgctgatcaacctgggcctggtgtacaaggtgcagcagcacaacggcatcatcttccagtttgtggccttcatcaagaggcggcagagagctgtgcctgagatcctggccgccggcggccgctatgacctgctgatcccccagttccggggcccccaggccctgggccctgtgcccacagccatcggcgtgtccatcgccatcgacaagatctctgctgctgtgctgaacatggaggagagcgtgaccatcagcagctgtgacctgctggtggtgtctgtgggccagatgtccatgagccgggccatcaacctgacccagaagctgtggacagctggcatcacagctgagatcatgtatgactggagccagagccaggaggagctgcaggagtactgccgccaccacgagatcacctacgtggccctggtgtctgacaaggagggcagccacgtgaaggtgaagagctttgagaaggagcggcagacagagaagagggtgctggagacagagctggtggaccacgtgctgcagaagctgcggaccaaggtgacagatgaaagaaatggccgggaggccagtgacaacctggccgtgcagaacctgaagggcagcttcagcaatgccagcggcctgtttgagatccacggggccaccgtggtgcccatcgtgtctgtgctggcccctgagaagctgagcgccagcacccggcggcgctatgagacccaggtgcagacccggctgcagaccagcctggccaacctgcaccagaagagcagcgagattgagatcctggccgtggacctgcccaaggagaccatcctgcagttcctgagcctggagtgggatgctgatgagcaggccttcaacaccaccgtgaagcagctgctgagccggctgcccaagcagcgctacctgaagctggtgtgtgatgagatctacaacatcaaggtggagaagaaggtgtctgtgctcttcctgtacagctacagagatgactactaccgcatcctcttctag

SEQ ID NO: 18488 - DNA, 5652 bp, synthetic construct
  source 1..5652: mol_type = other DNA; note = Synthetic coding sequence
atgcctgtgggcagaattgaatgtcccagcagccccagcttcccccgggacatcagccatgaatgtcgggtgtgtggggtgacagaggtgggcctgagcgcctatgccaagcacatcagcggccagctgcacaaggacaacgtggatgcccaggagcgggaggatgatggcaagggggaggaggaggaggaggactactttgacaaggagctgatccagctgatcaagcagaggaaggagcagagccggcaggatgagcccagcaacagcaaccaggagatcaacagtgatgacagaagaccccagtggaggcgggaggaccgcatcccctaccaggaccgggagagctacagccagcctgcctggcaccaccggggccccccccagagggactggaagtgggagaaggatggcttcaacaacaccaggaagaacagcttcccccacagcctgagaaatggaggcggcccccggggccgcagcggctggcacaagggcgtggccggcggcagcagcacctggttccacaaccacagcaacagcggcggcggctggctgagcaacagcggggctgtggactggaaccacaatggaactggaagaaacagctcctggctgtctgagggcaccggcggcttcagctcctggcacatgaacaacagcaatggaaactggaagagctctgtgcgcagcaccaacaactggaactacagcggccctggggacaagttccagcccggcaggaacagaaacagcaactgccagatggaggacatgaccatgctgtggaacaagaagagcaacaagagcaacaagtacagccatgaccgctacaactggcagaggcaggagaatgacaagctgggcaccgtggccacctaccggggccccagcgagggcttcaccagtgacaagttccccagcgagggcctgctggacttcaactttgagcagctggagagccagaccaccaagcaggccgacacagccaccagcaaggtgtctgggaagaatggcagcgctgcccgggagaagccccggcgctggaccccctaccccagccagaagaccctggacctgcagagcggcctgaaggacatcaccggcaacaagtctgagatgattgagaagcccctgtttgacttcagcctcatcaccaccggcatccaggagccccagacagatgagaccaggaacagccccacccagaagacccagaaggagatccacacaggcagcctgaaccacaaggccagcagtgacagcgctgccagctttgaggtggtgcggcagtgccccacagctgagaagccagagcaggagcacacccccaacaagatgcccagcctgaagagccccctgctgccctgcccagccaccaagagcctgagccagaagcaggaccccaagaacatcagcaagaacaccaagaccaacttcttcagccctggagagcacagcaaccccagcaacaagcccaccgtggaggacaaccacggcccctacatcagcaagctgcggagcagctgcccccacgtgctgaagggcaacaagagcaccttcggcagccagaagcagagcggggacaacctgaatgacaccctgaggaaggccaaggaggtgctgcagtgccacgagagcctgcagaaccccctgctgagcaccagcaagagcaccaggaactatgccaaggccagcagaaatgtggaggagagcgagaagggcagcctgaagattgagttccaggtgcacgccctggaggatgaaagtgatggagagaccagtgacacagagaagcacggcaccaagattggcaccctgggcagcgccaccacagagctgctgagcggcagcaccaggacagcagatgagaaggaggaggatgaccgcatcctgaagaccagccgggagctgagcaccagcccctgcaaccccatcgtgcggcagaaggagagcgagctgcagatgaccagcgctgccagcccccaccctggcctgctgctggacctgaagaccagcctggaggatgcccaggtggatgacagcatcaagagccacgtgtcctatgaaacagagggctttgagagcgccagcctggatgctgagctgcagaagagtgacatcagccagcccagcggccccctgctgcctgagctgagcaagctgggcttccctgccagcctgcagagggacctgaccaggcacatcagcctgaagagcaagacaggagtgcacctgcctgagcccaacctgaacagcgcccggcgcatccggaacatcagcggccacaggaagtcagaaacagagaaggagagcggcctgaagcccaccctgcggcagatcctgaatgccagcagaagaaatgtgaactgggagcaggtgatccagcaggtgaccaagaagaagcaggagctgggcaagggcctgccccgcttcggcatcgagatggtgcccctggtgcagaatgagcaggaggccctggacctggatggagagccagacctgagcagcctggagggcttccagtgggagggcgtgtccatcagcagcagccctggcctggccaggaagaggagcctgtctgagagcagcgtcatcatggaccgggcccccagcgtgtacagcttcttcagcgaggagggcaccgggaaggaaaatgagccccagcagatggtgagccccagcaacagcctgcgggccggccagagccagaaggccaccatgcacctgaagcaggaggtgaccccccgggccgccagcctgaggactggagagcgggcagaaaatgtggccacccagaggaggcacagcgcccagctgagcagtgaccacatcatccccctgatgcacctggccaaggacctgaacagccaggagaggagcatccccccatctgagaaccagaacagccaggagagcaatggagagggcaactgcctgagcagcagcgccagcagcgccctggccatcagcagcctggctgatgctgccacagacagcagctgcaccagcggggctgagcagaatgatggccagagcatcaggaagaagaggcgggccactggagatggcagcagccctgagctgcccagcctggagaggaagaacaagaggaggaagatcaagggcaagaaggagaggagccaggtggaccagctgctgaacatcagcctgcgggaggaggagctgagcaagagcctgcagtgcatggacaacaacctgctgcaggcccgggccgccctgcagacagcctacgtggaggtgcagaggctgctgatgctgaagcagcagatcaccatggagatgtctgccctgcggacccaccgcatccagatcctgcagggcctgcaggagacctatgagcccagcgagcacccagaccaggtgccctgcagcctgacccgggagaggaggaacagccgcagccagaccagcattgatgctgccctgctgcccacccccttcttccccctcttcctggagccccccagcagccacgtgagccccagccccaccggggccagcctgcagatcaccaccagccccaccttccagacccacggctctgtgcctgccccagacagctctgtgcagatcaagcaggagcccatgagccctgagcaggatgaaaatgtgaatgctgtgccccccagcagcgcctgcaatgtgtccaaggagctgctggaggccaaccgggagatcagtgacagctgccctgtgtaccctgtgatcacagcccggctgagcctgcctgagagcacagagagcttccacgagcccagccaggagctgaagttctctgtggagcagaggaacaccaggaaccgggagaacagccccagcagccagagcgctggcctgagcagcatcaacaaggagggggaggagcccaccaagggcaacagcggcagcgaggcctgcaccagcagcttcctgcggctgagctttgccagcgagacccccctggagaaggagccccacagccctgctgaccagcctgagcagcaggccgagagcaccctgaccagcgctgagacccggggcagcaagaagaagaagaagctgaggaagaagaagagcctgcgggccgcccacgtgcctgagaacagcgacacagagcaggatgtgctgactgtgaagcctgtgaggaaggtgaaggccggcaagctgatcaagggcggcaaggtgaccaccagcacctgggaggacagcaggacaggccgggagcaggagagcgtgagagatgagccagacagcgacagcagcctggaggtgctggagatccccaacccccagctggaggtggtggccatcgacagcagcgagagcggggaggagaagccagacagccccagcaagaaggacatctggaacagcacagagcagaaccccctggagaccagccgcagcggctgtgatgaggtgagcagcaccagcgagatcggcacccgctacaaggatggcatccctgtgtctgtggccgagacccagaccgtcatcagcagcatcaagggcagcaagaacagcagcgagatcagcagcgagcctggagatgatgatgagcccacagagggcagctttgagggccaccaggccgctgtgaatgccatccagatcttcggcaacctgctgtacacctgcagcgctgacaagacagtgcgggtgtacaacctggtgtccaggaagtgcatcggcgtgtttgagggccacaccagcaaggtgaactgcctgctggtgacccagaccagcggcaagaatgctgccctgtacacaggcagcagtgaccacaccatccgctgctacaacgtgaagagcagagaatgtgtggagcagctgcagctggaggacagagtgctgtgcctgcacagccgctggaggatcctgtatgccggcctggccaacggcaccgtggtgaccttcaacatcaagaacaacaagaggctggagatctttgagtgccacggccccagggctgtgtcctgcctggccacagcccaggagggcgccaggaagctgctggtggtgggcagctatgactgcaccatctctgtgagagatgccagaaatggcctgctgctgcggaccctggagggccacagcaagaccatcctgtgcatgaaggtggtgaatgacctggtgttttctggcagcagtgaccagagcgtgcacgcccacaacatccacactggagagctggtgcgcatctacaagggccacaaccacgctgtgacagtggtgaacatcctgggcaaggtgatggtgacagcctgcctggacaagtttgtgcgggtgtatgagctgcagagccatgaccggctgcaggtgtatggaggccacaaggacatgatcatgtgcatgaccatccacaagtccatgatctacacaggctgctatgatggcagcatccaggccgtgcggctgaacctgatgcagaactaccgctgctggtggcacggctgcagcctcatcttcggcgtggtggaccacctgaagcagcacctgctgacagaccacaccaaccccaacttccagaccctgaagtgccgctggaagaactgtgatgccttcttcaccgccaggaagggcagcaagcaggatgctgctggccacatcgagagacatgctgaagatgacagcaagattgacagctag

SEQ ID NO: 18489 - DNA, 588 bp, synthetic construct
  source 1..588: mol_type = other DNA; note = Synthetic coding sequence
atggccgagcctgtgcaggaggagctgtctgtgctggccgccatcttctgccggccccatgagtgggaggtgctgagccgctcagaaacagatggcaccgtcttccgcatccacaccaaggccgagggcttcatggatgtggacatccccctggagctggtgttccacctgcctgtgaactaccccagctgcctgcccggcatcagcatcaacagcgagcagctgacccgggcccagtgtgtgacagtgaaggagaacctgctggagcaggccgagagcctgctgtctgagcccatggtgcatgagctggtgctgtggatccagcagaacctgcggcacatcctgagccagcctgagaccggcagcggcagcgagaagtgcaccttcagcaccagcaccaccatggatgatggcctgtggatcaccctgctgcacctggaccacatgagggccaagaccaagtatgtgaagatcgtggagaagtgggccagtgacctgcggctgaccggccgcctgatgttcatgggcaagatcatcctgatcctgctgcagggcgacaggaacaacctgaaggtgcccaagagctag

SEQ ID NO: 18490 - DNA, 1119 bp, synthetic construct
  source 1..1119: mol_type = other DNA; note = Synthetic coding sequence
atgagcagaagaagatttgactgccgcagcatcagcggcctgctgaccaccaccccccagatccccatcaagatggagaacttcaacaacttctacatcctgaccagcaaggagctgggccggggcaagtttgctgtggtgcggcagtgcatcagcaagagcacaggccaggagtatgctgccaagttcctgaagaagagaagaagaggccaggactgcagagctgagatcctgcatgaaattgctgtgctggagctggccaagagctgccccagggtcatcaacctgcacgaggtgtatgagaacaccagcgagatcatcctgatcctggagtatgctgctggaggagagatcttcagcctgtgcctgcctgagctggccgagatggtgtctgaaaatgatgtgatccgcctcatcaagcagatcctggagggcgtgtactacctgcaccagaacaacatcgtgcacctggacctgaagccccagaacatcctgctgagcagcatctaccccctgggggacatcaagatcgtggactttggcatgagcaggaagattggccacgcctgtgagctgcgggagatcatgggcaccccagagtacctggcccctgagatcctgaactatgaccccatcaccacagccacagacatgtggaacatcggcatcatcgcctacatgctgctgacccacaccagcccctttgtgggggaggacaaccaggagacctacctgaacatcagccaggtgaatgtggactacagcgaggagaccttcagctctgtgtcccagctggccacagacttcatccagagcctgctggtgaagaaccctgagaagaggcccacagctgagatctgcctgagccacagctggctgcagcagtgggactttgaaaatctcttccaccctgaggagaccagcagcagcagccagacccaggaccacagcgtgcgcagcagcgaggacaagaccagcaagagcagctgcaatggcacctgtggggaccgggaggacaaggagaacatccctgaggacagctccatggtgtccaagcgcttccgctttgatgacagcctgcccaacccccatgagctggtgtctgacctgctgtgctag

SEQ ID NO: 18491 - DNA, 930 bp, synthetic construct
  source 1..930: mol_type = other DNA; note = Synthetic coding sequence
atggaggccgccaggacagctgtgctgcgggtgaagaggaagaggtctgctgagcctgctgaggccctggtgctggcctgcaagaggctgcggagtgatgctgtggagagcgctgcccagaagaccagcgagggcctggagagagctgctgaaaataatgtgttccacctggtggccaccgtgtgcagccaggaggagcctgtgcagcccctgctgcgggaggtgctgcggcccagccgggacagccagcagagggtgagaagaaacctgcgggccagcgcccgggaggtgcggcaggagggccgctacagagtgctgagcagcagaagaagcctgggcaccaccagcagcggccaggagagcgagtacaccccaggcaaccctgaggccgccggcaacagcggcttccagctgctggacctggtgcatgaggagggggagcctgaggccgccagcgctggcagctgcaagaccagtgaccctgatgtgatcctgtgcaacagcgtggagctgatccgggagcggctgactgtgtctgaagatggccctggggtgcggcggcaggaggagcagaagcatgatgattatgtgtatgacatctactacctggagacagccaccccaggctggattgagaacatcctgtctgtgcagccctacagccaggagtgggagctggtgaatgatgaccaggagcctgaggacatctatgatgatgaagatgatgaaaattctgagaacaactggagaaatgagtacccagaggaggagagcagtgatggagatgaggacagccggggcagcgctgactacaacagcctgtctgaggaggagcggggcagcagccggcagaggatgtggagcaagtaccccctggatgtgcagaaggagtttggctatgacagcccccatgacctggacagcgactag

SEQ ID NO: 18492 - DNA, 1068 bp, synthetic construct
  source 1..1068: mol_type = other DNA; note = Synthetic coding sequence
atggctgacaacagcagtgatgaatgtgaggaggagaacaacaaggtgctgcgggagggcatgccccaggcccctggccaccggggcaaggacatggaccctgtgcccccagccccagccagcctgaagtgccaccagacccccagccacgtgctggagcgggtgggctggtaccgggagagccagaagcacaggaaggagaagaagaagaccagccagctgaccccccagaggggcttctctgaaaatgaagatgatgatgatgatgatgatgacagcagcgagacagacagcgacagtgatgatgatgatgaggagcacggggcccccctggagggcgcctatgaccctgctgactatgagcacctgcctgtgtctgctgagatcaaggagctgttccagtacatcagccgctacaccccccagctgattgacctggaccacaagctgaagcccttcatcccagacttcatcccagctgtgggggacattgatgccttcctgaaggtgcccaggccagatggcaagccagacaacctgggcctgctggtgctggatgagcccagcaccaagcagagcgaccccaccgtgctgagcctgtggctgacagagaacagcaagcagcacaacatcacccagcacatgaaggtgaagagcctggaggatgctgagaagaaccccaaggccatcgacacctggattgagagcatcagcgagctgcacaggagcaagcccccagccaccgtgcactacacccggcccatgccagacatcgacaccctgatgcaggagtggagccctgagtttgaggagctgctgggcaaggtgtccctgcccacagctgagattgactgcagcctggccgagtacatcgacatgatctgtgccatcctggacatccctgtgtacaagagccgcatccagagcctgcacctgctcttcagcctgtacagcgagttcaagaacagccagcacttcaaggccctggccgagggcaagaaggccttcacccccagcagcaacagcaccagccaggccggggacatggagaccctgaccttctcctag

SEQ ID NO: 18493 - DNA, 915 bp, synthetic construct
  source 1..915: mol_type = other DNA; note = Synthetic coding sequence
atggctgacaacagcagtgatgaatgtgaggaggagaacaacaaggagaagaagaagaccagccagctgaccccccagaggggcttctctgaaaatgaagatgatgatgatgatgatgatgacagcagcgagacagacagcgacagtgatgatgatgatgaggagcacggggcccccctggagggcgcctatgaccctgctgactatgagcacctgcctgtgtctgctgagatcaaggagctgttccagtacatcagccgctacaccccccagctgattgacctggaccacaagctgaagcccttcatcccagacttcatcccagctgtgggggacattgatgccttcctgaaggtgcccaggccagatggcaagccagacaacctgggcctgctggtgctggatgagcccagcaccaagcagagcgaccccaccgtgctgagcctgtggctgacagagaacagcaagcagcacaacatcacccagcacatgaaggtgaagagcctggaggatgctgagaagaaccccaaggccatcgacacctggattgagagcatcagcgagctgcacaggagcaagcccccagccaccgtgcactacacccggcccatgccagacatcgacaccctgatgcaggagtggagccctgagtttgaggagctgctgggcaaggtgtccctgcccacagctgagattgactgcagcctggccgagtacatcgacatgatctgtgccatcctggacatccctgtgtacaagagccgcatccagagcctgcacctgctcttcagcctgtacagcgagttcaagaacagccagcacttcaaggccctggccgagggcaagaaggccttcacccccagcagcaacagcaccagccaggccggggacatggagaccctgaccttctcctag

SEQ ID NO: 18494 - DNA, 1335 bp, synthetic construct
  source 1..1335: mol_type = other DNA; note = Synthetic coding sequence
atgagggagatcgtgcacctgcaggccggccagtgtggcaaccagatcggggccaagttctgggaggtgatcagtgatgagcacggcatcgaccccaccggcacctaccatggagacagcgacctgcagctggagcgcatcaacgtgtactacaatgaggccactggaggcaactacgtgcccagggctgtgctggtggacctggagcccggcaccatggattctgtgcgcagcggccccttcggccagatcttccggccagacaactttgtgtttggccagagcggggccggcaacaactgggccaagggccactacacagaaggagctgagctggtggatgctgtgctggatgtggtgaggaaggaggccgagagctgtgactgcctgcagggcttccagctgacccacagcctgggcggcggcactggaagtggcatgggcaccctgctgatcagcaagatccgggaggagttcccagaccgcatcatgaacaccttctctgtggtgcccagccccaaggtgtctgacacagtggtggagccctacaatgccaccctgtctgtgcaccagctggtggagaacacagatgagacctactgcatcgacaatgaggccctgtatgacatctgcttccgcaccctgaagctgaccacccccacctacggggacctgaaccacctggtgtctgccaccatgtctggagtgaccacctgcctgcgcttccctggccagctgaatgctgacctgaggaagctggccgtgaacatggtgcccttcccccggctgcacttcttcatgcctggctttgcccccctgaccagccggggcagccagcagtaccgggccctgactgtgcctgagctgacccagcagatgtttgatgccaagaacatgatggccgcctgtgaccccaggcatggccgctacctgactgtggccgctgtgttccggggccgcatgtccatgaaggaggtggatgagcagatgctgtctgtgcagagcaagaacagcagctactttgtggagtggatccccaacaacgtgaagacagctgtgtgtgacatccccccccggggcctgaagatggccgccaccttcatcggcaacagcacagccatccaggagctgttcaagaggatcagcgagcagttcaccgccatgttccggaggaaggccttcctgcactggtacacaggagagggcatggatgagatggagttcacagaagctgagagcaacatgaatgacctggtgtctgagtaccagcagtaccaggatgccacagctgaggagggggagtttgaggaggaggccgaggaggaggtggcctag

SEQ ID NO: 18495 - DNA, 1398 bp, synthetic construct
  source 1..1398: mol_type = other DNA; note = Synthetic coding sequence
atggagcccagcagcctggagctgcctgctgacacagtgcagagaattgctgctgagctgaagtgccaccccacagatgagcgggtggccctgcacctggatgaggaggacaagctgcggcacttccgggagtgcttctacatccccaagatccaggacctgccccctgtggacctgagcctggtgaacaaggatgaaaatgccatctacttcctgggcaacagcctgggcctgcagcccaagatggtgaagacctacctggaggaggagctggacaagtgggccaagattgctgcctacggccacgaggtgggcaagaggccctggatcactggagatgagagcatcgtgggcctgatgaaggacatcgtgggcgccaatgagaaggagatcgccctgatgaatgccctgactgtgaacctgcacctgctgatgctgtccttcttcaagcccacccccaagcgctacaagatcctgctggaggccaaggccttccccagcgaccactacgccatcgagagccagctgcagctgcacggcctgaacatcgaggagagcatgaggatgatcaagccccgggagggggaggagaccctgagaattgaggacatcctggaggtgattgagaaggagggggacagcattgctgtgatcctcttctctggagtgcacttctacacaggccagcacttcaacatcccagccatcaccaaggccggccaggccaagggctgctacgtgggctttgacctggcccatgctgtgggcaatgtggagctgtacctgcatgactggggcgtggactttgcctgctggtgcagctacaagtacctgaatgctggggccggcggcattgctggggccttcatccacgagaagcacgcccacaccatcaagccagccctggtgggctggtttggccacgagctgagcacccgcttcaagatggacaacaagctgcagctgatccctggggtgtgtggcttccgcatcagcaacccccccatcctgctggtgtgcagcctgcacgccagcctggagatcttcaagcaggccaccatgaaggccctgaggaagaagtctgtgctgctgaccggctacctggagtacctgatcaagcacaactacggcaaggacaaggccgccaccaagaagcctgtggtgaacatcatcacccccagccacgtggaggagcggggctgccagctgaccatcaccttctctgtgcccaacaaggatgtgttccaggagctggagaagaggggcgtggtgtgtgacaagaggaaccccaacggcatccgggtggcccctgtgcccctgtacaacagcttccatgatgtgtacaagttcaccaacctgctgaccagcatcctggacagcgctgagaccaagaactag

SEQ ID NO: 18496 - DNA, 4758 bp, synthetic construct
  source 1..4758: mol_type = other DNA; note = Synthetic coding sequence
atgaacagccagccccagaccaggagccccttcttccagaggccccagatccagcccccccgggccaccatccccaacagcagccccagcatccggcctggggcccagacccccacagctgtgtaccaggccaaccagcacatcatgatggtgaaccacctgcccatgccctaccctgtgccccagggcccccagtactgcatcccccagtaccgccacagcggccccccctacgtgggccccccccagcagtaccctgtgcagcccccaggccctggccccttctacccaggccctggccctggggacttccccaatgcctacggcacccccttctaccccagccagcctgtgtaccagagcgcccccatcatcgtgcccacccagcagcagcccccaccagccaagcgggagaagaagaccatccgcatccgggaccccaaccagggcggcaaggacatcacagaggagatcatgtctgggggcggcagcaggaaccccaccccacccatcggccggcccaccagcacccccaccccaccccagcagctgcccagccaggtgcctgagcacagccctgtggtgtatggcaccgtggagagcgcccacctggccgccagcacccctgtgacagctgccagtgaccagaagcaggaggagaagcccaagccagaccctgtgctgaagagccccagccctgtgctgcggctggtgctgagcggggagaagaaggagcaggagggccagaccagcgagaccacagccatcgtgtccattgctgagctgcccctgccccccagccccaccaccgtgtcctctgtggcccggagcaccatcgccgcccccaccagcagcgccctgagcagccagcccatcttcaccacagccattgatgacagatgtgagctgagcagcccccgggaggacaccatccccatccccagcctgaccagctgcacagagaccagtgaccccctgcccaccaatgaaaatgatgatgacatctgcaagaagccctgcagcgtggccccaaatgacatccccctggtgagcagcaccaacctgatcaatgagatcaacggggtgtctgagaagctgagcgccacagagagcatcgtggagatcgtgaagcaggaggtgctgcccctgaccctggagctggagatcctggagaaccccccagaggagatgaagctggagtgcatcccagcccccatcacccccagcacagtgcccagcttcccccccaccccacccaccccaccagccagccccccccacacccctgtgattgtgcctgctgctgccaccaccgtgagcagccccagcgctgccatcaccgtgcagagggtgctggaggaggatgagagcatccgcacctgcctgtctgaagatgccaaggagatccagaacaagattgaggtggaggctgatggccagacagaggagatcctggacagccagaacctgaacagcagaagaagccctgtgcctgcccagatcgccatcaccgtgcccaagacctggaagaagcccaaggacaggaccaggaccacagaggagatgctggaggccgagctggagctgaaggccgaggaggagctgagcattgacaaggtgctggagagcgagcaggacaagatgagccagggcttccaccctgagcgggaccccagcgacctgaagaaggtgaaggctgtggaggagaatggagaggaggccgagcctgtgagaaatggagctgagagcgtgtctgagggggagggcattgatgccaacagcggcagcacagacagcagtggagatggagtgaccttccccttcaagccagagagctggaagcccacagacacagagggcaagaagcagtatgaccgggagttcctgctggacttccagttcatgcctgcctgcatccagaagccagagggcctgccccccatcagtgatgtggtgctggacaagatcaaccagcccaagctgcccatgaggaccctggacccccgcatcctgccccggggccctgacttcaccccagcctttgctgactttggccggcagaccccaggcggccggggcgtgcccctgctgaatgtgggcagccgccgcagccagcccggccagaggcgggagcccaggaagatcatcaccgtgtctgtgaaggaggatgtgcacctgaagaaggccgagaatgcctggaagcccagccagaagagggacagccaggctgatgatcctgagaacatcaagacccaggagctgttcaggaaggtgcgcagcatcctgaacaagctgaccccccagatgttcaaccagctgatgaagcaggtgtctggcctgactgtggacacagaggagcggctgaagggcgtcatcgacctggtgtttgagaaggccattgatgagcccagcttctctgtggcctatgccaacatgtgccgctgcctggtgaccctgaaggtgcccatggctgacaagccaggcaacacagtgaacttcaggaagctgctgctgaaccgctgccagaaggagtttgagaaggacaaggcagatgatgatgtgtttgagaagaagcagaaggagctggaggccgccagcgcccctgaggagaggacccggctgcatgatgagctggaggaggccaaggacaaggccaggagaagaagcatcggcaacatcaagttcatcggggagctgttcaagctgaagatgctgacagaggccatcatgcatgactgtgtggtgaagctgctgaagaaccatgatgaggagagcctggagtgcctgtgccgcctgctgaccaccatcggcaaggacctggactttgagaaggccaagcccaggatggaccagtacttcaaccagatggagaagatcgtgaaggagaggaagaccagcagccgcatccgcttcatgctgcaggatgtgattgacctgcggctgtgcaactgggtgtccagaagagctgaccagggccccaagaccatcgagcagatccacaaggaggccaagattgaggagcaggaggagcagaggaaggtgcagcagctgatgaccaaggagaagagaagacctggggtgcagagggtggatgaaggaggctggaacacagtgcagggcgccaagaacagccgggtgctggaccccagcaagttcctgaagatcaccaagcccaccattgatgagaagatccagctggtgcccaaggcccagctgggctcctggggcaagggcagcagcggcggggccaaggccagcgagacagatgccctgcggagcagcgccagcagcctgaaccgcttcagcgccctgcagcccccagcccccagcggcagcacccccagcacccctgtggagtttgacagcaggaggaccctgaccagccggggctccatgggccgggagaagaatgacaagcccctgcccagcgccacagcccggcccaacaccttcatgaggggcggcagcagcaaggacctgctggacaaccagagccaggaggagcagaggcgggagatgctggagaccgtgaagcagctgactggaggagtggatgtggagaggaacagcacagaagctgagaggaacaagacccgggagagcgccaagccagagatcagcgccatgtctgcccatgacaaggccgccctgtctgaggaggagctggagaggaagagcaagagcatcattgatgagttcctgcacatcaatgacttcaaggaggccatgcagtgtgtggaggagctgaatgcccagggcctgctgcacgtgtttgtgcgggtgggcgtggagagcaccctggagaggagccagatcacccgggaccacatgggccagctgctgtaccagctggtgcagagcgagaagctgagcaagcaggacttcttcaagggcttcagcgagaccctggagctggctgatgacatggccatcgacatcccccacatctggctgtacctggccgagctggtgacccccatgctgaaggagggcggcatctccatgagggagctgaccatcgagttcagcaagcccctgctgcctgtgggccgggccggcgtgctgctgtctgagatcctgcacctgctgtgcaagcagatgagccacaagaaggtgggcgccctgtggagggaggccgacctgtcctggaaggacttcctgcctgaaggagaagatgtgcacaacttcctgctggagcagaagctggacttcattgaaagtgacagcccctgcagcagcgaggccctgagcaagaaggagctgtctgctgaggagctgtacaagaggctggagaagctgatcatcgaggacaaggccaatgatgagcagatctttgactgggtggaggccaacctggatgagatccagatgagcagccccaccttcctgcgggccctgatgacagctgtgtgcaaggccgccatcatcgctgacagcagcaccttccgggtggacacagctgtgatcaagcagagggtgcccatcctgctgaagtacctggacagcgacacagagaaggagctgcaggccctgtatgccctgcaggccagcatcgtgaagctggaccagcctgccaacctgctgaggatgttctttgactgcctgtatgatgaggaggtgatcagtgaagatgccttctacaagtgggagagcagcaaggaccctgctgagcagaatggaaaaggagtggccctgaagtctgtgacagccttcttcacctggctgcgggaggccgaggaggagagcgaggacaactag

SEQ ID NO: 18497 - DNA, 378 bp, synthetic construct
  source 1..378: mol_type = other DNA; note = Synthetic coding sequence
atggccccagccaagaagggcggggagaagaagaagggccgcagcgccatcaatgaggtggtgacccgggagtacaccatcaacatccacaagaggatccacggcgtgggcttcaagaagagggccccccgggccctgaaggagatcaggaagtttgccatgaaggagatgggcaccccagatgtgagaattgacacccggctgaacaaggctgtgtgggccaagggcatcagaaatgtgccctaccgcatccgggtgcggctgagcaggaagagaaatgaagatgaggacagccccaacaagctgtacaccctggtgacctacgtgcctgtgaccaccttcaagaacctgcagacagtgaatgtggatgagaactag

SEQ ID NO: 18498 - DNA, 1590 bp, synthetic construct
  source 1..1590: mol_type = other DNA; note = Synthetic coding sequence
atgctggtgctgtttgagacctctgtgggctacgccatcttcaaggtgctgaatgagaagaagctgcaggaggtggacagcctgtggaaggagtttgagaccccagagaaggccaacaagatcgtgaagctgaagcactttgagaagttccaggacacagctgaggccctggccgccttcaccgccctgatggagggcaagatcaacaagcagctgaagaaggtgctgaagaagatcgtgaaggaggcccacgagcccctggccgtggctgatgccaagctgggcggcgtcatcaaggagaagctgaacctgagctgcatccacagccctgtggtgaatgagctgatgaggggcatccgcagccagatggatggcctcatccctggggtggagccccgggagatggccgccatgtgcctgggcctggcccacagcctgagccgctaccgcctgaagttctctgctgacaaggtggacaccatgattgtgcaggccatcagcctgctggatgacctggacaaggagctgaacaactacatcatgcgctgccgggagtggtacggctggcacttccctgagctgggcaagatcatcagtgacaacctgacctactgcaagtgcctgcagaaggtgggggacaggaagaactatgccagcgccaagctgtctgagctgctgcctgaggaggtggaggccgaggtgaaggctgctgctgagatctccatgggcacagaggtgtctgaggaggacatctgcaacatcctgcacctgtgcacccaggtgattgagatcagcgagtaccgcacccagctgtatgagtacctgcagaacaggatgatggccatcgccccaaatgtgacagtgatggtgggggagctggtgggcgcccggctgattgcccacgccggcagcctgctgaacctggccaagcacgccgccagcacagtgcagatcctgggcgctgagaaggccctcttccgggccctgaagagccggcgggacacccccaagtatggcctcatctaccacgccagcctggtgggccagaccagccccaagcacaagggcaagatcagcaggatgctggccgccaagacagtgctggccatccgctatgatgcctttggagaggacagcagcagcgccatgggcgtggagaacagagccaagctggaggcccggctgcggaccctggaggaccggggcatcaggaagatctctggaacaggcaaggccctggccaagacagagaagtatgagcacaagtctgaggtgaagacctatgaccccagcggggacagcaccctgcccacctgcagcaagaagaggaagattgagcaggtggacaaggaggatgagatcacagagaagaaggccaagaaggccaagatcaaggtgaaggtggaggaggaggaggaggagaaggtggccgaggaggaggagacctctgtgaagaagaagaagaagaggggcaagaagaagcacatcaaggaggagcccctgtctgaggaggagccctgcaccagcacagccatcgccagccctgagaagaagaagaagaagaagaagaagcgggagaatgaagattag

SEQ ID NO: 18499 - DNA, 738 bp, synthetic construct
  source 1..738: mol_type = other DNA; note = Synthetic coding sequence
atgaatggccgggctgacttccgggagcccaatgctgaggtgccccggcccatcccccacatcggccctgactacatccccacagaggaggagcggcgggtgtttgctgaatgtaatgatgagagcttctggttccgctctgtgcccctggccgccacctccatgctgatcacccagggcctcatcagcaagggcatcctgagcagccaccccaagtatggcagcatccccaagctgatcctggcctgcatcatgggctactttgctgggaagctgtcctatgtgaagacctgccaggagaagttcaagaagctggagaacagccccctgggggaggccctgcggagcggccaggcccggcgcagcagccccccaggccactactaccagaagagcaaatatgacagctctgtgtctggccagagcagctttgtgaccagccctgctgctgacaacatcgagatgctgccccactatgagcccatccccttcagcagctccatgaatgaaagtgcccccaccggcatcacagaccacatcgtgcagggccctgaccccaacctggaggagagccccaagaggaagaacatcacctatgaggagctgaggaacaagaaccgggagagctatgaggtgtccctgacccagaagacagaccccagcgtgcggcccatgcatgagcgggtgcccaagaaggaggtgaaggtgaacaagtatggagacacctgggatgaatag

SEQ ID NO: 18500 - DNA, 1746 bp, synthetic construct
  source 1..1746: mol_type = other DNA; note = Synthetic coding sequence
atggaggatgtgaacagcaatgtgaatgctgaccaggaggtgaggaagctgcaggagctggtgaagaagctggagaagcagaatgagcagctgcggagccgctctggagctgtgcagggcgccggcagcctgggccctggcagccctgtgcgggccggggccagcatccccagcagtggagctgccagcccccggggcttccccctgggcctgagcgccaagagcggcggcggccctggcagcggccccaggaggaccagcagcgaggagctgagagatgccaccagcctgctggccgccggggagggcggcctgctggatgaggtggagcccctgcggccagatgagctggagcggctgagcggctgggaggaggaggaggagagctggctgtacagcagccccaagaagaagctgacccccatgcagaagtctgtgagccccctggtgtggtgccggcaggtgctggactaccccagcccagatgtggagtgtgccaagaagagcctcatccacaagctggaccagaccatgtctgccctgaagaggcagaacctgtacaacaaccccttcaacagcatgagctacaccagcccctacagccccaatgccagcagcccctacagcagcggcttcaacagccccagcagcacccctgtgcggccccccatcgtgaagcagctgatcctgcccggcaacagcggcaacctgaagagcagtgacaggaacccccccctgagcccccagagcagcattgacagcgagctgagcgccagcgagctggatgaagattccatcggcagcaactacaagctgaatgatgtgacagatgtgcagatcctggccaggatgcaggaggagagcctgcggcaggagtatgctgccaccaccagcagaagaagcagcggcagcagctgcaacagcacccggcggggcaccttcagtgaccaggagctggatgcccagagcctggatgatgaagatgacaacatgcaccacgctgtgtacccagctgtgaaccgcttcagccccagccccaggaacagcccccggcccagccccaagcagagccccaggaacagccccaggagccgcagccctgcccggggcatcgagtacagccgggtgagcccccagcccatgatcagccggctgcagcagccccggctgagcctgcagggccaccccacagacctgcagaccagcaatgtgaagaatgaggagaagctgcggcgcagcctgcccaacctgagcaggaccagcaacacccaggtggacagcgtgaagagcagcagaagtgacagcaacttccaggtgcccaatggaggcatccccaggatgcagccccaggccagcgccatccccagccctgggaagttccgcagccctgctgcccccagccccctggccctgcggcagcctgtgaaggccttcagcaaccacggcagcggcagccctggcagccaggagatcacccagctgacccagaccaccagcagccctggcccccccatggtgcagagcacagtgtctgccaacccccccagcaacatcaacagcgccaccctgaccaggcctgctggcaccacagccatgaggagcggcctgccccggcccagcgcccccagcgctgggggcatccctgtgcccaggagcaagctggcccagcctgtgagaagaagcctgcctgcccccaagacctacggctccatgaaggatgacagctggaaggatggctgctactag

SEQ ID NO: 18501 - DNA, 3153 bp, synthetic construct
  source 1..3153: mol_type = other DNA; note = Synthetic coding sequence
atgctgtgctggggctactggagcctgggccagcccggcatcagcaccaacctgcagggcatcgtggccgagccccaggtgtgtggcttcatcagtgacagatctgtgaaggaggtggcctgtggcggcaaccacagcgtcttcctgctggaggatggagaggtgtacacctgtggcctgaacaccaagggccagctgggccacgagcgggagggcaacaagccagagcagatcggggccctggccgaccagcacatcatccacgtggcctgtggggagagccacagcctggccctgagtgaccggggccagctgttctcctggggcgccggcagtgatggccagctgggcctgatgaccacagaggacagcgtggccgtgcccaggctcatccagaagctgaaccagcagaccatcctgcaggtgtcctgtggcaactggcactgcctggccctggccgcagatggccagttcttcacctggggcaagaacagccacggccagctgggcctgggcaaggagttccccagccaggccagcccccagagggtgcgcagcctggagggcatccccctggcccaggtggccgccggcggggcccacagctttgccctgagcctgagcggggctgtgtttggctggggcatgaacaatgccggccagctgggcctgagtgatgagaaggaccgggagagcccctgccacgtgaagctgctgcggacccagaaggtggtgtacatcagctgtggggaggagcacacagctgtgctgaccaagagcggcggcgtcttcaccttcggggccggcagctgtggccagctgggccatgacagcatgaatgatgaggtgaacccccggcgggtgctggagctgatgggcagcgaggtgacccagatcgcctgtggccggcagcacaccctggcctttgtgcccagcagcggcctcatctatgccttcggctgtggggcccggggccagctgggcaccggccacacctgcaatgtgaagtgccccagccctgtgaagggctactgggccgcccacagcggccagctgagcgcccgggctgaccgcttcaagtaccacatcgtgaagcagatcttctctggaggagaccagacctttgtgctgtgcagcaaatatgagaactacagccctgctgtggacttccgcaccatgaaccaggcccactacaccagcctcatcaatgatgagaccatcgctgtgtggaggcagaagctgtctgagcacaacaatgccaacaccatcaacggggtggtgcagatcctgagcagcgctgcctgctggaatggcagcttcctggagaagaagattgatgagcacttcaagaccagccccaagatccctggcatcgacctgaacagcaccagggtgctgtttgagaagctgatgaacagccagcacagcatgatcctggagcagatcctgaacagctttgagagctgcctgatcccccagctgagcagcagccccccagatgtggaggccatgaggatctacctgatcctgcctgagttccccctgctgcaggacagcaagtactacatcaccctgaccatccccctggccatggccatcctgcggctggacaccaaccccagcaaggtgctggacaactggtggagccaggtgtgccccaagtacttcatgaagctggtgaacctgtacaagggagctgtgctgtacctgctgcggggcaggaagaccttcctgatccctgtgctcttcaacaactacatcacagctgccctgaagctgctggagaagctgtacaaggtgaacctgaaggtgaagcacgtggagtatgacaccttctacatccctgagatcagcaacctggtggacatccaggaggactacctgatgtggttcctgcaccaggccggcatgaaggcccggcccagcatcatccaggacacagtgaccctgtgcagctaccccttcatctttgatgcccaggccaagaccaagatgctgcagacagatgctgagctgcagatgcaggtggccgtgaatggagccaacctgcagaatgtgttcatgctgctgaccctggagcccctgctggcccggagccccttcctggtgctgcacgtgagaagaaacaacctggtgggagatgccctgcgggagctgagcatccacagcgacatcgacctgaagaagcccctgaaggtgatctttgatggagaggaggccgtggatgctggaggagtgaccaaggagttcttcctgctgctgctgaaggagctgctgaaccccatctacggcatgttcacctactaccaggacagcaacctgctgtggttcagtgacacctgctttgtggagcacaactggttccacctgattggcatcacctgtggcctggccatctacaacagcacagtggtggacctgcacttccccctggccctgtacaagaagctgctgaatgtgaagccaggcctggaggacctgaaggagctgagccccacagagggccgcagcctgcaggagctgctggactacccaggagaagatgtggaggagaccttctgcctgaacttcaccatctgccgggagagctatggagtgattgagcagaagaagctgatccctggaggagacaacgtgacagtgtgcaaggacaaccggcaggagtttgtggatgcctacgtgaactacgtgttccagatctctgtgcatgagtggtacacagccttcagcagcggcttcctgaaggtgtgtggcggcaaggtgctggagctgttccagcccagcgagctgcgggccatgatggtgggcaacagcaactacaactgggaggagctggaggagacagccatctacaagggggactacagcgccacccaccccaccgtgaagctgttctgggagaccttccacgagttccccctggagaagaagaagaagttcctgctcttcctgactggaagtgaccgcatccccatctacggcatggccagcctgcagatcgtcatccagagcacagccagcggggaggagtacctgcctgtggcccacacctgctacaacctgctggacctgcccaagtacagcagcaaggagatcctgagcgcccggctgacccaggccctggacaactatgagggcttcagcctggcctag

SEQ ID NO: 18502 - DNA, 3069 bp, synthetic construct
  source 1..3069: mol_type = other DNA; note = Synthetic coding sequence
atgtacttctgctggggcgctgacagccgggagctgcagaggagaagaacagctggcagccctggagctgagctgctgcaggccgccagcggggagcggcacagcctgctgctgctgaccaaccaccgggtgctgagctgtggggacaacagccggggccagctgggcagaagaggagcccagagaggagagctgcctgagcccatccaggccctggagaccctcatcgtggacctggtgtcctgtgggaaggagcacagcctggccgtgtgccacaagggccgggtgtttgcctggggcgccggcagcgagggccagctgggcattggagagttcaaggagatctccttcacccccaagaagatcatgaccctgaatgacatcaagatcatccaggtgtcctgtggccactaccacagcctggccctgagcaaggacagccaggtgttctcctggggcaagaacagccacggccagctgggcctgggcaaggagttccccagccaggccagcccccagagggtgcgcagcctggagggcatccccctggcccaggtggccgccggcggggcccacagctttgccctgagcctgtgtggcaccagctttggctggggcagcaacagcgctggccagctggccctgagcggcagaaatgtgcctgtgcagagcaacaagcccctgtctgtgggcgccctgaagaacctgggcgtggtgtacatcagctgtggagatgcccacacagctgtgctgacccaggacggcaaggtgttcaccttcggggacaacagaagtggccagctgggctacagccccaccccagagaagaggggcccccagctggtggagagaattgatggcctggtgtcccagattgactgtggcagctaccacaccctggcctacgtgcacaccaccggccaggtggtgtcctttggccacggccccagcgacaccagcaagcccacccaccctgaggccctgacagagaactttgacatcagctgcctgatctctgcagaagattttgtggatgtgcaggtgaagcacatctttgctggcacctacgccaactttgtgaccacccaccaggacaccagcagcacccgggcccctgggaagaccctgcctgagatcagccgcatcagccagagcatggccgagaagtggattgctgtgaagagaagaagcacagagcacgagatggccaagtctgagatccgcatgatcttcagcagccctgcctgcctgacagccagcttcctgaagaagaggggcactggagagaccaccagcattgatgtggacctggagatggcccgggacaccttcaagaagctgaccaagaaggagtggatcagctccatgatcaccacctgcctggaggatgacctgctgcgggccctgccctgccacagcccccaccaggaggccctgagcgtcttcctgctgctgcctgaatgtcctgtgatgcatgacagcaagaactggaagaacctggtggtgccctttgccaaggctgtgtgtgagatgagcaagcagagcctgcaggtgctgaagaagtgctgggccttcctgcaggagagcagcctgaaccccctcatccagatgctgaaggccgccatcatcagccagctgctgcaccagaccaagacagagcaggaccactgcaatgtgaaggccctgctgggcatgatgaaggagctgcacaaggtgaacaaggccaactgccgcctgcctgagaacaccttcaacatcaatgagctgagcaacctgctgaacttctacatcgaccggggccggcagctgttccgggacaaccacctgatcccagctgagacccccagccctgtgatcttcagtgacttccccttcatcttcaacagcctgagcaagatcaagctgctgcaggccgacagccacatcaagatgcagatgtctgagaagaaggcctacatgctgatgcatgagaccatcctgcagaagaaggatgagttcccccccagcccccgcttcatcctgcgggtgagaagaagccggctggtgaaggatgccctgcggcagctgagccaggccgaggccacagacttctgcaaggtgctggtggtggagttcatcaatgagatctgcccagagagcggaggagtgagcagcgagttcttccactgcatgtttgaggagatgaccaagccagaatatggcatgttcatgtacccagagatgggcagctgcatgtggttccctgccaagcccaagccagagaagaagcgctacttcctgtttggcatgctgtgtggcctgagcctcttcaacctgaatgtggccaacctgcccttccccctggccctgtacaagaagctgctggaccagaagcccagcctggaggacctgaaggagctgagcccccggctgggcaagagcctgcaggaggtgctggatgatgctgctgatgacattggagatgccctgtgcatccgcttcagcatccactgggaccagaatgatgtggacctgatccccaacggcatcagcatccctgtggaccagaccaacaagagggactatgtgtccaagtacatcgactacatcttcaacgtgtctgtgaaggctgtgtatgaggagttccagaggggcttctacagagtgtgtgagaaggagatcctgcggcacttctacccagaggagctgatgacagccatcatcggcaacacagattatgactggaagcagtttgagcagaacagcaaatatgagcagggctaccagaagagccaccccaccatccagctgttctggaaggccttccacaagctgaccctggatgagaagaagaagttcctgttcttcctgaccggccgggaccggctgcacgcccggggcatccagaagatggagatcgtgttccgctgcccagagaccttcagcgagcgggaccaccccaccagcatcacctgccacaacatcctgagcctgcccaagtacagcaccatggagaggatggaggaggccctgcaggtggccatcaacaacaacagaggatttgtgagccccatgctgacccagagctag

SEQ ID NO: 18503 - DNA, 1221 bp, synthetic construct
  source 1..1221: mol_type = other DNA; note = Synthetic coding sequence
atggctgctgctgtgcggcaggacctggcccagctgatgaacagcagcggcagccacaaggacctggccggcaagtaccggcagatcctggagaaggccatccagctgtctggagctgagcagctggaggccctgaaggcctttgtggaggccatggtgaatgaaaatgtgtccctggtgatcagccggcagctgctgacagacttctgcacccacctgcccaacctgcctgacagcacagccaaggagatctaccacttcaccctggagaagatccagcccagggtcatcagctttgaggagcaggtggccagcatccggcagcacctggccagcatctatgagaaggaggaggactggagaaatgctgcccaggtgctggtgggcatccccctggagaccggccagaagcagtacaacgtggactacaagctggagacctacctgaagatcgcccggctgtacctggaggatgatgatcctgtgcaggccgaggcctacatcaacagagccagcctgctgcagaatgaaagcaccaatgagcagctgcagatccactacaaggtgtgctacgcccgggtgctggactacagaaggaagttcatcgaggccgcccagcgctacaatgagctgagctacaagaccatcgtgcatgagagcgagcggctggaggccctgaagcacgccctgcactgcaccatcctggccagcgctggccagcagaggagcaggatgctggccaccctcttcaaggatgagcgctgccagcagctggccgcctacggcatcctggagaagatgtacctggaccgcatcatccggggcaaccagctgcaggagtttgctgccatgctgatgccccaccagaaggccaccacagcagatggcagcagcatcctggacagagctgtgattgagcacaacctgctgagcgccagcaagctgtacaacaacatcacctttgaggagctgggcgccctgctggagatcccagctgccaaggccgagaagatcgccagccagatgatcacagagggccgcatgaatggcttcatcgaccagattgatggcatcgtgcactttgagacccgggaggccctgcccacctgggacaagcagatccagagcctgtgcttccaggtgaacaacctgctggagaagatcagccagacagcccctgagtggacagcccaggccatggaggcccagatggcccagtag

SEQ ID NO: 18504 - DNA, 1578 bp, synthetic construct
  source 1..1578: mol_type = other DNA; note = Synthetic coding sequence
atggctgctggcctgctgggctctgaagatcctccctggagctggaacctgacctgccgggccctgcggacctgccaggtgaggaacatccgggtgctgcagctgctgctgaagccctggtgcatcagcagagctgtgtaccagatgacagagggccgccgctgccaggtgcacctgctggatgacaggaagctggagctgctggtgcagcccaagctgctggccaaggagctgctggacctggtggccagccacttcaacctgaaggagaaggagtacttcggcatcgccttcacagatgagaccggccacctgaactggctgcagctggaccggcgggtgctggagcatgacttccccaagaagagcggccctgtggtgctgtacttctgtgtgcgcttctacatcgagagcatctcctacctgaaggacaatgccaccatcgagctgttcttcctgaatgccaagagctgcatctacaaggagctgattgatgtggacagcgaggtggtgtttgagctggccagctacatcctgcaggaggccaagggggacttcagcagcaatgaggtggtgcggagtgacctgaagaagctgcctgccctgcccacccaggccctgaaggagcaccccagcctggcctactgtgaagatagagtgattgagcactacaagaagctgaatggccagacccggggccaggccatcgtgaactacatgagcatcgtggagagcctgcccacctatggagtgcactactatgctgtgaaggacaagcagggcatcccctggtggctgggcctgagctacaagggcatcttccagtatgactaccatgacaaggtgaagcccaggaagatcttccagtggaggcagctggagaacctgtacttccgggagaagaagttctctgtggaggtgcatgacccccggcgggcctctgtgaccaggaggaccttcggccacagcggcattgctgtgcacacctggtacgcctgcccagccctgatcaagagcatctgggccatggccatcagccagcaccagttctacctggacaggaagcagagcaagagcaagatccatgctgcccggagcctgtctgagatcgccatcgacctgacagaaacaggcaccctgaagaccagcaagctggccaacatgggcagcaagggcaagatcatcagcggcagcagcggcagcctgctgagcagcggcagccaggagagtgacagcagccagagcgccaagaaggacatgctggccgccctgaagagccggcaggaggccctggaggagaccctgcggcagaggctggaggagctgaagaagctgtgcctgcgggaggccgagctgaccgggaagctgcctgtggagtaccccctggaccccggggaggagccccccatcgtgagaagaagaattggaacagccttcaagctggatgagcagaagatcctgcccaagggggaggaggccgagctggagcggctggagcgggagtttgccatccagagccagatcacagaagctgcccggcggctggccagtgaccccaacgtgtccaagaagctgtag

SEQ ID NO: 18505 - DNA, 1605 bp, synthetic construct
  source 1..1605: mol_type = other DNA; note = Synthetic coding sequence
atgaagcaggagggcagcgccaggagaagaggagctgacaaggccaagcccccacctgggggcggggagcaggagcccccacctcctccagccccccaggatgtggagatgaaggaggaggccgccactggaggcggcagcactggagaggctgatggcaagacagctgctgctgctgctgagcacagccagcgggagctggacacagtgaccctggaggacatcaaggagcacgtgaagcagctggagaaggctgtgtctgggaaggagcccaggtttgtgctgcgggccctgaggatgctgcccagcaccagccggcggctgaaccactacgtgctgtacaaggctgtgcagggcttcttcaccagcaacaatgccacccgggacttcctgctgcccttcctggaggagcccatggacacagaagctgacctgcagttccggcccaggacaggcaaggccgccagcacccccctgctgcctgaggtggaggcctacctgcagctgctggtggtgatcttcatgatgaacagcaagcgctacaaggaggcccagaagatcagtgatgacctgatgcagaagatcagcacccagaacagaagagccctggacctggtggccgccaagtgctactactaccacgcccgggtgtatgagttcctggacaagctggatgtggtgcgctccttcctgcacgcccggctgaggacagccaccctgcggcatgatgctgatggccaggccaccctgctgaacctgctgctgaggaactacctgcactacagcctgtatgaccaggccgagaagctggtgtccaagagcgtcttccctgagcaggccaacaacaatgagtgggcccgctacctgtactacacaggccgcatcaaggccatccagctggagtacagcgaggcccggaggaccatgaccaatgccctgaggaaggccccccagcacacagctgtgggcttcaagcagacagtgcacaagctgctgattgtggtggagctgctgctgggggagatcccagaccggctgcagttccggcagcccagcctgaagaggagcctgatgccctacttcctgctgacccaggccgtgaggactggaaacctggccaagttcaaccaggtgctggaccagtttggagagaagttccaggctgatggcacctacaccctcatcatccggctgcggcacaacgtcatcaagacaggagtgaggatgatcagcctgagctacagccgcatcagcctggccgacatcgcccagaagctgcagctggacagcccagaagatgctgagttcatcgtggccaaggccatcagagatggagtgattgaggccagcatcaaccacgagaagggctacgtgcagagcaaggagatgattgacatctacagcacccgggagccccagctggccttccaccagaggatctccttctgcctggacatccacaacatgtctgtgaaggccatgagatttcctcccaagagctacaacaaggacctggagagcgctgaggagcggcgggagcgggagcagcaggacctggagtttgccaaggagatggctgaagatgatgatgacagcttcccctag

SEQ ID NO: 18506 - DNA, 1311 bp, synthetic construct
  source 1..1311: mol_type = other DNA; note = Synthetic coding sequence
atgagaagagatgtgaatggagtgaccaagagcagatttgagatgttcagcaacagtgatgaggccgtcatcaacaagaagctgcccaaggagctgctgctgcgcatcttctccttcctggatgtggtgaccctgtgccgctgtgcccaggtgtcccgggcctggaatgtgctggccctggatggcagcaactggcagagaattgacctgtttgacttccagagggacatcgagggccgggtggtggagaacatcagcaagagatgtggcggcttcctgaggaagctgagcctgcggggctgcctgggcgtgggggacaatgccctgcggacctttgcccagaactgcagaaatattgaggtgctgaacctgaatggctgcaccaagaccacagatgccacctgcaccagcctgagcaagttctgcagcaagctgcggcacctggacctggccagctgcaccagcatcaccaacatgagcctgaaggccctgtctgagggctgccccctgctggagcagctgaacatctcctggtgtgaccaggtgaccaaggatggcatccaggccctggtgcggggctgcggcggcctgaaggccctcttcctgaagggctgcacccagctggaggatgaggccctgaagtacatcggggcccactgcccagagctggtgaccctgaacctgcagacctgcctgcagatcacagatgagggcctcatcaccatctgccggggctgccacaagctgcagagcctgtgtgccagcggctgcagcaacatcacagatgccatcctgaatgccctgggccagaactgcccccggctgcgcatcctggaggtggcccgctgcagccagctgacagatgtgggcttcaccaccctggccaggaactgccacgagctggagaagatggacctggaggagtgtgtgcagatcacagacagcaccctcatccagctgagcatccactgcccccggctgcaggtgctgagcctgagccactgtgagctgatcacagatgatggcatccgccacctgggcaatggagcctgtgcccatgaccagctggaggtgattgagctggacaactgccccctcatcacagatgccagcctggagcacctgaagagctgccacagcctggagcgcatcgagctgtatgactgccagcagatcaccagggctggcatcaagaggctgcggacccacctgcccaacatcaaggtgcacgcctactttgcccctgtgaccccacctccttctgtgggcggcagccggcagcgcttctgccgctgctgcatcatcctgtag

SEQ ID NO: 18507 - DNA, 1167 bp, synthetic construct
  source 1..1167: mol_type = other DNA; note = Synthetic coding sequence
atgcgctgcctgtatggccgggtgggcggggcccggaggaagatggccgccagcgctgctgctgctgagctgcaggccagcggcggccccaggcaccctgtgtgcctgctggtgctgggcatggccggcagcggcaagaccacctttgtgcagaggctgaccggccacctgcacgcccagggcaccccaccctacgtgatcaacctggaccctgctgtgcatgaggtgcccttccctgccaacatcgacatccgggacacagtgaagtacaaggaggtgatgaagcagtatggcctgggccccaacggcggcatcgtgaccagcctgaacctgtttgccaccaggtttgaccaggtgatgaagttcatcgagaaggcccagaacatgagcaaatatgtgctgattgacaccccaggccagatcgaggtgttcacctggagcgccagcggcaccatcatcacagaggccctggccagcagcttccccaccgtggtgatctacgtgatggacaccagccgcagcaccaaccctgtgaccttcatgagcaacatgctgtatgcctgcagcatcctgtacaagaccaagctgcccttcatcgtggtgatgaacaagacagacatcatcgaccacagctttgctgtggagtggatgcaggactttgaggccttccaggatgccctgaaccaggagaccacctacgtgagcaacctgaccaggtccatgagcctggtgctggatgagttctacagcagcctgcgggtggtgggcgtgtctgctgtgctgggcaccggcctggatgagctgtttgtgcaggtgaccagcgctgctgaggagtatgagcgggagtacagaccagaatatgagcggctgaagaagagcctggccaatgctgagagccagcagcagcgggagcagctggagcggctgaggaaggacatgggctctgtggccctggatgctggaacagccaaggacagcctgagccctgtgctgcaccccagcgacctgatcctgacccggggcaccctggatgaggaggatgaggaggccgacagcgacacagatgacatcgaccaccgggtgacagaggagagccatgaggagcccgccttccagaacttcatgcaggagagcatggcccagtactggaagaggaacaacaagtag

SEQ ID NO: 18508 - DNA, 1668 bp, synthetic construct
  source 1..1668: mol_type = other DNA; note = Synthetic coding sequence
atgaggctcatcggcatgcccaaggagaagtatgaccccccagacccccggcgcatctacaccatcatgtctgctgaggaggtggccaacgggaagaagagccactgggccgagctggagatcagcggccgggtgcgcagcctgagcaccagcctgtggagcctgacccacctgacagccctgcacctgaatgacaactacctgagccgcatccccccagacatcgccaagctgcacaacctggtgtacctggacctgagcagcaacaagctgcggagcctgcctgctgagctgggcaacatggtgtccctgcgggagctgctgctgaacaacaacctgctgcgggtgctgccctatgagctgggccgcctcttccagctgcagaccctgggcctgaagggcaaccccctgagccaggacatcctgaacctgtaccaggaccctgatggcaccaggaagctgctgaacttcatgctggacaacctggccgtgcaccctgagcagctgcccccccggccctggatcaccctgaaggagcgggaccagatcctgcccagcgccagcttcaccgtgatgtgctacaacgtgctgtgtgacaagtatgccacccggcagctgtatggctactgccccagctgggccctgaactgggagtacaggaagaagggcatcatggaggagatcgtgaactgtgatgctgacatcatcagcctgcaggaggtggagacagagcagtacttcaccctcttcctgcctgccctgaaggagcggggctatgatggcttcttcagccccaagagccgggccaagatcatgtctgagcaggagaggaagcacgtggatggctgtgccatcttcttcaagacagagaagttcaccctggtgcagaagcacacagtggagttcaaccaggtggccatggccaacagtgatggcagcgaggccatgctgaacagagtgatgaccaaggacaacatcggcgtggccgtggtgctggaggtgcacaaggagctgtttggagctggcatgaagcccatccacgccgctgacaagcagctgctgattgtggccaatgcccacatgcactgggaccctgagtacagtgatgtgaagctgatccagaccatgatgtttgtgtctgaggtgaagaacatcctggagaaggccagcagcaggcctggcagccccacagctgaccccaacagcatccccctggtgctgtgtgccgacctgaacagcctgcctgattctggagtggtggagtacctgagcaatggaggagtggccgacaaccacaaggacttcaaggagctgcgctacaatgaatgtctgatgaacttcagctgcaatggcaagaatggcagcagcgagggccgcatcacccacggcttccagctgaagagcgcctatgagaacaacctgatgccctacaccaactacacctttgacttcaagggcgtcatcgactacatcttctacagcaagacccacatgaatgtgctgggcgtgctgggccccctggacccccagtggctggtggagaacaacatcaccggctgcccccacccccacatccccagcgaccacttcagcctgctgacccagctggagctgcacccccccctgctgcccctggtgaatggagtgcacctgcccaacagaagatag

SEQ ID NO: 18509 - DNA, 2673 bp, synthetic construct
  source 1..2673: mol_type = other DNA; note = Synthetic coding sequence
agcagtgacagcgagatcatcggctacgccctggacaccctgtacaacatcatcagcaatgaggaggaggaggaggtggaggagaacagcacccggcagagcgaggacctgggcagccagttcacagagatcttcatcaagcagcaggagaatgtgaccctgctgctgagcctgctggaggagtttgacttccacgtgcgctggccaggagtgaagctgctgaccagcctgctgaagcagctgggcccccaggtgcagcagatcatcctggtgagccccatgggcgtgtcccggctgatggacctgctggccgacagccgggaggtgatcagaaatgatggagtgctgctgctgcaggccctgaccaggagcaatggagccatccagaagatcgtggcctttgaaaatgcctttgagcggctgctggacatcatcagcgaggagggcaacagtgatggcggcatcgtggtggaggactgcctgatcctgctgcagaacctgctgaagaacaacaacagcaaccagaacttcttcaaggagggcagctacatccagaggatgaagccctggtttgaggtgggagatgagaacagcggctggagcgcccagaaggtgaccaacctgcacctgatgctgcagctggtgcgggtgctggtgagccccaccaaccccccaggggccaccagcagctgccagaaggccatgttccagtgtggcctgctgcagcagctgtgcaccatcctgatggccactggagtgcctgctgacatcctgacagagaccatcaacacagtgtctgaggtgatccggggctgccaggtgaaccaggactactttgcctctgtgaatgcccccagcaacccccccaggcctgccatcgtggtgctgctgatgtccatggtgaatgaaaggcagccctttgtgctgcgctgtgctgtgctgtactgcttccagtgcttcctgtacaagaaccagaagggccagggcgagatcgtgtccaccctgctgcccagcaccattgatgccactggaaacagcgtgtctgctggccagctgctgtgtggcggcctcttcagcacagacagcctgagcaactggtgtgccgctgtggccctggcccacgccctgcaggagaatgccacccagaaggagcagctgctgcgggtgcagctggccaccagcatcggcaacccccctgtgtccctgctgcagcagtgcaccaacatcctgagccagggcagcaagatccagaccagggtgggcctgctgatgctgctgtgcacctggctgagcaactgccccatcgctgtgacccacttcctgcacaacagcgccaacgtgcccttcctgaccggccagattgctgagaacctgggggaggaggagcagctggtgcagggcctgtgtgccctgctgctgggcatcagcatctacttcaatgacaacagcctggagagctacatgaaggagaagctgaagcagctgattgagaagagaattggcaaggagaacttcatcgagaagctgggcttcatcagcaagcatgagctgtacagccgggccagccagaagccccagcccaacttccccagccctgagtacatgatctttgaccacgagttcaccaagctggtgaaggagctggagggcgtcatcaccaaggccatctacaagagcagcgaggaggacaagaaggaggaggaggtgaagaagaccctggagcagcacgacaacatcgtgacccactacaagaacatgatccgggagcaggacctgcagctggaggagctgcggcagcaggtgtccaccctgaagtgccagaatgagcagctgcagacagctgtgacccagcaggtgtcccagatccagcagcacaaggaccagtacaacctgctgaagatccagctgggcaaggacaaccagcaccagggcagctacagcgagggcgcccagatgaatggcatccagcctgaggagatcggccgcctgcgggaggagattgaggagctgaagaggaaccaggagctgctgcagagccagctgacagagaaggacagcatgattgagaacatgaagagcagccagaccagcggcaccaatgagcagagcagcgccatcgtgtctgcccgggacagcgagcaggtggccgagctgaagcaggagctggccaccctgaagagccagctgaacagccagagcgtggagatcaccaagctgcagacagagaagcaggagctgctgcagaagacagaggcctttgccaagtctgtggaggtgcagggcgagacagagaccatcatcgccaccaagaccacagatgtggagggccgcctgagcgccctgctgcaggagaccaaggagctgaagaatgagatcaaggccctgtctgaggagaggacagccatcaaggagcagctggacagcagcaacagcaccatcgccatcctgcagacagagaaggacaagctggagctggagatcacagacagcaagaaggagcaggatgacctgctggtgctgctggccgaccaggaccagaagatcctgagcctgaagaacaagctgaaggacctgggccaccctgtggaggaggaggatgagctggagagcggggaccaggaggatgaagatgatgaaagtgaagatcctgggaaggacctggaccacatctag

SEQ ID NO: 18510 - DNA, 1944 bp, synthetic construct
  source 1..1944: mol_type = other DNA; note = Synthetic coding sequence
atggcccgggccggcccccggctggtgctgtctgaggaggccgtgcgggccaagagcggcctgggcccccaccgggacctggccgagctgcagagcctgagcatccctggcacctaccaggagaagatcacccacctgggccacagcctgatgagcctgaccggcctgaagagcctggacctgagcaggaacagcctggtgtccctggagggcatccagtacctgacagccctggagagcctgaacctgtactacaactgcatcagcagcctggccgaggtgttccggctgcacgccctgacagagctggtggatgtggacttccggctgaaccctgtggtgaaggtggagccagactaccgcctgtttgtggtgcacctgctgcccaagctgcagcagctggatgacaggcctgtgcgggccagcgagaggaaggccagccggctgcactttgccagcgaggacagcctggacagcaaggagagcgtgcctgccagcctgaaggagggccggccccaccacccccgggccaagtgcacagaggccctggccaagcagagcctggtgatggatgctgatgatgaggccgtgctgaacctgattgctgaatgtgagtgggacctgggccggcccccaggcagcaccagcttcagccagaagggccgggaggccgacagccggggcagccaggagagccgccacctgctgagcccccagctggtgcagtaccagtgtggggacagcggcaagcagggccgggagacccggcgcagcagctgccggggctgctgcctggagaagatgccctggagccagctgtgtggggagctgccccccctgtatggagctgagcctgaggccagccgggccccccggccccacacctacttcaccccccacccagacagcatggacacagaagattctgccagcagccagaagctggacctgagcggggagatggtgcccggccccctgcctgcccctggaaaatgtaggaagaggaggatgcctgtgggccgcttccagaccttcagtgaccaggagggcctgggctgcccagagaggacccacggcagctctgtgcccaaggagagcctgagccggcaggacagcagcgagagcagaaatggaagaaccctgagccagcctgaggccagcgagacagaggagcagaggagccggggcgtgacagacacccgggagcccagccctggcagccacagcgccctgcccgggaagaagacagccctgcaggccgccctgctggagaccctgctggacctggtggaccgctcctggggcggctgccgcagcctgcacagcaatgaggccttcctggcccaggcccggcacatcctgagctctgtggaggagttcaccgctgcccaggacagcagcgccatggtgggggaggatgtgggcagcctggccctggagagcaagagcctgcagagccggctggccgagcagcagcagcagcacgcccgggagatgtctgaggtgacagctgagctgcaccacacccacaaggagctggatgacctgcggcagcacctggacaagagcctggaggagaacagccggctgaagagcctgctgctgtccatgaagaaggaggtgaagtctgctgacacagctgccaccctgaacctgcagattgctggcctgcagacctctgtgaagaggctgtgtggggagatcgtggagctgaagcagcacctggagcactatgacaagatccaggagctgacccagatgctgcaggagagccacagcagcctggtgtccaccaatgagcacctgctgcaggagctgagccaggtgcgggcccagcacagagctgaggtggagcagatgcactggagctaccaggagctgaagaagaccatggccctcttcccccacagcagcgccagccatggaggctgccaggcctgctag

SEQ ID NO: 18511 - DNA, 777 bp, synthetic construct
  source 1..777: mol_type = other DNA; note = Synthetic coding sequence
atggccgagacagaggagaggagcctggacaacttctttgccaagagggacaagaagaagaagaaggagaggagcaacagagctgccagcgctgctggagctgctggcagcgctgggggcagcagcggggctgctggagctgctgggggcggggccggggccggcaccaggcctggagatggcggcacagccagcgctggagctgctggccctggagctgccaccaaggctgtgaccaaggatgaagatgagtggaaggagctggagcagaaggaggtggactacagcggcctgcgggtgcaggccatgcagatcagcagcgagaaggaggaggatgacaatgagaagaggcaggaccccggggacaactgggaggagggcggcggcggcggcggcggcatggagaagagcagcggcccctggaacaagacagcccctgtgcaggcccccccagcccctgtgattgtgacagagaccccagagcccgccatgaccagcggcgtgtacagacctcctggggcccggctgaccaccaccaggaagaccccccagggccccccagagatctacagcgacacccagttccccagcctgcagagcacagccaagcacgtggagagcaggaaggacaaggagatggagaagagctttgaggtggtgcgccacaagaacagaggaagagatgaggtgtccaagaaccaggccctgaagctgcagctggacaaccagtatgctgtgctggagaaccagaagagcagccacagccagtacaactag

SEQ ID NO: 18512 - DNA, 1077 bp, synthetic construct
  source 1..1077: mol_type = other DNA; note = Synthetic coding sequence
atggccccccagaacctgagcaccttctgcctgctgctgctgtacctgattggagctgtgattgctggccgggacttctacaagatcctgggcgtgcccaggtctgccagcatcaaggacatcaagaaggcctacaggaagctggccctgcagctgcacccagacaggaacccagatgacccccaggcccaggagaagttccaggacctgggcgccgcctatgaggtgctgagtgacagcgagaagaggaagcagtatgacacctatggagaggagggcctgaaggatggccaccagagcagccacggggacatcttcagccacttcttcggggactttggcttcatgtttggaggcaccccccggcagcaggacaggaacatcccccggggcagtgacatcatcgtggacctggaggtgaccctggaggaggtgtatgccggcaactttgtggaggtggtgaggaacaagcctgtggcccggcaggcccctgggaagaggaagtgcaactgccggcaggagatgaggaccacccagctgggccctggccgcttccagatgacccaggaggtggtgtgtgatgaatgtcccaacgtgaagctggtgaatgaggagaggaccctggaggtggagattgagcccggggtgagagatggcatggagtaccccttcatcggggagggggagccccacgtggatggagagcccggggacctgcgcttccgcatcaaggtggtgaagcaccccatctttgaaagaagaggagatgacctgtacaccaacgtgaccatcagcctggtggagagcctggtgggctttgagatggacatcacccacctggatggccacaaggtgcacatcagccgggacaagatcaccaggcctggggccaagctgtggaagaagggggagggcctgcccaactttgacaacaacaacatcaagggcagcctcatcatcacctttgatgtggacttccccaaggagcagctgacagaggaggcccgggagggcatcaagcagctgctgaagcagggctctgtgcagaaggtgtacaacggcctgcagggctactag

SEQ ID NO: 18513 - DNA, 624 bp, synthetic construct
  source 1..624: mol_type = other DNA; note = Synthetic coding sequence
atgaccagcaggaagaaggtgctgctgaaggtgatcatcctgggggacagcggcgtgggcaagaccagcctgatgaaccagtatgtgaacaagaagttcagcaaccagtacaaggccaccatcggggctgacttcctgaccaaggaggtgatggtggatgaccggctggtgaccatgcagatctgggacacagctggccaggagcgcttccagagcctgggcgtggccttctacagaggagctgactgctgcgtgctggtgtttgatgtgacagcccccaacaccttcaagaccctggacagctggagagatgagttcctgatccaggccagcccccgggaccctgagaacttcccctttgtggtgctgggcaacaagattgacctggagaaccggcaggtggccaccaagagggcccaggcctggtgctacagcaagaacaacatcccctactttgagaccagcgccaaggaggccatcaacgtggagcaggccttccagaccatcgccagaaatgccctgaagcaggagacagaggtggagctgtacaatgagttccctgagcccatcaagctggacaagaatgaccgggccaaggccagcgctgagagctgcagctgctag

SEQ ID NO: 18514 - DNA, 3225 bp, synthetic construct
  source 1..3225: mol_type = other DNA; note = Synthetic coding sequence
atgatccccatctgccctgtggtgtccttcacctacgtgcccagccggctgggagaagatgccaagatggccactggaaactacttcggcttcacccacagcggggctgctgctgctgctgctgctgcccagtacagccagcagcctgccagcggcgtggcctacagccaccccaccaccgtggccagctacacagtgcaccaggcccctgtggccgcccacacagtgacagctgcctatgccccagctgctgccaccgtggccgtggcccggcctgcccctgtggccgtggccgccgccgccacagctgctgcctacggcggctaccccacagcccacacagccacagattatggctacacccagaggcagcaggaggcccctcctcctcctcctccagccaccacccagaactaccaggacagctacagctatgtgcgcagcacagccccagctgtggcctatgacagcaagcagtactaccagcagcccacagccacagctgctgctgtggccgccgccgcccagccccagcccagcgtggccgagacctactaccagacagcccccaaggccggctacagccagggcgccacccagtacacccaggcccagcagacccggcaggtgacagccatcaagccagccacccccagccctgccaccaccaccttcagcatctaccctgtgagcagcacagtgcagcctgtggccgccgccgccaccgtggtgcccagctacacccagagcgccacctacagcaccacagctgtgacctacagcggcaccagctacagcggctatgaggccgctgtgtacagcgctgccagcagctactaccagcagcagcagcagcagcagaagcaggccgctgctgctgctgctgctgctgctgccacagctgcctggacaggcaccaccttcaccaagaaggcccccttccagaacaagcagctgaagcccaagcagccccccaagccaccccagatccactactgtgatgtgtgcaagatcagctgtgccggcccccagacctacaaggagcacctggagggccagaagcacaagaagaaggaggccgccctgaaggccagccagaacaccagcagcagcaacagcagcacccggggcacccagaaccagctgcgctgtgagctgtgtgatgtgtcctgcaccggggctgatgcctatgctgcccacatccggggggccaagcaccagaaggtggtgaagctgcacaccaagctgggcaagcccatccccagcacagagcccaacgtggtgtcccaggccaccagcagcacagctgtgtctgccagcaagcccacagccagccccagcagcattgctgccaacaactgcaccgtgaacaccagctctgtggccaccagctccatgaagggcctgaccaccaccggcaacagcagcctgaacagcaccagcaacaccaaggtgtctgctgtgcccaccaacatggccgccaagaagaccagcacccccaagatcaactttgtgggcggcaacaagctgcagagcactggaaacaaggccgaggacatcaagggcacagaatgtgtgaagagcacccctgtgaccagcgctgtgcagatccctgaggtgaagcaggacacagtgtctgagcctgtgaccccagccagcctggccgccctgcagagtgatgtgcagcctgtgggccatgactatgtggaggaggtgagaaatgatgagggcaaggtgatccgcttccactgcaagctgtgtgagtgcagcttcaatgaccccaatgccaaggagatgcacctgaagggccgccgccaccggctgcagtacaagaagaaggtgaacccagacctgcaggtggaggtgaagcccagcatccgggccaggaagatccaggaggagaagatgaggaagcagatgcagaaggaggagtactggaggcggcgggaggaggaggagcgctggaggatggagatgagaagatatgaggaggacatgtactggaggaggatggaggaggagcagcaccactgggatgacagaagaaggatgccagatggcggctacccccacggccccccaggccccctgggcctgctgggcgtgcggcccggcatgccaccccagccccagggccctgcccccctgcggcggccagacagcagtgatgaccgctacgtgatgaccaagcacgccaccatctaccccacagaggaggagctgcaggccgtgcagaagatcgtgtccatcacagagcgggccctgaagctggtgtctgacagcctgtctgaacatgagaagaacaagaacaaggagggagatgacaagaaggagggcggcaaggaccgggccctgaagggcgtgctgcgggtgggcgtgctggccaagggcctgctgctgcggggggacagaaatgtgaacctggtgctgctgtgcagcgagaagcccagcaagaccctgctgagcagaattgctgagaacctgcccaagcagctggccgtcatcagccctgagaagtatgacatcaagtgtgctgtgtctgaggccgccatcatcctgaacagctgtgtggagcccaagatgcaggtgaccatcaccctgaccagccccatcatccgggaggagaacatgagagaaggagatgtgaccagcggcatggtgaaggaccccccagatgtgctggaccggcagaagtgcctggatgccctggccgccctgcggcatgccaagtggttccaggcccgggccaacggcctgcagagctgtgtgatcatcatccgcatcctgcgggacctgtgccagagggtgcccacctggagcgacttccccagctgggccatggagctgctggtggagaaggccatcagcagcgccagcagcccccagagccctggagatgccctgcggcgggtgtttgagtgcatcagcagcggcatcatcctgaagggcagccctggcctgctggacccctgtgagaaggacccctttgacaccctggccaccatgacagaccagcagcgggaggacatcaccagcagcgcccagtttgccctgcggctgctggccttccggcagatccacaaggtgctgggcatggaccccctgccccagatgagccagcgcttcaacatccacaacaacaggaagagaagaagagacagtgatggagtggatggctttgaggccgagggcaagaaggacaagaaggactatgacaacttctag

SEQ ID NO: 18515 - DNA, 438 bp, synthetic construct
  source 1..438: mol_type = other DNA; note = Synthetic coding sequence
atgaagttcaacccctttgtgaccagtgacaggagcaagaacaggaagaggcacttcaatgcccccagccacgtgcggaggaagatcatgagcagccccctgagcaaggagctgcggcagaagtacaacgtgcgctccatgcccatcaggaaggatgatgaggtgcaggtggtgcggggccactacaagggccagcagatcggcaaggtggtgcaggtgtacaggaagaagtatgtgatctacatcgagcgggtgcagcgggagaaggccaacggcaccaccgtgcacgtgggcatccaccccagcaaggtggtgatcacccggctgaagctggacaaggacaggaagaagatcctggagaggaaggccaagagccggcaggtgggcaaggagaagggcaagtacaaggaggagctgattgagaagatgcaggagtag

SEQ ID NO: 18516 - DNA, 3177 bp, synthetic construct
  source 1..3177: mol_type = other DNA; note = Synthetic coding sequence
atggaggatggcacccccaagcacatcatccagatgacaggcttcaagatggaggagaaggaggccctggtgaagctgctgctgaagctggactgcaccttcatcaagtctgagaagtacaagaactgcacccacctgattgctgagcggctgtgcaagtctgagaagttcctggccgcctgtgccgccggcaagtggatcctgaccaaggactacatcatccacagcgccaagagcggccgctggctggatgagaccacctatgagtggggctacaagattgagaaggacagccgctacagcccccagatgcagagcgcccccaagcgctggagggaggagctgaagaggactggagcccctggggccttccaccgctggaaggtggtgctgctggtgaggacagacaagagaagtgacagcctcatccgggtgctggaggccggcaaggccaacgtcatcctgcccaagagcagccccagcggcatcacccacgtgattgccagcaatgcccgcatcaaggccgagaaggagaaggacaacttcaaggcccccttctaccccatccagtacctgggggacttcctgctggagaaggagatccagaatgatgaggacagccagaccaacagcgtgtggacagagcacagcaatgaggagaccaacaaggacttcaggaaggatgctggcttcctggagatgaagggggccctgcgggagaccatgtaccgcacccagaaggagatgcagaaccatgaagatgtgaatgtgggcagcatcctgatccagcaccacaagaaggagaagttcagcggcagcagcaaggacctgaagtttgtgaagatgaggaacaccttcggcagccacacctatgagaaccagaaggagatcaagaagaaggatgaggacatccagaggagctacaccctgcggaggaagaggaagaagggcaaggagagcaactgcaagaagggcgtggagcacgagaagatcaagagcaccctgcggcggcacatctacaacagagaccagaaggagatgaagaacagcatctttgctgaatatgccaaggagagcaaggccatggccatcaagacagatgtggatgtggtggagatcaagaacaccctgaggaagcacatctaccgggcccaggccgtgcgctacaactgcatcagaattgacaagcagcctgtgtacaacgtggaggtgaagaatgctgagttcccccggggcgtgctgaacctgattgagagcctgattgagggccacttcttcaaggaggccatcgaggagctgagcaccctgcaggcccactacatcccccctgtgtgtgtgctgcacgccctgctggagaatgtgctgcaggacaacatcgacaccttcagcggccgctacttccacatcctgagcgccctgctgcacctgcaccccccctggaagagccctgccatgagccgctactacctggagctgttccagtgccccacctgcatgaagggggcctggagcctggtggaggtgctgatccgcagctgcctcttcaatgaaagcttctgccaccagatcagtgaaaatattggcagcaaggtgctgcacctgaccctgctgaagttcttcttcaacctgattgagagcgaggtgcagcacctgagccagaagctgtatgactggagcgacagccagaacctgaagatcaccgggaaggccatgctgctggagatcttctggagcggcagcgagaccagcggcctgctgaccaagcctgtgaacatgctgctggagtggaccatctacagccacaaggagaagttcaagagcaatgatgtgttcaagcatgagctggcctacctgctggccggcatcctgggcgccgccatcgactactggatcttcctgggcctgaagatgggcagaaatgtgatgaggcacatgtctgatgacctgggcagctatgtgtccctgagctgtgatgacttcagcagccaggagctggagatcttcatctgcagcttcagcagctcctggctgcagatgtttgtggccgaggccgtgttcaagaagctgtgcctgcagagcagcggctctgtgtcctctgagcccctgagcctgcagaagatggtgtacagctacctgcctgccctgggcaagacaggagtgctgggcagcggcaagatccaggtgtccaagaagattggccagaggccctgctttgacagccagaggaccctgctgatgctgaatggcaccaagcagaagcaggtggagggcctgcctgagctgctggacctgaacctggccaagtgcagcagcagcctgaagaagctgaagaagaagtctgagggggagctgagctgcagcaaagaaaactgccccagcgtggtgaagaagatgaacttccacaagaccaacctgaagggggagacagccctgcaccgggcctgcatcaacaaccaggtggagaagctgatcctgctgctgagcctgcccggcatcgacatcaacgtgaaggacaatgccggctggacccccctgcacgaggcctgcaactacggcaacacagtgtgtgtgcaggagatcctgcagcgctgcccagaggtggacctgctgacccaggtggatggagtgacccccctgcatgatgccctgagcaatggacatgtggagatcggcaagctgctgctgcagcacggcggccctgtgctgctgcagcagagaaatgccaagggggagctgcccctggactatgtggtgagcccccagatcaaggaggagctgtttgccatcaccaagattgaagatactgtggagaacttccacgcccaggccgagaagcacttccactaccagcagctggagtttggcagcttcctgctgagcaggatgctgctgaacttctgcagcatctttgacctgagcagcgagttcatcctggccagcaagggcctgacccacctgaatgagctgctgatggcctgcaagagccacaaggagaccacctctgtgcacacagactggctgctggacctgtatgccggcaacatcaagaccctgcagaagctgccccacatcctgaaggagctgcctgagaacctgaaggtgtgccctggggtgcacacagaggccctgatgatcaccctggagatgatgtgccgctctgtgatggagttctcctag

SEQ ID NO: 18517 - DNA, 660 bp, synthetic construct
  source 1..660: mol_type = other DNA; note = Synthetic coding sequence
atggagcccaaggaggccaccgggaaggagaacatggtgaccaagaagaagaacctggccttcctgcggagccggctgtacatgctggagaggaggaagacagacacagtggtggagagctctgtgtctggggaccacagcggcaccctgcggcgcagccagagcgacagaacagagtacaaccagaagctgcaggagaagatgaccccccagggagaatgttctgtggccgagaccctgaccccagaggaggagcaccacatgaagaggatgatggccaagcgggagaagatcatcaaggagctgatccagacagagaaggactacctgaatgacctggagctgtgtgtgcgggaggtggtgcagcccctgaggaacaagaagacagaccggctggatgtggacagcctcttcagcaacattgaatctgtgcaccagatcagcgccaagctgctgagcctgctggaggaggccaccacagatgtggagcccgccatgcaggtgattggagaggtgttcctgcagatcaagggccccctggaggacatctacaagatctactgctaccaccatgatgaggcccacagcatcctggagagctatgagaaggaggaggagctgaaggagcacctgagccactgcatccagagcctgaagtag

SEQ ID NO: 18518 - DNA, 3183 bp, synthetic construct
  source 1..3183: mol_type = other DNA; note = Synthetic coding sequence
atgctgattgaagatgtggatgccctgaagtcctggctggccaagctgctggagcccatctgtgatgctgaccccagcgccctggccaactacgtggtggccctggtgaagaaggacaagccagagaaggagctgaaggccttctgtgccgaccagctggatgtgttcctgcagaaggagaccagcggctttgtggacaagctgtttgagagcctgtacaccaagaactacctgcccctgctggagcctgtgaagccagagcccaagcccctggtgcaggagaaggaggagatcaaggaggaggtgttccaggagcctgctgaggaggagagagatggcaggaagaagaagtaccccagcccccagaagaccaggtctgagagcagcgagaggaggacccgggagaagaagagagaagatggcaagtggagggactatgaccgctactatgaaagaaatgagctgtaccgggagaagtatgactggaggcggggccgcagcaagagccgcagcaagagccggggcctgagccgcagccgcagccgcagccggggccgcagcaaggaccgggaccccaacagaaatgtggagcaccgggagaggagcaagttcaagtcagaaagaaatgacctggagagcagctatgtgcctgtgtctgcccccccacccaacagcagcgagcagtacagcagcggggcccagagcatccccagcacagtgacagtgattgccccagcccaccacagcgagaacaccacagagagctggagcaactactacaacaaccacagcagcagcaacagctttggaagaaacctgccccccaagaggcgctgccgggactatgatgagcggggcttctgtgtgctgggggacctgtgccagtttgaccacggcaatgaccccctggtggtggatgaggtggccctgcccagcatgatccccttccccccacctcctcctggcctgcccccacctcctcctcctggcatgctgatgccacccatgcctggccctggccctggccctggccctggccctggccctggccctggccctggccctggccctggccacagcatgaggctgcctgtgccccagggccacggccagcccccaccttctgtggtgctgcccatccccaggcctcccatcacccagagcagcctcatcaacagccgggaccagcccggcaccagcgctgtgcccaacctggcctctgtgggcacccggctgcccccacccctgccccagaacctgctgtacacagtgtctgagcggcagcccatgtacagccgggagcacggggccgccgccagcgagcggctgcagctgggcaccccaccacccctgctggccgcccggctggtgccccccaggaacctgatgggcagcagcatcggctaccacacctctgtgagcagccccacccccctggtgcctgacacctatgagccagatggctacaaccctgaggcccccagcatcaccagcagcggccgcagccagtaccggcagttcttcagcaggacccagacccagaggcccaacctgattggcctgaccagcggggacatggatgtgaacccccgggccgccaacatcgtcatccagacagagccccctgtgcctgtgtccatcaacagcaacatcaccagggtggtgctggagccagacagcaggaagagggccatgagcggcctggagggccccctgaccaagaagccctggctgggcaagcagggcaacaacaaccagaacaagccaggcttcctgaggaagaaccagtacaccaacaccaagctggaggtgaagaagatcccccaggagctgaacaacatcaccaagctgaatgagcacttcagcaagtttggcaccatcgtgaacatccaggtggccttcaagggggaccctgaggccgccctgatccagtacctgaccaatgaggaggccaggaaggccatcagcagcacagaggccgtgctgaacaaccgcttcatccgggtgctgtggcaccgggagaacaatgagcagcccaccctgcagagcagcgcccagctgctgctgcagcagcagcagaccctgagccacctgagccagcagcaccaccacctgccccagcacctgcaccagcagcaggtgctggtggcccagagcgcccccagcacagtgcatggaggcatccagaagatgatgagcaagccccagaccagcggggcctacgtgctgaacaaggtgcctgtgaagcaccggctgggccatgctgggggcaaccagagtgatgccagccacctgctgaaccagagcggcggggccggggaggactgccagatcttcagcaccccaggccaccccaagatgatctacagcagcagcaacctgaagacccccagcaagctgtgcagcggcagcaagagccatgatgtgcaggaggtgctgaagaagaagcaggaggccatgaagctgcagcaggacatgaggaagaagaggcaggaggtgctggagaagcagatcgagtgccagaagatgctgatcagcaagctggagaagaacaagaacatgaagccagaggagcgggccaacatcatgaagaccctgaaggagctgggggagaagatcagccagctgaaggatgagctgaagaccagcagcgctgtgtccacccccagcaaggtgaagaccaagacagaggcccagaaggagctgctggacacagagctggacctgcacaagaggctgagcagtggagaggacaccacagagctgaggaagaagctgagccagctgcaggtggaggccgcccggctgggcatcctgcctgtgggccggggcaagaccatgagcagccagggccggggccggggccggggccggggcggccggggccggggcagcctgaaccacatggtggtggaccaccggcccaaggccctgactgtgggcggcttcatcgaggaggagaaggaggacctgctgcagcacttcagcacagccaaccagggccccaagttcaaggaccggcggctgcagatctcctggcacaagcccaaggtgcccagcatcagcacagaaacagaggaggaggaggtgaaggaggaggagacagagaccagtgacctcttcctgcctgatgatgatgatgaagatgaagatgaatatgagagccgctcctggaggaggtag

SEQ ID NO: 18519 - DNA, 1818 bp, synthetic construct
  source 1..1818: mol_type = other DNA; note = Synthetic coding sequence
atggaggccgacatcatcaccaacctgcgctgccgcctgaaggaggccgaggaggagcggctgaaggccgcccagtatggcctgcagctggtggagagccagaatgagctgcagaaccagctggacaagtgcagaaatgagatgatgaccatgacagagagctatgagcaggagaagtacaccctgcagcgggaggtggagctgaagagcaggatgctggagagcctgagctgtgaatgtgaggccatcaagcagcagcagaagatgcacctggagaagctggaggagcagctgagccgcagccacggccaggaggtgaatgagctgaagaccaagattgagaagctgaaggtggagctggatgaggcccggctgtctgagaagcagctgaagcaccaggtggaccaccagaaggagctgctgagctgcaagtctgaggagctgcgggtgatgtctgagcgggtgcaggagagcatgagcagcgagatgctggccctgcagatcgagctgacagagatggagagcatgaagaccaccctgaaggaggaggtgaatgagctgcagtaccggcaggagcagctggagctgctgatcaccaacctgatgaggcaggtggaccggctgaaggaggagaaggaggagcgggagaaggaggccgtgtcctactacaatgccctggagaaggcccgggtggccaaccaggacctgcaggtgcagctggaccaggccctgcagcaggccctggaccccaacagcaaaggaaacagcctgtttgctgaggtggaggaccggcgggccgccatggagcggcagctgatctccatgaaggtgaagtaccagagcctgaagaagcagaatgtgttcaaccgggagcagatgcagaggatgaagctgcagatcgccaccctgctgcagatgaagggcagccagacagaatttgagcagcaggagcggctgctggccatgctggagcagaagaatggagagatcaagcacctgctgggggagatccggaacctggagaagttcaagaacctgtatgacagcatggagagcaagcccagcgtggacagcggcaccctggaggacaacacctactacacagacctgctgcagatgaagctggacaacctgaacaaggagattgagagcaccaagggggagctgagcatccagaggatgaaggccctgtttgagagccagagggccctggacatcgagaggaagctgtttgccaatgaacgctgcctgcagctgtctgagagcgagaacatgaagctgcgggccaagctggatgagctgaagctgaagtatgagcctgaggagaccgtggaggtgcctgtgctgaagaagaggcgggaggtgctgcctgtggacatcaccacagccaaggatgcctgtgtgaacaacagcgccctgggcggggaggtgtaccgcctgcccccccagaaggaggagacccagagctgccccaacagcctggaggacaacaacctgcagctggagaagtctgtgtccatctacacccctgtggtgtccctgagcccccacaagaacctgcctgtggacatgcagctgaagaaggagaagaagtgtgtgaagctgattggagtgcctgcagatgctgaggccctgtctgagaggagcggcaacacccccaacagcccccggctggccgctgagagcaagctgcagacagaggtgaaggagggcaaggagaccagcagcaagctggagaaggagacctgcaagaagctgcaccccatcctgtatgtgagcagcaagagcaccccagagacccagtgcccccagcagtag

SEQ ID NO: 18520 - DNA, 888 bp, synthetic construct
  source 1..888: mol_type = other DNA; note = Synthetic coding sequence
atgatggccaagaagccacccaagccagccccccggcgcatcttccaggagcggctgaagatcacagccctgcccctgtactttgagggcttcctgctgatcaagaggagcggctaccgggagtatgagcactactggacagagctgcggggcaccaccctcttcttctacacagacaagaagagcatcatctacgtggacaagctggacatcgtggacctgacctgcctgacagagcagaacagcacagagaagaactgtgccaagttcaccctggtgctgcccaaggaggaggtgcagctgaagacagagaacacagagagcggggaggagtggaggggcttcatcctgactgtgacagagctgtctgtgccccagaatgtgtccctgctgcccggccaggtgatcaagctgcacgaggtgctggagcgggagaagaagaggcgcatcgagacagagcagagcacctctgtggagaaggagaaggagcccacagaggactatgtggatgtgctgaaccccatgcctgcctgcttctacacagtgtccaggaaggaggccacagagatgctgcagaagaaccccagcctgggcaacatgatcctgcggcccggcagtgacagcaggaactacagcatcaccatccggcaggagattgacatcccccgcatcaagcactacaaggtgatgtctgtgggccagaactacaccatcgagctggagaagcctgtgaccctgcccaacctcttctctgtgattgactactttgtgaaggagacccggggcaacctgcggcccttcatctgcagcacagatgaaaatacaggccaggagcccagcatggagggccgctctgagaagctgaagaagaacccccacatcgcctag

SEQ ID NO: 18521 - DNA, 4821 bp, synthetic construct
  source 1..4821: mol_type = other DNA; note = Synthetic coding sequence
atgttccacatctgcccagctgagaacctgtaccagaaccgcttcctgggcctggccgccatggccagccccagcaggaacagccagagcagaagacgctgcaaggagcccctgcgctacagctacaacccagaccagttccacaacatggacctgcggggcggcccccatgatggagtgaccatccccaggagcaccagtgacacagacctggtgaccagtgacagccgcagcaccctgatggtgagcagcagctactacagcatcggccacagccaggacctggtgatccactgggacatcaaggaggaggtggatgctggggactggattggcatgtacctgattgatgaggtgctgtctgagaacttcctggactacaagaacagaggagtgaatggcagccaccggggccagatcatctggaagattgatgccagcagctactttgtggagcctgagaccaagatctgcttcaagtactaccatggagtgtctggggccctgcgggccaccaccccatctgtgacagtgaagaacagcgctgcccccatcttcaagagcattggagcagatgagaccgtgcagggccagggcagcagaagactcatctccttcagcctgagtgacttccaggccatgggcctgaagaagggcatgttcttcaacccagacccctacctgaagatcagcatccagcccgggaagcacagcatcttccctgccctgccccaccacggccaggagcggcgcagcaagatcatcggcaacacagtgaaccccatctggcaggccgagcagttctcctttgtgtccctgcccacagatgtgctggagattgaggtgaaggacaagtttgccaagagccggcccatcatcaagcgcttcctgggcaagctgtccatgcctgtgcagaggctgctggagagacatgccatcggggacagagtggtgtcctacaccctgggccggcggctgcccacagaccacgtgtctggccagctgcagttccgctttgagatcaccagcagcatccacccagcagatgatgaggagatcagcctgagcacagagcctgagagcgcccagatccaggacagccccatgaacaacctgatggagagcggcagcggggagcccaggtctgaggcccctgagagcagcgagagctggaagccagagcagctgggggagggctctgtgcctgatggccctggcaaccagagcattgagctgagcaggcctgctgaggaggccgccgtcatcacagaagctggggaccagggcatggtgtctgtgggccctgagggcgctggggagctgctggcccaggtgcagaaggacatccagcctgcccccagcgctgaggagctggccgagcagctggacctgggggaggaggccagcgccctgctgctggaggatggagaggccccagccagcaccaaggaggagcccctggaggaggaggccaccacccagagcagagctggccgggaggaggaggagaaggagcaggaggaggagggagatgtgtccaccctggagcagggcgagggccgcctgcagctgcgggcctctgtgaagaggaagagccggccctgcagcctgcctgtgtctgagctggagaccgtcatcgccagcgcctgtggggaccctgagacccccaggacccactacatccgcatccacaccctgctgcacagcatgcccagcgcccagggcggcagcgctgctgaggaggaggatggagctgaggaggagagcaccctgaaggacagcagcgagaaggatggcctgtctgaggtggacacagtggccgctgaccccagcgccctggaggaggaccgggaggagcctgagggcgccaccccaggcacagcccaccctggccacagcggcggccacttccccagcctggccaacggggccgcccaggatggagacacccaccccagcacaggcagcgagagtgacagcagcccccggcagggcggggaccacagctgtgagggctgtgatgccagctgctgcagccccagctgctacagcagcagctgctacagcaccagctgctacagcagcagctgctacagcgccagctgctacagccccagctgctacaatggaaacagatttgccagccacacccgcttcagctctgtggacagcgccaagatcagcgagagcacagtgttcagcagccaggatgatgaggaggaggagaacagcgcctttgagagcgtgcctgacagcatgcagagccctgagctggaccctgagagcaccaacggggccggcccctggcaggatgagctggccgcccccagcggccacgtggagaggagccctgagggcctggagagccctgtggccggccccagcaacagaagagaaggagaatgtcccatcctgcacaacagccagcctgtgtcccagctgcccagcctgcggcctgagcaccaccactaccccaccattgatgagcccctgccccccaactgggaggccagaattgacagccacggccgggtcttctacgtggaccacgtgaacagaaccaccacctggcagaggcccacagctgctgccaccccagatggcatgaggaggagcggcagcatccagcagatggagcagctgaacagacgctaccagaacatccagaggaccatcgccacagagaggagtgaagaagattctggcagccagagctgtgagcaggccccagctgggggcggcggcggcggcggcagtgacagcgaggccgagagcagccagagcagcctggacctgcggcgggagggcagcctgagccctgtgaacagccagaagatcaccctgctgctgcagagccctgctgtgaagttcatcaccaaccctgagttcttcaccgtgctgcacgccaactacagcgcctacagagtcttcaccagcagcacctgcctgaagcacatgatcctgaaggtgagaagagatgccaggaactttgagcgctaccagcacaacagagacctggtgaacttcatcaacatgtttgctgacacccggctggagctgccccggggctgggagatcaagacagaccagcagggcaagagcttctttgtggaccacaacagccgggccaccaccttcatcgacccccgcatccccctgcagaatggccgcctgcccaaccacctgacccaccggcagcacctgcagaggctgcggagctacagcgctggggaggccagcgaggtgtccaggaacagaggagccagcctgctggcccggcccggccacagcctggtggccgccatccgcagccagcaccagcacgagagcctgcccctggcctacaatgacaagatcgtggccttcctgcggcagcccaacatctttgagatgctgcaggagcggcagcccagcctggccaggaaccacaccctgcgggagaagatccactacatcagaacagagggcaaccacggcctggagaagctgagctgtgatgctgacctggtgatcctgctgagcctgtttgaggaggagatcatgtcctatgtgcccctgcaggccgccttccaccctggctacagcttcagcccccgctgcagcccctgcagcagcccccagaacagccctggcctgcagagggccagcgcccgggcccccagcccctaccgccgggactttgaggccaagctgaggaacttctacaggaagctggaggccaagggcttcggccagggccctgggaagatcaagctgatcatcagaagagaccacctgctggagggcaccttcaaccaggtgatggcctacagcaggaaggagctgcagaggaacaagctgtatgtgacctttgtgggggaggagggcctggactacagcggccccagccgggagttcttcttcctgctgagccaggagctgttcaacccctactacggcctgtttgagtacagcgccaatgacacctacacagtgcagatcagccccatgtctgcctttgtggagaaccacctggagtggttccgcttcagcggccgcatcctgggcctggccctgatccaccagtacctgctggatgccttcttcacccggcccttctacaaggccctgctgcggctgccctgtgacctgagtgacctggagtacctggatgaggagttccaccagagcctgcagtggatgaaggacaacaacatcacagacatcctggacctgaccttcaccgtgaatgaggaggtgtttggccaggtgacagagcgggagctgaagagcggcggggccaacacccaggtgacagagaagaacaagaaggagtacatcgagaggatggtgaagtggagggtggagcggggcgtggtgcagcagacagaggccctggtgcggggcttctatgaggtggtggacagccggctggtgtctgtgtttgatgcccgggagctggagctggtgattgctggaacagctgagattgacctgaatgactggaggaacaacacagagtacagaggaggctaccatgatggccacctggtgatccgctggttctgggccgctgtggagcgcttcaacaatgagcagaggctgcggctgctgcagtttgtgacaggcaccagctctgtgccctatgagggctttgctgccctgcggggcagcaatggcctgcggcgcttctgcatcgagaagtggggcaagatcaccagcctgccccgggcccacacctgcttcaaccggctggacctgcccccctaccccagctacagcatgctgtatgagaagctgctgacagctgtggaggagaccagcaccttcggcctggagtag

SEQ ID NO: 18522 - DNA, 2373 bp, synthetic construct
  source 1..2373: mol_type = other DNA; note = Synthetic coding sequence
atgggcaccaggaagaaggtgcacgcctttgtgcgggtgaagcccacagatgactttgcccacgagatgatccgctatggagatgacaagaggagcattgacatccacctgaagaaggacatccggcggggcgtggtgaacaaccagcagacagactggagcttcaagctggatggagtgctgcatgatgccagccaggacctggtgtatgagaccgtggccaaggatgtggtgtcccaggccctggatggctacaacggcaccatcatgtgctacggccagacaggagctgggaagacctacaccatgatgggcgccacagagaactacaagcaccggggcatcctgccccgggccctgcagcaggtgttcaggatgattgaggagcggcccacccacgccatcaccgtgcgggtgtcctacctggagatctacaatgaaagcctgtttgacctgctgagcaccctgccctacgtgggccccagcgtgacccccatgaccatcgtggagaacccccagggcgtcttcatcaagggcctgtctgtgcacctgaccagccaggaggaggatgccttcagcctgctgtttgaaggagagaccaaccgcatcatcgccagccacaccatgaacaagaacagcagccgcagccactgcatcttcaccatctacctggaggcccacagcaggaccctgtctgaggagaagtacatcaccagcaagatcaacctggtggacctggccggcagcgagcggctgggcaagagcggcagcgagggccaggtgctgaaggaggccacctacatcaacaagagcctgtccttcctggagcaggccatcatcgccctgggggaccagaagagggaccacatccccttccggcagtgcaagctgacccacgccctgaaggacagcctgggcggcaactgcaacatggtgctggtgaccaacatctacggggaggccgcccagctggaggagaccctgagcagcctgcgctttgccagcaggatgaagctggtgaccacagagcccgccatcaatgagaagtatgatgctgagaggatggtgaagaacctggagaaggagctggccctgctgaagcaggagctggccatccatgacagcctgaccaacagaacatttgtgacctatgaccccatggatgagatccagattgctgagatcaacagccaggtgcggcgctacctggagggcaccctggatgaaattgacatcatcagcctgcggcagatcaaggaggtgttcaaccagttccgggtggtgctgagccagcaggagcaggaggtggagagcaccctgcggaggaagtacaccctgattgacagaaatgactttgctgccatcagcgccatccagaaggccggcctggtggatgtggatggccacctggtgggggagcctgagggccagaactttggcctgggcgtggcccccttcagcaccaagccaggcaagaaggccaagagcaagaagaccttcaaggagcccctgagcagcctggccaggaaggagggcgccagcagccctgtgaatggcaaggacctggactatgtgtccaccagcaagacccagctggtgcccagcagcaaggatggagatgtgaaggacatgctgagccgggaccgggagaccagcagcattgagcccctgcccagcgacagccccaaggaggagctgcggcccatccggccagacaccccacccagcaagcctgtggcctttgaggagttcaagaatgagcagggcagcgagatcaaccgcatcttcaaggagaacaagagcatcctgaatgaaagaaggaagagggccagcgagaccacccagcacatcaatgccatcaagcgggagattgatgtgaccaaggaggccctgaacttccagaagagcctgcgggagaagcagggcaagtatgaaaataaaggcctgatgatcattgatgaggaggagttcctgctgatcctgaagctgaaggacctgaagaagcagtacagaagtgagtaccaggacctgcgggacctgcgggcagagatccagtactgccagcacctggtggaccagtgccgccaccggctgctgatggagtttgacatctggtacaatgaaagctttgtgattcctgaggacatgcagatggccctgaagccaggcggcagcatccggcccggcatggtgcctgtgaaccgcatcgtgtccctgggagaagatgaccaggacaagttcagccagctgcagcagagggtgctgcctgagggccctgacagcatctccttctacaatgccaaggtgaagattgagcagaagcacaactacctgaagaccatgatgggcctgcagcaggcccacaggaagtag

SEQ ID NO: 18523 - DNA, 876 bp, synthetic construct
  source 1..876: mol_type = other DNA; note = Synthetic coding sequence
atggcctctgtgaccctgtctgaggccgagaaggtgtacatcgtgcacggcgtgcaggaggacctgcgggtggatggccggggctgtgaggactaccgctgtgtggaggtggagacagatgtggtgagcaacaccagcggcagcgcccgggtgaagctgggccacacagacatcctggtgggcgtgaaggccgagatgggcacccccaagctggagaagcccaatgaaggctacctggagttctttgtggactgcagcgccagcgccaccccagagtttgagggcagaggaggagatgacctgggcacagaaattgccaacaccctgtaccgcatcttcaacaacaagagctctgtggacctgaagaccctgtgcatcagcccccgggagcactgctgggtgctgtatgtggatgtgctgctgctggagtgtggcggcaacctgtttgatgccatcagcattgctgtgaaggccgccctcttcaacacccgcatcccccgggtgcgggtgctggaggatgaggagggcagcaaggacatcgagctgagtgatgacccctatgactgcatccggctgtctgtggagaatgtgccctgcatcgtgaccctgtgcaagattggctaccgccacgtggtggatgccaccctgcaggaggaggcctgcagcctggccagcctgctggtgtctgtgaccagcaaaggagtggtgacctgcatgaggaaggtgggcaagggcagcctggaccctgagagcatctttgagatgatggagaccgggaagagggtgggcaaggtgctgcacgccagcctgcagagcgtggtgcacaaggaggagagcctgggccccaagaggcagaaggtgggcttcctgggctag

SEQ ID NO: 18524 - DNA, 2382 bp, synthetic construct
  source 1..2382: mol_type = other DNA; note = Synthetic coding sequence
atgttctggaagtttgacctgcacagcagcagccacatcgacaccctgctggagcgggaggatgtgaccctgaaggagctgatggatgaagaagatgtgctgcaggagtgcaaggcccagaacaggaagctgattgagttcctgctgaaggccgagtgcctggaggacctggtgtccttcatcatcgaggagcccccccaggacatggatgagaagatccgctacaagtaccccaacatcagctgtgagctgctgaccagtgatgtgtcccagatgaatgaccggctgggggaggatgagagcctgctgatgaagctgtacagcttcctgctgaatgacagccccctgaaccccctgctggccagcttcttcagcaaggtgctgagcatcctgatcagcaggaagccagagcagatcgtggacttcctgaagaagaagcatgactttgtggacctgatcatcaagcacatcggcaccagcgccatcatggacctgctgctgcggctgctgacctgcatcgagcccccccagccccggcaggatgtgctgaactggctgaatgaggagaagatcatccagaggctggtggagatcgtgcaccccagccaggaggaggacagacacagcaatgccagccagagcctgtgtgagatcgtgcggctgagccgggaccagatgctgcagatccagaacagcacagagccagaccccctgctggccaccctggagaagcaggagatcatcgagcagctgctgagcaacatcttccacaaggagaagaatgaaagtgccatcgtgtctgccatccagatcctgctgaccctgctggagacccggcggcccacctttgagggccacatcgagatctgccccccaggcatgagccacagcgcctgcagcgtgaacaagtctgtgctggaggccatccggggccgcctgggcagcttccacgagctgctgctggagccccccaagaacatgttcttcaagtacacctggaacaacttcctgcacacccaggtggagatctgcatcgccctgatcctggccagcccctttgagaacacagaaaatgccaccatcacagaccaggacagcactggagacaacctgctgctgaagcacctgttccagaagtgccagctgattgagcgcatcctggaggcctgggagatgaatgagaagaagcaggccgagggcggccgccgccacggctacatgggccacctgaccagaattgccaactgcatcgtgcacagcacagacaagggccccaacagcgccctggtgcagcagctgatcaaggacctgcctgatgaggtgcgggagcgctgggagaccttctgcaccagcagcctgggggagaccaacaagaggaacacagtggacctggccttcagtgactaccagatgcagcagatgaccagcaacttcatcgaccagtttggcttcaatgatgagaagtttgctgaccaggatgacattggaaatgtgtcctttgacagagtgtctgacatcaacttcaccctgaacaccaatgaaagtggcaacatcgccctgtttgaggcctgctgcaaggagcgcatccagcagtttgatgatggcggcagtgatgaggaggacatctgggaggagaagcacatcgccttcaccccagagagccagaggaggagcagcagcggcagcacagattctgaggagagcacagattctgaggaggaggatggagccaagcaggacctgtttgagcccagcagcgccaacacagaggacaagatggaggtggacctgtctgagccccccaactggagcgccaactttgatgtgcccatggagaccacccatggagcccccctggacagcgtgggcagtgatgtgtggagcacagaggagcccatgcccaccaaggagaccggctgggccagcttcagcgagttcaccagcagcctgagcaccaaggacagcctgcggagcaacagccctgtggagatggagaccagcacagagcccatggaccccctgaccccatctgctgctgccctggccgtgcagcctgaggccgccggctctgtggccatggaggccagcagtgatggagaagaagatgctgagagcacagacaaggtgacagagaccgtgatgaatggaggcatgaaggagaccctgagcctgactgtggatgccaagacagaaacagctgtgttcaagtctgaggagggcaagctgagcaccagccaggatgctgcctgcaaggatgctgaagaatgtcctgagacagctgaggccaagtgtgccgcccccaggcctcccagcagcagccctgagcagaggacaggccagcccagcgcccctggggacacctctgtgaatggacctgtgtag

SEQ ID NO: 18525 - DNA, 3375 bp, synthetic construct
  source 1..3375: mol_type = other DNA; note = Synthetic coding sequence
atggaccccttcacagagaagctgctggagaggacccgggcccggcgggagaacctgcagaggaagatggccgagcggcccacagctgcccccaggtccatgacccacgccaagagggcccggcagcccctgtctgaggccagcaaccagcagcccctgagcggcggggaggagaagagctgcaccaagcccagccccagcaagaagcgctgcagcgacaacacagaggtggaggtgagcaacctggagaacaagcagcctgtggagagcaccagcgccaagagctgcagccccagccctgtgagcccccaggtgcagccccaggccgctgacaccatcagtgacagcgtggccgtgcctgccagcctgctgggcatgagaagaggcctgaacagccggctggaggccacagctgccagctctgtgaagaccaggatgcagaagctggccgagcagaggcggcgctgggacaatgatgacatgacagatgacatccctgagagcagcctcttcagccccatgcccagcgaggagaaggccgccagccccccccggcccctgctgagcaatgccagcgccacccctgtgggccggcggggccgcctggccaacctggccgccaccatctgctcctgggaggatgatgtgaaccacagctttgccaagcagaacagcgtgcaggagcagcccggcacagcctgcctgagcaagttcagcagcgccagcggggccagcgcccgcatcaacagcagctctgtgaagcaggaggccaccttctgcagccagagagatggagatgccagcctgaacaaggccctgagcagcagcgcagatgatgccagcctggtgaatgccagcatcagcagctctgtgaaggccaccagccctgtgaagagcaccaccagcatcacagatgccaagagctgtgagggccagaaccctgagctgctgcccaagacccccatcagccccctgaagacaggagtgtccaagcccatcgtgaagagcaccctgagccagacagtgcccagcaaaggagagctgagccgggagatctgcctgcagagccagagcaaggacaagagcaccaccccaggcggcaccggcatcaagcccttcctggagagatttggagagcgctgccaggagcacagcaaggagagccctgcccggagcaccccccacaggacccccatcatcacccccaacaccaaggccatccaggagcggctcttcaagcaggacaccagcagcagcaccacccacctggcccagcagctgaagcaggagcggcagaaggagctggcctgcctgcggggccgctttgacaagggcaacatctggagcgctgagaagggcggcaacagcaagagcaagcagctggagaccaagcaggagacccactgccagagcacccccctgaagaagcaccagggcgtgtccaagacccagagcctgcctgtgacagagaaggtgacagagaaccagatcccagccaagaacagcagcacagagcccaagggcttcacagaatgtgagatgaccaagagcagccccctgaagatcaccctcttcctggaggaggacaagagcctgaaggtgaccagtgaccccaaggtggagcagaagattgaggtgatccgggagattgagatgtctgtggatgatgatgacatcaacagcagcaaggtgatcaatgacctcttcagtgatgtgctggaggagggggagctggacatggagaagagccaggaggagatggaccaggccctggccgagagcagcgaggagcaggaggatgccctgaacatcagctccatgagcctgctggcccccctggcccagacagtgggcgtggtgtccccagagagcctggtgtccaccccccggctggagctgaaggacaccagcagaagtgatgagagccccaagccaggcaagttccagaggaccagggtgcccagggctgagagcggggacagcctgggctctgaagatcgggacctgctgtacagcattgatgcctaccgcagccagcgcttcaaggagacagagcggcccagcatcaagcaggtgattgtgaggaaagaagatgtgaccagcaagctggatgagaagaacaatgccttcccctgccaggtgaacatcaagcagaagatgcaggagctgaacaatgagatcaacatgcagcagaccgtcatctaccaggccagccaggccctgaactgctgcgtggatgaggagcacggcaagggcagcctggaggaggccgaggccgagcggctgctgctgattgccaccgggaagaggaccctgctgattgatgagctgaacaagctgaagaatgaaggcccccagaggaagaacaaggccagcccccagagcgagttcatgcccagcaaaggatctgtgaccctgtctgagatccggctgcccctgaaggctgactttgtgtgcagcacagtgcagaagccagatgctgccaactactactacctgatcatcctgaaggccggggctgagaacatggtggccacccccctggccagcaccagcaacagcctgaatggagatgccctgaccttcaccaccaccttcaccctgcaggatgtgtccaatgactttgagatcaacatcgaggtgtacagcctggtgcagaagaaggaccccagcggcctggacaagaagaagaagaccagcaagagcaaggccatcacccccaagaggctgctgaccagcatcaccaccaagagcaacatccacagctctgtgatggccagccctgggggcctgtctgctgtgaggaccagcaactttgccctggtgggcagctacaccctgagcctgagctctgtgggcaacaccaagtttgtgctggacaaggtgcccttcctgagcagcctggagggccacatctacctgaagatcaagtgccaggtgaacagctctgtggaggagcggggcttcctgaccatctttgaagatgtgtctggctttggagcctggcaccggcgctggtgtgtgctgagcggcaactgcatctcctactggacctacccagatgatgagaagaggaagaaccccatcggccgcatcaacctggccaactgcaccagccggcagatcgagcccgccaaccgggagttctgtgcccggaggaacacctttgagctgatcaccgtgcggccccagcgggaggatgaccgggagaccctggtgtcccagtgccgggacaccctgtgtgtgaccaagaactggctgtctgctgacaccaaggaggagcgggacctgtggatgcagaagctgaaccaggtgctggtggacatccggctgtggcagccagatgcctgctacaagcccatcggcaagccctag

SEQ ID NO: 18526 - DNA, 1365 bp, synthetic construct
  source 1..1365: mol_type = other DNA; note = Synthetic coding sequence
atgctgaagcagatcctgtctgagatgtacattgatcctgacctgctggccgagctgtctgaggagcagaagcagatcctcttcttcaagatgagggaggagcagatccgccgctggaaggagcgggaggccgccatggagaggaaggagagcctgcctgtgaagccccggcccaagaaggaaaatggcaagtctgtgcactggaagctgggcgctgacaaggaggtgtgggtgtgggtgatgggagagcaccacctggacaagccctatgatgtgctgtgcaatgagatcatcgccgagcgggcccggctgaaggccgagcaggaggccgaggagcccaggaagacccacagcgaggagttcaccaacagcctgaagaccaagagccagtaccatgacctgcaggccccagacaaccagcagaccaaggacatctggaagaaggtggccgagaaggaggagctggagcagggcagcaggcctgcccccaccctggaggaggagaagatccgcagcctgagcagcagcagcaggaacatccagcagatgctggccgacagcatcaacaggatgaaggcctatgccttccaccagaagaaggagagcatgaagaagaagcaggatgaggagatcaaccagatcgaggaggagaggaccaagcagatctgcaagtcctggaaggaggacagcgagtggcaggccagcctgaggaagagcaaggccgcagatgagaagaggaggagcctggccaagcaggcccgggaggactacaagaggctgagcctgggcgcccagaagggccggggcggggagcggctgcagagccccctgcgggtgccccagaagccagagcggccccccctgccccccaagccccagttcctgaacagcggggcctacccccagaagcccctgaggaaccagggcgtggtgaggaccctgagcagcagcgcccaggaggacatcatccgctggttcaaggaggagcagctgcccctgcgggccggctaccagaagaccagtgacaccatcgccccctggttccacggcatcctgaccctgaagaaggccaatgagctgctgctgagcacaggcatgcctggcagcttcctgatccgggtgtctgagcgcatcaagggctacgccctgagctacctgtctgaagatggctgcaagcacttcctgattgatgccagcgcagatgcctacagcttcctgggcgtggaccagctgcagcacgccaccctggccgacctggtggagtaccacaaggaggagcccatcaccagcctgggcaaggagctgctgctgtacccctgtggccagcaggaccagctgcctgactacctggagctgtttgaatag

SEQ ID NO: 18527 - DNA, 1497 bp, synthetic construct
  source 1..1497: mol_type = other DNA; note = Synthetic coding sequence
atggatgaaacagagtggatccaccgccaccccaaggccgaggacctgcgggtgggcctcatctcctgggccggcacctacctgacctttgaggcctgcaagaacacagtgacagccacagccaagagcctgggccggcggcagacctgggagatcctggtgtccaatgagcacgagacccaggccgtggtgcggctgaagtctgtgcagggcctgtacctgctgtgtgaatgtgatggcaccgtgtgctacggccggcccaggaccagccaccacggctgcttcctgctgcgcttccacaggaacagcaagtggaccctgcagtgcctgatcagcggccgctacctggagagcaatggcaaggatgtgttctgcaccagccacgtgctgagcgcctaccacatgtggacccccaggcctgccctgcacgtgcacgtgatcctgtacagccccatccaccgctgctacgcccgggctgaccccaccatgggccgcatctgggtggatgctgctgtgccctgcctggaggagtgtggcttcctgctgcacttcagagatggctgctaccacctggagaccagcacccaccacttcctgagccacgtggacaggctcttcagccagcccagcagccagacagccttccacatgcaggtgcggcctgggggcctggtggccctgtgtgatggagagggcggcatgctgtacccccagggcacccacctgctgctgggcatgggctgcaaccccatgagaggagaggagtggttcatcctgcagcactgccccacctgggtgtccctgcggagcaagacaggccgcttcatcagcgtcatctatgatggagaggtgcgggccgccagcgagcggctgaacaggatgagcctcttccagtttgaatgtgacagcgagagccccaccgtgcagctgcggagcgccaacggctactacctgagccagaggaggcacagagctgtgatggctgatggccaccccctggagagtgacaccttcttcaggatgcactggaactgtggccgcatcatcctgcagagctgccggggccgcttcctgggcatcgcccccaacagcctgctgatggccaacgtcatcctgcccggccccaatgaggagtttggcatcctgtttgccaacagaagcttcctggtgctgcggggccgctatggctacgtgggcagcagcagcggccatgacctgatccagtgcaaccaggaccagcctgaccgcatccacctgctgccctgccggcccggcatctaccacttccaggcccagggcggcagcttctggagcatcaccagctttggcaccttccggccctggggcaagtttgccctgaacttctgcatcgagctgcagggcagcaacctgctgactgtgctggccccaaatggcttctacatgagagctgaccagagcggcaccctgctggccgacagcgaggacatcacccgggagtgcatctgggagttctag

SEQ ID NO: 18528 - DNA, 1377 bp, synthetic construct
  source 1..1377: mol_type = other DNA; note = Synthetic coding sequence
atggagcgggagcccagcgccagcgaggccgccccagctgctgctgccctgtttgcctggggcgccaacagctatggccagctgggcctgggccacaaggaggatgtgctgctgccccagcagctgaatgacttctgcaagcccaggtctgtgcggcgcatcactggaggcggcggccacagcgctgtggtgacagatggaggagacctgtttgtgtgtggcctgaacaaggatggccagctgggcctgggccacacagaggacatcccctacttcaccccctgcaagagcctgtttggctgccccatccagcaggtggcctgtggctgggacttcaccatcatgctgacagaaaatggccaggtgctgagctgtggcagcaacagctttggccagctgggcgtgccccacggcccccggcgctgtgtggtgccccaggccatcgagctgcacaaggagaaggtggtgtgcatcgccgccggcctgcggcatgctgtggccgccacagccagcggcatcgtgttccagtggggcaccggcctggccagctgtggccggcggctgtgccccggccagaccctgcccctcttcttcaccgccaaggagcccagccgggtgacaggcctggagaacagcaaggccatgtgtgtgctggccggcagtgaccacagcgccagcctgacagatgctggggaggtgtatgtgtggggcagcaacaagcacggccagctggccaatgaggccgccttcctgcctgtgccccagaagattgaggcccactgcttccagaatgagaaggtgacagccatctggagcggctggacccacctggtggcccagacagaaacaggcaagatgttcacctggggccgggctgactatggccagctgggcaggaagctggagacctatgagggctggaagctggagaagcaggacagcttcctgccctgcagcaggcctcccaacagcatgcccagcagcccccactgcctgactggagccacagaggtgtcctgtggcagcgagcacaacctggccatcattggaggagtgtgctacagctggggctggaatgaacatggcatgtgtggagatggaacagaggccaacgtgtgggcccccaagcctgtgcaggccctgctgagcagcagcggcctgctggtgggctgtggggccggccacagcctggccctgtgccagctgcctgcccacccagccctggtgcaggaccccaaggtgacctacctgagcccagatgccatcgaggacacagagagccagaaggccatggacaaggagaggaactggaaggagcggcagagcgagaccagcacccagagccagagcgactggagcagaaatggaggcctgtag

SEQ ID NO: 18529 - DNA, 2961 bp, synthetic construct
  source 1..2961: mol_type = other DNA; note = Synthetic coding sequence
atggagaggatgaactggctgagccggctggccagccggggccctggccaccgcatcccccagggcgccaacctgcagacccctgtgatggctgaccctgagacctgcctgatggtgttcaagaaccactggagccaggtggtgcgcatcctggagcggcagggcccccgggccgcccctgggggcgcagatgacctgtctgctgtgaggaaccacacctaccagatgctgaccctgctggccgaggacagagctgtgcccagcgcccccactggacctggccccctgctggagtttgccctgcacgaggacctgctgaccagggtgctgacctggcagctgcagtgggatgagctgggagatggagtggaggagcggcgggcagagcagctgaagctgtttgagatgctggtgtctgaggcccggcagcccctgctgcggcacggccctgtgcgggaggccctgctgaccctgctggatgcctgtggccggcctgtgcccagcagccctgccctggatgagggcctggtgctgctgctgagccagctgtgtgtgtgtgtggcccaggagcccagcctgctggagttcttcctgcagcccccacctgagcccggggccgccccccggctgctgctcttcagccggctggtgccctttgtgcaccgggagggcaccctgggccagcaggccagagatgccctgctgctgctgatggccctgtctgctggcagccccaccgtgggccgctacatcgctgaccacagctacttctgccctgtgctggccaccggcctgagcgccctgtacagcagcctgcccaggaagattgaggtgcctggagatgactggcactgcctgcggcgggaggactggctgggcgtgcctgccctggccctcttcatgagcagcctggagttctgcaatgctgtgatccaggtggcccaccccctggtgcagaagcagctggtggactacatccacaacggcttcctggtgcctgtgatgggccctgccctgcacaagacctctgtggaggagatgattgccagcacagcctacctggagctgttcctgcggagcatcagcgagcccgccctgctgcggaccttcctgcgcttcctgctgctgcacagacatgacacccacaccatcctggacaccctggtggcccgcatcggcagcaacagccggctgtgcatggtgtccctgagcctcttccgcaccctgctgaacctgagctgtgaagatgtgctgctgcagctggtgctgcgctacctggtgccctgcaaccacgtgatgctgagccagaagccagctgtgagagatgtggacctgtatggccgggctgctgacaagttcctgagcctcatcccccgctgctgccgccaccacgcccccagcccccccaggcctgagcacgcctcctgggcccggggcggccccagccgggagactggaagaagagaggacatcaccggccctggcagccccagcgtggacagcagctctgtgaccaccgtgccccggcccagcacccccagccggctggccctcttcctgcggcagcagagcctgggcggcagcgagagccctggccctgccccctgcagccctggcctgagcgccagccctgccagcagccctggccggcggcccaccccagctgaggagcccggggagctggaggacaactacctggagtacctgcgggaggccaggagaggagtggacagatgtgtgcgggcctgcaggacctggagcgccccctatgatggagagcggcccagccctgagcccagccccttcggcagcaggaccaagaagaggagcctgctgcctgaagaagatagaaataatgtgggggagggggaggaggaggagctgggccggcggggccgggccggcggggccggggagggccctggccacctgcccccaccccagctgaatggagtgcccggctcctggccagagggcgccaagaaggtgcggctggtgcccaaggagggcgctggggagctgctggagggcatcagcgagggcatggccggcctggagggcttcggccaggagctgcgggagctggaggtggccctgagcaatggaggcaccggcagcgagagccccctggagccccccctgcccctggaggaggaggaggcctatgagagcttcacctgccccccagagcccccaggccccttcctgagcagccccctgcggaccctgaaccagctgcccagccagcccttcaccggccccttcatggctgtgctgtttgccaagctggagaacatgctgcagaacagcgtgtatgtgaacttcctgctgaccggcctggtggcccagctggcctgccacccccagcccctgctgcggagcttcctgctgaacaccaacatggtgttccagcccagcgtgaagagcctgctgcaggtgctgggctctgtgaagaacaagattgagaactttgctgccagccaggaggacttccctgccctgctgagcaaggccaagaagtacctgattgcccggggcaagctggactgggccgagggccctgctgctggccctgcccccaggagaagtgaccccctggtgaagagccggcggcccagcctgggggagctgctgctgcggcatgcccacagccccacccgggcccggcaggccgcccagctggtgctgcagcccggcagagatggagctggcctgggcctgagcggcggcagccctggggccagcacccctgtgctgctgacccggggcggggcccctgagcggcagggcgaggccctgcgggtgaagaatgctgtgtactgtgccgtcatcttccctgagttcctgaaggagctggccgccatcagccaggcccatgctgtgaccagccccttcctgctggagaccagcgaggagggcagcggccccctcatcagcggctgcggccccctgaacccctag

SEQ ID NO: 18530 - DNA, 6723 bp, synthetic construct
  source 1..6723: mol_type = other DNA; note = Synthetic coding sequence
atggatgacaagggggaccccagcaatgaggaggcccccaaggccatcaagcccaccagcaaggagttcaggaagacctggggcttccggaggaccaccatcgccaagcgggagggcgctggagatgctgaggccgaccccctggagcccccaccaccccagcagcagctgggcctgagcctgcggcgcagcggccggcagcccaagaggacagagcgggtggagcagttcctgaccatcgccaggagaagaggccgccgctccatgcctgtgtccctggaggacagcggggagcccaccagctgcccagccacagatgctgagacagccagcgagggctctgtggagagcgccagcgagaccaggagcggcccccagagcgccagcacagctgtgaaggagaggcctgccagcagcgagaaggtgaagggaggagatgaccatgatgacaccagtgacagcgacagtgatggcctgaccctgaaggagctgcagaaccggctgcggaggaagcgggagcaggagcccacagagcggcccctgaagggcatccagagccggctgaggaagaagaggcgggaggagggccctgctgagaccgtgggcagcgaggccagtgacacagtggagggcgtgctgcccagcaagcaggagccagaaaatgaccagggcgtggtgtcccaggccggcaaggatgaccgggagagcaagctggagggcaaggccgcccaggacatcaaggatgaggagcccggggacctgggccggcccaagccagaatgtgagggctatgaccccaatgccctgtactgcatctgccggcagccccacaacaaccgcttcatgatctgctgtgacagatgtgaggagtggttccatggagactgtgtgggcatcagcgaggcccggggccgcctgctggagagaaatggagaggactacatctgccccaactgcaccatcctgcaggtgcaggatgagacccacagcgagacagctgaccagcaggaggccaagtggaggcctggagatgctgatggaacagactgcaccagcatcggcaccatcgagcagaagagcagcgaggaccagggcatcaagggccgcatcgagaaggccgccaaccccagcggcaagaagaagctgaagatcttccagcctgtgattgaggcccctggggccagcaagtgcatcggccctggctgctgccacgtggcccagcctgacagcgtgtactgcagcaatgactgcatcctgaagcacgccgccgccaccatgaagttcctgagcagcggcaaggagcagaagcccaagcccaaggagaagatgaagatgaagccagagaagcccagcctgcccaagtgtggggcccaggccggcatcaagatcagctctgtgcacaagaggcctgcccctgagaagaaggagaccaccgtgaagaaggctgtggtggtgcctgcccggtctgaggccctgggcaaggaggccgcctgtgagagcagcacccccagctgggccagtgaccacaactacaatgctgtgaagccagagaagacagctgcccccagccccagcctgctgtacaagagcaccaaggaggacagaagaagtgaggagaaggccgccgccatggccgccagcaagaagacagcccctcctggcagcgctgtgggcaagcagcctgcccccaggaacctggtgcccaagaagagcagctttgccaacgtggccgccgccaccccagccatcaagaagccacccagcggcttcaagggcaccatccccaagaggccctggctgagcgccacccccagcagcggggccagcgctgcccggcaggccggccctgccccagctgctgccacagctgccagcaagaagtttcctggcagcgctgccctggtgggcgctgtgaggaagcctgtggtgcccagcgtgcccatggccagccctgcccctggccgcctgggcgccatgtctgctgcccccagccagcccaacagccagatccggcagaacatcagaagaagcctgaaggagatcctgtggaagagggtgaatgacagtgatgacctgatcatgacagaaaatgaggtgggcaagatcgccctgcacatcgagaaggagatgttcaacctcttccaggtgacagacaaccgctacaagagcaagtaccgcagcatcatgttcaacctgaaggaccccaagaaccagggcctcttccaccgggtgctgcgggaggagatcagcctggccaagctggtgcggctgaagccagaggagctggtgtccaaggagctgagcacctggaaggagaggcctgcccggtctgtgatggagagcaggaccaagctgcacaatgaaagcaagaagacagccccccggcaggaggccatcccagacctggaggacagcccccctgtgtctgattctgaggagcagcaggagagcgcccgggctgtgcctgagaagagcacagcccccctgctggatgtgttcagctccatgctgaaggacaccaccagccagcaccgggcccacctgtttgacctgaactgcaagatctgcaccggccaggtgcccagcgcagaagatgagcccgcccccaagaagcagaagctgagcgcctctgtgaagaaggaggacctgaagagcaagcatgacagcagcgccccagaccctgccccagacagcgcagatgaggtgatgcctgaggccgtgcctgaggtggccagcgagcccggcctggagagcgccagccaccccaacgtggacaggacctacttccctggccccccaggagatggccaccctgagcccagccccctggaggacctgagcccctgcccagccagctgtggcagcggcgtggtgaccaccgtgacagtgtctggccgggaccccaggacagcccccagcagcagctgcacagctgtggccagcgctgccagcaggccagacagcacccacatggtggaggcccggcaggatgtgcccaagcctgtgctgacctctgtgatggtgcccaagagcatcctggccaagcccagcagcagcccagacccccgctacctgtctgtgccccccagccccaacatcagcaccagcgagagccgcagccccccagagggggacaccaccctcttcctgagccggctgagcaccatctggaagggcttcatcaacatgcagagcgtggccaagtttgtgaccaaggcctaccctgtgtctggctgctttgactacctgtctgaggacctgcctgacaccatccacatcggcggcagaattgcccccaagacagtgtgggactatgtgggcaagctgaagagctctgtgtccaaggagctgtgcctgatccgcttccacccagccacagaggaggaggaggtggcctacatcagcctgtacagctacttcagcagccggggccgcttcggcgtggtggccaacaacaacagacatgtgaaggacctgtacctgatccccctgagcgcccaggaccctgtgcccagcaagctgctgccctttgagggccctggcctggagagcccccggcccaacatcatcctgggcctggtgatctgccagaagatcaagaggcctgccaacagcggggagctggacaagatggatgagaagaggacccggctgcagcctgaggaggctgatgtgcctgcctaccccaaggtggccaccgtgccccagagcgagaagaagcccagcaagtaccccctgtgcagcgcagatgctgctgtgtccaccaccccacctggcagccccccacctcctccacccctgcctgagccccctgtgctgaaggtgctgagcagcctgaagccagctgcccccagccctgccacagctgccaccacagctgctgctgccagcacagctgccagcagcacagccagcagcgccagcaagacagccagccccctggagcacatcctgcagaccctgtttgggaagaagaagagctttgaccccagcgcccgggagcccccaggcagcacagctggcctgccccaggagcccaagaccacagcagaagatggagtgcctgccccacccctgctggaccccatcgtgcagcagtttggccagttcagcaaggacaaggccctggaggaggaggaggatgaccggccctatgaccctgaggaggagtatgaccctgagcgggcctttgacacccagctggtggagcggggcagaagacatgaggtggagcgggcccctgaggccgctgctgctgagcgggaggaggtggcctatgaccctgaagatgagaccatcctggaggaggccaaggtgacagtggatgacctgcccaacaggatgtgtgctgatgtgagaagaaacagcgtggagaggcctgctgagcctgtggccggggccgccacccccagcctggtggagcagcagaagatgctggaggagctgaacaagcagatcgaggagcagaagaggcagctggaggagcaggaggaggccctgcggcagcagagagctgctgtgggcgtgtccatggcccacttctctgtgtctgatgccctgatgagccccccacccaagagcagcctgcccaaggccgagctgttccagcaggagcagcagagcgctgacaagccagccagcctgcccccagccagccaggccagcaaccaccgggacccccggcaggcccggcggctggccacagagaccggggagggggagggggagcccctgagccggctgagcgcccggggggcccagggcgccctgcctgagagagatgccagccggggcggcctggtgggccaggcccccatgcctgtgcctgaggagaaggagcccgccagcagcccctgggccagcggggagaagcccccagctggcagcgagcaggacggctggaaggccgagcccggggagggcaccaggcctgccaccgtgggggacagcagcgcccggcctgcccggcgggtgctgctgcccaccccaccctgtggggccctgcagcccggcttccccctgcagcatgatggagagcgggaccccttcacctgccccggctttgccagccaggacaaggccctgggcagcgcccagtatgaggaccccaggaacctgcacagcgctggccgcagcagcagccctgctggggagacagaaggagaccgggagccccaggcccggcctggagagggcacagcccccctgcccccacctggccagaaggtgggcggcagccagccccccttccagggccagcgggagcccggcccccacgccctgggcatgagcggcctgcacggccccaacttccctggcccccggggccctgccccacccttccctgaggagaacatcgccagcaatgatggcccccggggccccccaccagccaggtttggagcccagaagggccccatccccagcctcttcagcggccagcacggccccccaccctacggggacagccggggccccagccccagctacctgggcggcccccggggcgtggcccccagccagtttgaggagaggaaggacccccatggagagaagcgggagttccaggatgccccctacaatgaggtgactggagccccagcccagtttgagggcacagagcaggcccccttcctgggcagcagaggaggagcccccttccagtttggaggccagaggcggcccctgctgagccagctgaagggcccccggggcggccccccacccagccagtttggaggccagaggggccccccacctggccactttgtgggcccccggggcccccaccccagccagtttgaaacagcccggggcccccaccccaaccagtttgagggcccccggggccaggcccccaacttcatgcctggcccccggggcatccagccccagcagtttgaggaccagagggtgcacagccccccacgcttcaccaaccagagggccccagcccccctgcagtttggaggcctgcggggcagcgcccccttcagcgagaagaatgagcagacccccagccgcttccacttccagggccaggccccccaggtgatgaagccaggcccccggcccctgctggagctgcccagccaccccccccagcacaggaaggaccgctgggaggaggccggcccccccagcgccctgagcagcagcgcccctggccagggccctgaggctgatggccagtgggccagcgctgacttccgggagggcaagggccacgagtacagaaaccagacctttgagggccggcagcgggagagatttgatgtgggccccaaggagaagcccctggaggagccagatgcccagggccgggcctctgaagatagaagaagagagcgggagcggggcaggaactggagccgggagcgggactgggaccggccccgggagtgggacagacaccgggacaaggacagcagccgggactgggacaggaaccgggagaggtctgccaacagagaccgggagcgggaggccgaccggggcaaggagtgggacaggagccgggagaggagcaggaaccgggagcgggagcgggacagaagaagagaccgggacaggagccgcagccgggagcgggaccgggacaaggcccgggaccgggagcggggccgggacaggaaggacaggagcaagagcaaggagagcgcccgggaccccaagccagaggccagccgggccagtgatgctggaacagccagccaggcctag

SEQ ID NO: 18531 - DNA, 1635 bp, synthetic construct
  source 1..1635: mol_type = other DNA; note = Synthetic coding sequence
atggatgacaagggggaccccagcaatgaggaggcccccaaggccatcaagcccaccagcaaggagttcaggaagacctggggcttccggaggaccaccatcgccaagcgggagggcgctggagatgctgaggccgaccccctggagcccccaccaccccagcagcagctgggcctgagcctgcggcgcagcggccggcagcccaagaggacagagcgggtggagcagttcctgaccatcgccaggagaagaggccgccgctccatgcctgtgtccctggaggacagcggggagcccaccagctgcccagccacagatgctgagacagccagcgagggctctgtggagagcgccagcgagaccaggagcggcccccagagcgccagcacagctgtgaaggagaggcctgccagcagcgagaaggtgaagggaggagatgaccatgatgacaccagtgacagcgacagtgatggcctgaccctgaaggagctgcagaaccggctgcggaggaagcgggagcaggagcccacagagcggcccctgaagggcatccagagccggctgaggaagaagaggcgggaggagggccctgctgagaccgtgggcagcgaggccagtgacacagtggagggcgtgctgcccagcaagcaggagccagaaaatgaccagggcgtggtgtcccaggccggcaaggatgaccgggagagcaagctggagggcaaggccgcccaggacatcaaggatgaggagcccggggacctgggccggcccaagccagaatgtgagggctatgaccccaatgccctgtactgcatctgccggcagccccacaacaaccgcttcatgatctgctgtgacagatgtgaggagtggttccatggagactgtgtgggcatcagcgaggcccggggccgcctgctggagagaaatggagaggactacatctgccccaactgcaccatcctgcaggtgcaggatgagacccacagcgagacagctgaccagcaggaggccaagtggaggcctggagatgctgatggaacagactgcaccagcatcggcaccatcgagcagaagagcagcgaggaccagggcatcaagggccgcatcgagaaggccgccaaccccagcggcaagaagaagctgaagatcttccagcctgtgattgaggcccctggggccagcaagtgcatcggccctggctgctgccacgtggcccagcctgacagcgtgtactgcagcaatgactgcatcctgaagcacgccgccgccaccatgaagttcctgagcagcggcaaggagcagaagcccaagcccaaggagaagatgaagatgaagccagagaagcccagcctgcccaagtgtggggcccaggccggcatcaagatcagctctgtgcacaagaggcctgcccctgagaagaaggagaccaccgtgaagaaggctgtggtggtgcctgcccggtctgaggccctgggcaaggaggccgcctgtgagagcagcacccccagctgggccagtgaccacaactacaatgctgtgaagccagagaagacagctgcccccagccccagcctgctgtacaagtgcagcggcaagtacagctacagcctgcaccccagcctgattgcctag

SEQ ID NO: 18532 - DNA, 1164 bp, synthetic construct
  source 1..1164: mol_type = other DNA; note = Synthetic coding sequence
atggagcggcccccacccagggctgctggccgggaccccagcgccctgcgggcagaggccccctggctgcgggcagagggccctggcccccgggccgcccctgtgacagtgcccaccccaccccagggcagctctgtgggcggcggctttgctggcctggagtttgcccggccccaggagagcgagccccgggccagtgacctgggcgcccccaggacctggacaggagctgctgctggccccaggaccccatctgcccacatccctgtgcctgcccagagggccaccccaggcaaggcccggctggatgaggtgatggctgctgctgccctgaccagcctgagcaccagccccctgctgctgggcgcccctgtggccgccttcagccctgagcccggcctggagccctggaaggaggccctggtgcggcccccaggcagctacagcagcagcagcaacagcggggactggggctgggacctggccagtgaccagagcagccccagcacccccagcccccccctgcccccagaggccgcccacttcctgtttggagagcccaccctgaggaagaggaagagccctgcccaggtgatgttccagtgcctgtggaagagctgtgggaaggtgctgagcacagccagcgccatgcagaggcacatccggctggtgcacctgggccggcaggccgagcctgagcagagtgatggagaggaggacttctactacacagagctggatgtgggcgtggacaccctgacagatggcctgagcagcctgacccctgtgagccccacagcctccatgcccccagccttcccccggctggagctgcctgagctgctggagcccccagccctgcccagccccctgcggcccccagccccacccctgcccccacctcctgtgctgagcacagtggccaacccccagagctgccacagcgacagagtgtaccagggctgcctgaccccagcccggctggagccccagcccacagaggtgggcgcctgccccccagccctgagcagccgcatcggcgtgaccctgaggaagcccagaggagatgccaagaagtgcaggaaggtgtatggcatggagcggcgggacctgtggtgcacagcctgccgctggaagaaggcctgccagcgcttcctggactag

SEQ ID NO: 18533 - DNA, 414 bp, synthetic construct
  source 1..414: mol_type = other DNA; note = Synthetic coding sequence
atgctgcgcttctgtgccggcctgagtgactttgcccctgtggccgtgcgcagcctgcaggacctggccagaattgccatccggggcaccatcaagaagatcatccaccaggagaccgtgtccaagaatggaaatggcctgaagaacaccccccgcttcaagagaagaagagtgagaagaagaaggatggagaccatcgtgttcctggacaaggaggtgtttgccagccgcatcagcaaccccagtgatgacaacagctgtgaggacctggaggaggagcggcgggaggaggaggagaagaccccacctgagaccaagccagacccccctgtgaacttcctgcggcagaaggtgctgagcctgcccctgcctgaccccctgaagtactacctgctgtactaccgggagaagtag

SEQ ID NO: 18534 - DNA, 2505 bp, synthetic construct
  source 1..2505: mol_type = other DNA; note = Synthetic coding sequence
atgaggctgctggatggcaagcagaccagccgctacagtgaaaatgcctgtgagaagaagatcttcagcatctacggccactaccctgtggtgcgggccgccctgcggaggaagggctgggtggagaagaagttccacttcctgcccaaggtgatcccagatgtggaggatgaaggagcccgggtgaatgatgacacctgtgccaaggtgaaggagaaccaggagatggccctggagaagacagacaacatccatgatgtgatgagccggctggtgaagaatgagatgccctacctgctgtggaccatcaagagggacatcatcgactaccacagcctgacctatgaccagatgctgaaccactacgccaagacagccagcttcaccaccaagattggcctgtgtgtgaacatgaggagcctgccctggtacgtgcctgccaacccagacagcttcttcccccgctgctacagcctgtgcacagaaagtgagcagcaggagttcctggaggacttccggaggaccatggccagcagcatcctgaagtgggtggtgagccaccagagctgcagccgcagcagccgcagcaagccccgggaccagcgggaggaggccggcagcagtgacctgagcagccggcaggatgctgaaaatgctgaggccaagctgcggggcctgcccggccagctggtggacatcgcctgcaaggtgtgccaggcctacctgggccagctggagcacgaggacatcgacaccagcgcagatgctgtggaggacctgacagaagctgagtgggaggacctgacccagcagtactacagcctggtgcaggtgcccctgggcagcagcatcgtgctgtgcatcttcaagatccagaaggtgatgatgagctttgagcccccaacagcccgggaccggcagtgccaggccctgctgaaccgcatcacctctgtgaacccccagacagacattgatggcctgaggaacatctggatcatcaagccagctgccaagagccggggccgcggggagagcccagacatcgtgtgcatggacagagtggaggagatcctggagctggccgctgctgaccaccccctgagccgggacaacaagtgggtggtgcagaagtacatcgagacccccctgctgatctgtgacaccaagtttgacatccggcagtggttcctggtgacagactggaaccccctgaccatctggttctacaaggagagctacctgcgcttcagcacccagcgcttcagcctggacaagctggacagcgccatccacctgtgcaacaatgctgtgcagaagtacctgaagaatgatgtgggccgcagccccctgctgcctgcccacaacatgtggaccagcacccgcttccaggagtacctgcagaggcagggcagaggagctgtgtggggcagcgtcatctaccccagcatgaagaaggccatcgcccacgccatgaaggtggcccaggaccacgtggagcccaggaagaacagctttgagctgtatggagctgactttgtgctgggccgggacttccggccctggctgattgagatcaacagcagccccaccatgcaccccagcacccctgtgacagcccagctgtgtgcccaggtgcaggaggacaccatcaaggtggccgtggacaggagctgtgacatcggcaactttgagctgctgtggaggcagcctgtggtggagcccccacccttcagcggcagtgacctgtgtgtggccggcgtgtctgtgcggcgggcccggcggcaggtgctgcctgtgtgcaacctgaaggccagcgccagcctgctggatgcccagcccctgaaggcccggggccccagcgccatgccagaccctgcccagggcccccccagccctgccctgcagagggacctgggcctgaaggaggagaagggcctgcccctggccctgctggcccccctgcggggagctgctgagagcggcggggccgcccagcccaccaggaccaaggccgccggcaaggtggagctgcctgcctgcccctgccgccacgtggacagccaggcccccaacacaggagtgcctgtggcccagcctgccaagtcctgggaccccaaccagctgaatgcccaccccctggagcctgtgctgcggggcctgaagacagctgagggcgccctgcggcccccacctgggggcaagggggagggcaccgtgtgcagccggctgccccaccacggccaccacgtggccgcctgccagaccaccggcaccacctgggatggcggccctggggtgtgcttcctgcggcagctgctggccagcgagctgcccatgggccctggcctgccccgggacccccgggccccaccctgcctggtgtgccggggcctgctgcccccagctggcccctgcaagcgctgccgctccttctgtgccgctgtgctgcagggcgccagctttgtgcggctgggcggccgcagctgcagccccaggaccccctag

SEQ ID NO: 18535 - DNA, 759 bp, synthetic construct
  source 1..759: mol_type = other DNA; note = Synthetic coding sequence
atgtgcagcaccagcggctgtgacctggaggagatccccctggatgatgatgacctgaacaccatcgagttcaagatcctggcctactacaccaggcaccacgtgttcaagagcaccccagccctcttcagccccaagctgctgcggaccaggagcctgagccagaggggcctgggcaactgcagcgccaatgaatcctggacagaggtgtcctggccctgcaggaacagccagagcagcgagaaggccatcaacctgggcaagaagaagagctcctggaaggccttctttggagtggtggagaaggaggacagccagagcaccccagccaaggtgtctgcccagggccagaggaccctggagtaccaggacagccacagccagcagtggagccgctgcctgagcaatgtggagcagtgcctggagcatgaagctgtggaccccaaggtgatcagcatcgccaacagagtggccgagatcgtgtacagctggcccccaccccaggccacccaggccggcggcttcaagagcaaggagatctttgtgacagagggcctgtccttccagctgcagggccacgtgcctgtggccagcagcagcaagaaggatgaggaggagcagatcctggccaagatcgtggagctgctgaagtacagcggggaccagctggagaggaaggacacagccttcatccccatccccctggtggacaccagcatccagggcttcccccaggacggcctgatggcctgcatctag

SEQ ID NO: 18536 - DNA, 261 bp, synthetic construct
  source 1..261: mol_type = other DNA; note = Synthetic coding sequence
atgagcctgcccctgaaccccaagcccttcctgaatggcctgaccgggaagcctgtgatggtgaagctgaagtggggcatggagtacaagggctacctggtgtctgtggatggctacatgaacatgcagctggccaacacagaggagtacattgatggagccctgagcggccacctgggggaggtgctgatccgctgcaacaacgtgctgtacatccggggcgtggaggaggaggaggaggatggagagatgagggagtag

SEQ ID NO: 18537 - DNA, 1281 bp, synthetic construct
  source 1..1281: mol_type = other DNA; note = Synthetic coding sequence
atggccagcggccacagcctgctgctggagaatgcccagcaggtggtgctggtgtgtgcccggggggagcgcttcctggccagagatgccctgcggagcctggccgtgctggagggcgccagcctggtggtgggcaaggatggcttcatcaaggccatcggccctgcagatgtgatccagaggcagttcagcggggagacctttgaggagatcatcgactgcagcggcaagtgcatcctgcccggcctggtggatgcccacacccaccctgtgtgggccggggagcgggtgcatgaatttgccatgaagctggccggggccacctacatggagatccaccaggccggcggcggcatccacttcaccgtggagaggacccggcaggccacagaggaggagctgttccgcagcctgcagcagaggctgcagtgcatgatgagagctggcaccaccctggtggagtgcaagagcggctacggcctggacctggagacagagctgaagatgctgcgggtgattgagcgggcccggcgggagctggacatcggcatcagcgccacctactgtggggcccacagcgtgcccaagggcaagacagccacagaagctgctgatgacatcatcaacaaccacctgcccaagctgaaggagctgggcagaaatggagagatccacgtggacaacattgatgtgttctgtgagaagggcgtgtttgacctggacagcacccggcgcatcctgcagaggggcaaggacatcggcctgcagatcaacttccatggagatgagctgcaccccatgaaggctgctgagctgggcgctgagctgggcgcccaggccatcagccacctggaggaggtgtctgatgagggcatcgtggccatggccacagcccgctgcagcgccatcctgctgcccaccacagcctacatgctgcggctgaagcagccccgggccaggaagatgctggatgagggcgtcatcgtggccctgggcagtgacttcaaccccaatgcctactgcttctccatgcccatggtgatgcacctggcctgtgtgaacatgaggatgtccatgcctgaggccctggccgccgccaccatcaatgctgcctatgccctgggcaagagccacacccacggcagcctggaggtgggcaagcagggcgacctgatcatcatcaacagcagccgctgggagcacctgatctaccagtttggaggccaccacgagctgattgaatatgtgattgccaagggcaagctgatctacaagacctag

SEQ ID NO: 18538 - DNA, 1263 bp, synthetic construct
  source 1..1263: mol_type = other DNA; note = Synthetic coding sequence
atgttcagccctggccaggaggagcactgtgcccccaacaaggagcctgtgaagtatggagagctggtggtgctgggctacaacggggccctgcccaatggagaccggggccgcaggaagagcagatttgccctgtacaagaggcccaaggccaacggggtgaagcccagcacagtgcacgtgatcagcaccccccaggccagcaaggccatcagctgcaagggccagcacagcatctcctacaccctgagcaggaaccagacagtggtggtggagtacacccatgacaaggacacagacatgttccaggtgggccgcagcacagagagccccatcgactttgtggtgacagacaccatcagcggcagccagaacacagatgaggcccagatcacccagagcaccatcagcagatttgcctgcagaattgtgtgtgacagaaatgagccctacacagcccgcatctttgctgctggctttgacagcagcaagaacatcttcctgggggagaaggccgccaagtggaagaacccagatggccacatggatggcctgaccaccaacggggtgctggtgatgcacccccggggcggcttcacagaggagagccagcccggggtgtggagggagatctctgtgtgtggagatgtgtacaccctgcgggagaccaggtctgcccagcagaggggcaagctggtggagagcgagaccaacgtgctgcaggacggcagcctgattgacctgtgtggggccaccctgctgtggaggacagcagatggcctcttccacacccccacccagaagcacatcgaggccctgcggcaggagatcaatgctgcccggccccagtgccctgtgggcctgaacaccctggccttccccagcatcaacaggaaggaggtggtggaggagaagcagccctgggcctacctgagctgtggccacgtgcacggctaccacaactggggccacagaagtgacacagaggccaatgaaagagagtgccccatgtgcaggacagtgggcccctacgtgcccctgtggctgggctgtgaggccggcttctacgtggatgctggcccccccacccacgccttcaccccctgtggccacgtgtgcagcgagaagagcgccaagtactggagccagatccccctgccccacggcacccacgccttccacgccgcctgccccttctgtgccacccagctggtgggggagcagaactgcatcaagctgatcttccagggccccattgattag

SEQ ID NO: 18539 - DNA, 1056 bp, synthetic construct
  source 1..1056: mol_type = other DNA; note = Synthetic coding sequence
atgattgtgcagagggtggtgctgaacagcaggcctgggaagaatggaaatcctgtggccgagaacttcaggatggaggaggtgtacctgcctgacaacatcaatgaaggccaggtgcaggtgaggaccctgtacctgtctgtggacccctacatgcgctgcaggatgaatgaagacaccggcacagactacatcaccccctggcagctgagccaggtggtggatggcggcggcatcggcatcatcgaggagagcaagcacaccaacctgaccaagggggactttgtgaccagcttctactggccctggcagaccaaggtgatcctggatggcaacagcctggagaaggtggacccccagctggtggatggccacctgagctacttcctgggcgccatcggcatgcctggcctgaccagcctcatcggcatccaggagaagggccacatcacagctggcagcaacaagaccatggtggtgtctggagctgctggggcctgtggctctgtggccggccagatcggccacttcctgggctgcagccgggtggtgggcatctgtggcacccatgagaagtgcatcctgctgaccagcgagctgggctttgatgctgccatcaactacaagaaggacaacgtggccgagcagctgcgggagagctgcccagctggggtggatgtgtactttgacaacgtgggcggcaacatcagtgacaccgtcatcagccagatgaatgaaaacagccacatcatcctgtgtggccagatcagccagtacaacaaggatgtgccctaccccccacccctgagccctgccatcgaggccatccagaaggagaggaacatcacccgggagcgcttcctggtgctgaactacaaggacaagtttgagcccggcatcctgcagctgagccagtggttcaaggagggcaagctgaagatcaaggagaccgtcatcaatggcctggagaacatgggcgccgccttccagagcatgatgactggaggcaacatcggcaagcagatcgtgtgcatcagcgaggagatcagcctgtag

SEQ ID NO: 18540 - DNA, 2172 bp, synthetic construct
  source 1..2172: mol_type = other DNA; note = Synthetic coding sequence
atggccgaggaggaggagacagctgccctgacagagaaggtgatccgcacccagagggtcttcatcaacctgctggacagctacagcagcggcaacatcggcaagttcctgagcaactgtgtggtgggcgccagcctggaggagatcacagaggaggaggaggaggaggatgagaacaagagcgccatgctggaggccagcagcaccaaggtgaaggagggcaccttccagatcgtgggcaccctgagcaagccagacagccccaggccagactttgctgtggagacctacagcgccatcagccgggaggacctgctgatgaggctgctggagtgtgatgtgatcatctacaacatcacagagagcagccagcagatggaggaggccatctgggccgtgtctgccctgtctgaggaggtgagccactttgagaagaggaagctgttcatcctgctgagcacagtgatgacctgggcccggagcaaggccctggaccctgaagattctgaggtgcccttcacagaggaggactacagaagaaggaagagccaccccaacttcctggaccacatcaatgctgagaagatggtgctgaagtttgggaagaaggccaggaagtttgctgcctacgtggtggccgccggcctgcagtacggggctgagggcggcatgctgcacaccttcttcaagatggcctggctgggggagatcccagccctgcctgtgtttggagatggcaccaacgtcatccccaccatccacgtgctggacctggccggggtcatccagaatgtcatcgaccacgtgcccaagccccactacctggtggccgtggatgaatctgtgcacaccctggaggacatcgtgaagtgcatcagcaagaacacaggccctgggaagatccagaagatccccagagaaaatgcctacctgaccaaggacctgacccaggactgcctggaccacctgctggtgaacctgaggatggaggccctgtttgtgaaggagaacttcaacatccgctgggccgcccagacaggctttgtggagaacatcaacaccatcctgaaggagtacaagcagagccggggcctgatgcccatcaagatctgcatcctgggccccccagctgtgggcaagagcagcatcgccaaggagctggccaactactacaagctgcaccacatccagctgaaggatgtgatcagcgaggccatcgccaagctggaggccatcgtggccccaaatgatgtgggggagggggaggaggaggtggaggaggaggaggaggaggagaatgtggaggatgcccaggagctgctggatggcatcaaggagagcatggagcagaatgccggccagctggatgaccagtacatcatccgcttcatgaaggagaagctgaagtccatgccctgcaggaaccagggctacatcctggatggcttccccaagacctatgaccaggccaaggacctcttcaaccaggaggatgaggaggaggaggatgatgtgcggggccgcatgttcccctttgacaagctgatcatccctgagtttgtgtgtgccctggatgccagtgatgagttcctgaaggagagggtcatcaacctgcctgagagcatcgtggccggcacccactacagccaggaccgcttcctgcgggccctgagcaactacagagacatcaacattgatgatgaaacagtgttcaactactttgatgagctggagatccaccccatccacattgatgtgggcaagctggaggatgcccagaaccggctggccatcaagcagctgatcaaggagattggagagcccagaaattatggcctgacagatgaggagaaggccgaggaggagaggaaggctgctgaggagcggctggcccgggaggccgctgaggaggccgagcgggagcaccaggaggccgtggagatggccgagaagatcgcccgctgggaggagtggaacaagaggctggaggaggtgaagcgggaggagcgggagctgctggaggcccagagcatccccctgaggaactacctgatgacctacgtgatgcccaccctcatccagggcctgaatgaatgctgcaatgtgcggccagaagatcctgtggacttcctggccgagtacctgttcaagaacaaccctgaggcccagtag

SEQ ID NO: 18541 - DNA, 1245 bp, synthetic construct
  source 1..1245: mol_type = other DNA; note = Synthetic coding sequence
atgcagaccttcctgaagggcaagagggtgggctactggctgtctgagaagaagatcaagaagctgaacttccaggcctttgctgagctgtgcaggaagaggggcatggaggtggtgcagctgaacctgagccggcccatcgaggagcagggccccctggatgtgatcatccacaagctgacagatgtgatcctggaggccgaccagaatgacagccagagcctggagctggtgcaccgcttccaggagtacattgatgcccaccctgagaccatcgtgctggaccccctgcctgccatccgcaccctgctggacaggagcaagagctatgagctgatcaggaagattgaggcctacatggaggatgaccgcatctgcagcccccccttcatggagctgaccagcctgtgtggagatgacaccatgaggctgctggagaagaatggcctgaccttccccttcatctgcaagaccagggtggcccacggcaccaacagccatgagatggccatcgtgttcaaccaggagggcctgaatgccatccagcccccctgtgtggtgcagaacttcatcaaccacaatgctgtgctgtacaaggtgtttgtggtgggggagagctacacagtggtgcagaggcccagcctgaagaacttctctgctggcaccagtgaccgggagagcatcttcttcaacagccacaacgtgtccaagccagagagcagctctgtgctgacagagctggacaagattgagggcgtgtttgagcggcccagtgatgaagtcatccgggagctgagccgggccctgcggcaggccctgggcgtgtccctgtttggcatcgacatcatcatcaacaaccagacaggccagcacgccgtcatcgacatcaatgccttccctggctatgagggcgtgtctgagttcttcacagacctgctgaaccacatcgccaccgtgctgcagggccagagcacagccatggccgccactggagatgtggccctgctgcggcacagcaagctgctggccgagcctgctgggggcctggtgggggagaggacctgcagcgccagccctggctgctgcggctccatgatgggccaggatgccccctggaaggccgaggctgatgctgggggcacagccaagctgccccaccagaggctgggctgcaatgccggcgtgagccccagcttccagcagcactgtgtggccagcctggccaccaaggccagcagccagtag

SEQ ID NO: 18542 - DNA, 600 bp, synthetic construct
  source 1..600: mol_type = other DNA; note = Synthetic coding sequence
atgaggttccgcttctgtggggacctggactgcccagactgggtgctggccgagatcagcaccctggccaagatgagctctgtgaagctgcggctgctgtgcagccaggtgctgaaggagctgctgggccagggcatcgactatgagaagatcctgaagctgacagcagatgccaagtttgagagcggagatgtgaaggccaccgtggccgtgctgtccttcatcctgagcagcgctgccaagcacagcgtggatggagagagcctgagcagcgagctgcagcagctgggcctgcccaaggagcacgccgccagcctgtgccgctgctatgaggagaagcagagccccctgcagaagcacctgcgggtgtgcagcctgaggatgaaccggctggccggcgtgggctggagggtggactacaccctgagcagcagcctgctgcagagcgtggaggagcccatggtgcacctgcggctggaggtggccgccgcccctggcaccccagcccagcctgtggccatgagcctgtctgctgacaagttccaggtgctgctggccgagctgaagcaggcccagaccctgatgagcagcctgggctag

SEQ ID NO: 18543 - DNA, 1224 bp, synthetic construct
  source 1..1224: mol_type = other DNA; note = Synthetic coding sequence
atgagccacaggaagttcagcgcccccaggcatggccacctgggcttcctgccccacaagaggagccaccgccaccggggcaaggtgaagacctggcccagagatgaccccagccagcctgtgcacctgacagccttcctgggctacaaggccggcatgacccacaccctgcgggaggtgcacaggcctggcctgaagatcagcaagcgggaggaggtggaggccgtgaccatcgtggagaccccacccctggtggtggtgggcgtggtgggctacgtggccaccccccggggcctgcgctccttcaagaccatctttgctgagcacctgagtgatgaatgtagaagacgcttctacaaggactggcacaagagcaagaagaaggccttcaccaaggcctgcaagcgctggagggacacagatggcaagaagcagctgcagaaggactttgctgccatgaagaagtactgcaaggtgatccgggtgattgtgcacacccagatgaagctgctgcccttccggcagaagaaggcccacatcatggagatccagctgaatggaggcaccgtggccgagaaggtggcctgggcccaggcccggctggagaagcaggtgcctgtgcacagcgtcttcagccagagcgaggtgattgatgtgattgctgtgaccaagggccggggcgtgaagggcgtgaccagccgctggcacaccaagaagctgcccaggaagacccacaagggcctgaggaaggtggcctgcatcggggcctggcacccagcccgggtgggctgcagcatcgcccgggccggccagaagggctaccaccacaggacagagctgaacaagaagatcttcagaattggccggggcccccacatggaggatggcaagctggtgaagaacaatgccagcaccagctatgatgtgacagccaagagcatcacccccctgggcggcttcccccactatggagaggtgaacaatgactttgtgatgctgaagggctgcatcgccggcaccaagaagagggtcatcaccctgaggaagagcctgctggtgcaccacagccggcaggccgtggagaacatcgagctgaagttcatcgacaccaccagcaagtttggccacggccgcttccagacagcccaggagaagagggccttcatgggcccccagaagaagcacctggagaaggagaccccagagaccagcggggacctgtag

SEQ ID NO: 18544 - DNA, 7323 bp, synthetic construct
  source 1..7323: mol_type = other DNA; note = Synthetic coding sequence
atgagcagcagcggctacccacccaaccagggcgccttcagcacagagcagagccgctacccaccccacagcgtgcagtacaccttccccaacaccaggcaccagcaggagtttgctgtgcctgactaccgcagcagccacctggaggtgtcccaggccagccagctgctgcagcagcagcagcagcagcagctgcggcggcggcccagcctgctgtctgagttccaccctggcagtgaccggccccaggagaggaggaccagctatgagcccttccaccctggccccagccctgtggaccatgacagcctggagagcaagaggccccggctggagcaggtgtctgacagccacttccagagggtgtctgctgctgtgctgcccctggtgcaccccctgcctgagggcctgcgggccagcgcagatgccaagaaggaccctgcctttggaggcaagcatgaggcccccagcagccccatcagcggccagccctgtggagatgaccagaatgccagccccagcaagctgagcaaggaggagctgatccagagcatggacagagtggaccgggagatcgccaaggtggagcagcagatcctgaagctgaagaagaagcagcagcagctggaggaggaggccgccaagcccccagagcctgagaagcctgtgtccccacctcctgtggagcagaagcacaggagcatcgtgcagatcatctatgatgagaacaggaagaaggccgaggaggcccacaagatctttgagggcctgggccccaaggtggagctgcccctgtacaaccagcccagcgacaccaaggtgtaccacgagaacatcaagaccaaccaggtgatgaggaagaagctgatcctcttcttcaagagaagaaaccacgccaggaagcagcgggagcagaagatctgccagagatatgaccagctgatggaggcctgggagaagaaggtggacagaattgagaacaaccccaggaggaaggccaaggagagcaagacccgggagtactatgagaagcagtttcctgagatcaggaagcagcgggagcagcaggagcgcttccagagggtgggccagagaggagctggcctgagcgccaccatcgcccggtctgagcacgagatcagcgagatcattgatggcctgtctgagcaggagaacaatgagaagcagatgaggcagctgagcgtcatcccccccatgatgtttgatgctgagcagaggagagtgaagttcatcaacatgaatggcctgatggaggaccccatgaaggtgtacaaggaccggcagttcatgaatgtgtggacagaccacgagaaggagatcttcaaggacaagttcatccagcaccccaagaactttggcctcatcgccagctacctggagaggaagtctgtgcctgactgtgtgctgtactactacctgaccaagaagaatgaaaactacaaggccctggtgagaagaaattatggcaagaggcggggcaggaaccagcagatcgcccggcccagccaggaggagaaggtggaggagaaggaggaggacaaggccgagaagacagagaagaaggaggaggagaagaaggatgaggaggagaaggatgagaaggaggacagcaaggagaacaccaaggagaaggacaagattgatggaacagctgaggagacagaggagcgggagcaggccaccccccggggcaggaagacagccaacagccagggccgcaggaagggccgcatcaccaggtccatgaccaatgaagctgctgctgccagcgctgctgctgctgctgccacagaggagcccccaccacccctgcccccacctcctgagcccatcagcacagagcctgtggagaccagccgctggacagaggaggagatggaggtggccaagaagggcctggtggagcacggcaggaactgggccgccatcgccaagatggtgggcaccaagtctgaggcccagtgcaagaacttctacttcaactacaagagaagacacaacctggacaacctgctgcagcagcacaagcagaagaccagcaggaagccccgggaggagagagatgtgtcccagtgtgagagcgtggccagcacagtgtctgcccaggaggatgaggacatcgaggccagcaatgaggaggagaaccctgaggacagcgaggtggaggccgtgaagcccagcgaggacagcccagaaaatgccaccagccggggcaacacagagcctgctgtggagctggagcccaccacagaaacagcccccagcaccagccccagcctggccgtgcccagcaccaagccagcagaagatgaatctgtggagacccaggtgaatgacagcatctctgctgagacagctgagcagatggatgtggaccagcaggagcacagcgctgaggagggctctgtgtgtgaccccccaccagccaccaaggctgacagcgtggatgtggaggtgcgggtgcctgagaaccacgccagcaaggtggagggggacaacaccaaggagcgggacctggaccgggccagcgagaaggtggagcccagagatgaggacctggtggtggcccagcagatcaatgcccagaggcctgagccccagagcgacaatgacagcagcgccacctgcagcgcagatgaagatgtggatggagagcctgagcggcagaggatgttccccatggacagcaagcccagcctgctgaaccccaccggcagcatcctggtgagcagccccctgaagcccaaccccctggacctgccccagctgcagcacagagctgctgtgatcccccccatggtgtcctgcaccccctgcaacatccccatcggcacccctgtgtctggctacgccctgtaccagaggcacatcaaggccatgcatgagagcgccctgctggaggagcagaggcagaggcaggagcagattgacctggagtgccgcagcagcaccagcccctgtggcaccagcaagagccccaaccgggagtgggaggtgctgcagcctgccccccaccaggtgatcaccaacctgcctgagggcgtgcggctgcccaccacccggcccacccggcccccaccacccctcatccccagcagcaagaccaccgtggccagcgagaagcccagcttcatcatgggcggcagcatcagccagggcaccccaggcacctacctgaccagccacaaccaggccagctacacccaggagacccccaagcccagcgtgggcagcatcagcctgggcctgccccggcagcaggagagcgccaagagcgccaccctgccctacatcaagcaggaggagttcagccccaggagccagaacagccagcctgagggcctgctggtgcgggcccagcacgagggcgtggtgcggggcacagctggggccatccaggagggcagcatcacccggggcacccccaccagcaagatctctgtggagagcatccccagcctgcggggcagcatcacccagggcaccccagccctgccccagacaggcatccccacagaggccctggtgaagggcagcatcagcaggatgcccatcgaggacagcagccctgagaagggccgggaggaggccgccagcaaaggacatgtgatctatgagggcaagagcggccacatcctgtcctatgacaacatcaagaatgcccgggagggcaccaggagccccaggacagcccacgagatcagcctgaagaggagctatgaatctgtggagggcaacatcaagcagggcatgtccatgagggagagccctgtgtctgcccccctggagggcctcatctgccgggccctgccccggggcagcccccacagcgacctgaaggagaggacagtgctgagcggcagcatcatgcagggcaccccccgggccaccacagagagctttgaagatggcctgaagtaccccaagcagatcaagcgggagagcccccccatccgggcctttgagggcgccatcaccaagggcaagccctatgatggcatcaccaccatcaaggagatgggccgcagcatccacgagatcccccggcaggacatcctgacccaggagagcaggaagaccccagaggtggtgcagagcacccggcccatcatcgagggcagcatcagccagggcacccccatcaagtttgacaacaacagcggccagagcgccatcaagcacaacgtgaagagcctcatcaccggccccagcaagctgagccggggcatgccacccctggagatcgtgcctgagaacatcaaggtggtggagcggggcaagtatgaagatgtgaaggccggggagaccgtgcgcagccgccacacctctgtggtgagcagcggccccagcgtgctgcggagcaccctgcacgaggcccccaaggcccagctgagccctggcatctatgatgacaccagcgcccggaggacccctgtgtcctaccagaacaccatgagccggggcagccccatgatgaacagaacatctgatgtgaccatcagcagcaacaagagcaccaaccacgagaggaagagcaccctgacccccacccagcgggagagcatcccagccaagagccctgtgcctggggtggaccctgtggtgagccacagcccctttgacccccaccaccggggcagcacagctggggaggtgtaccgcagccacctgcccacccacctggaccctgccatgcccttccaccgggccctggaccctgctgctgctgcctacctgttccagaggcagctgagccccaccccaggctaccccagccagtaccagctgtatgccatggagaacacccggcagaccatcctgaatgactacatcaccagccagcagatgcaggtgaacctgcggccagatgtggcccggggcctgagcccccgggagcagcccctgggcctgccctacccagccacccggggcatcatcgacctgaccaacatgccacccaccatcctggtgccccaccctgggggcaccagcaccccacccatggaccgcatcacctacatccctggcacccagatcaccttccccccccggccctacaacagcgcctccatgagccctggccaccccacccacctggccgctgctgccagcgctgagcgggagcgggagcgggagcgggagaaggagcgggagcgggagagaattgctgctgccagcagtgacctgtacctgcggcccggcagcgagcagcccggccggcccggcagccacggctacgtgcgcagccccagccccagcgtgaggacccaggagaccatgctgcagcagaggccttctgtgttccagggcaccaacggcaccagcgtcatcacccccctggaccccacagcccagctgcgcatcatgcccctgcctgctgggggccccagcatcagccagggcctgcctgccagccgctacaacacagctgctgatgccctggccgccctggtggatgctgctgccagcgccccccagatggatgtgtccaagaccaaggagagcaagcatgaggccgcccggctggaggagaacctgcggagccgctctgctgctgtgtctgagcagcagcagctggagcagaagaccctggaggtggagaagaggtctgtgcagtgcctgtacaccagcagcgccttccccagcggcaagccccagccccacagctctgtggtgtacagcgaggccggcaaggacaagggccccccacccaagagccgctatgaggaggagctgcggacccggggcaagaccaccatcacagctgccaacttcattgatgtgatcatcacccggcagatcgccagtgacaaggatgcccgggagcggggcagccagagcagtgacagcagcagcagcctgagcagccacagatatgagacccccagtgatgccattgaagtcatcagccctgccagcagccctgccccaccccaggagaagctgcagacctaccagcctgaggtggtgaaggccaaccaggctgaaaatgaccccacccggcagtatgagggccccctgcaccactaccggccccagcaggagagccccagcccccagcagcagctgccccccagcagccaggccgagggcatgggccaggtgcccaggacccacaggctcatcaccctggccgaccacatctgccagatcatcacccaggactttgccaggaaccaggtgagcagccagaccccccagcagccccccaccagcaccttccagaacagccccagcgccctggtgtccacccctgtgaggaccaagaccagcaaccgctacagccctgagagccaggcccagagcgtgcaccaccagaggcctggcagccgggtgtccccagagaacctggtggacaagagccggggcagcaggcctgggaagagccctgagaggagccacgtgagcagcgagccctatgagcccatcagccccccccaggtgcctgtggtgcatgagaagcaggacagcctgctgctgctgagccagagaggagctgagcctgctgagcagagaaatgatgcccggagccctggcagcatctcctacctgcccagcttcttcaccaagctggagaacaccagccccatggtgaagagcaagaagcaggagatcttcaggaagctgaacagcagcggcggcggggacagcgacatggccgccgcccagcctggaacagagatcttcaacctgcctgctgtgaccaccagcggctctgtgagcagccggggccacagctttgctgaccctgccagcaacctgggcctggaggacatcatcaggaaggccctgatgggcagctttgatgacaaggtggaggaccacggcgtggtgatgagccagcccatgggcgtggtgcccggcacagccaacacctctgtggtgaccagcggggagacccggcgggaggagggggaccccagcccccacagcggcggcgtgtgcaagcccaagctgatcagcaagagcaacagcaggaagagcaagagccccatccctggccagggctacctgggcacagagcggcccagctctgtgtcctctgtgcacagcgagggggactaccaccggcagaccccaggctgggcctgggaggaccggcccagcagcacaggcagcacccagttcccctacaaccccctgaccatgaggatgctgagcagcaccccacccacccccatcgcctgtgcccccagcgctgtgaaccaggccgccccccaccagcagaaccgcatctgggagcgggagcccgcccccctgctgagcgcccagtatgagaccctgagtgacagtgatgactag

SEQ ID NO: 18545 - DNA, 2313 bp, synthetic construct
  source 1..2313: mol_type = other DNA; note = Synthetic coding sequence
atgctgcagcaggtgaatggccacaaccctggcagtgatggccaggcccgggagtacctgcgggaggacctgcaggagttcctgggcggggaggtgctgctgtacaagctggatgacctgaccagggtgaaccctgtgaccctggagaccgtgctgcgctgcctgcaggcccgctacatggctgacaccttctacaccaatgccggctgcaccctggtggccctgaaccccttcaagcctgtgccccagctgtacagccctgagctgatgagggagtaccacgccgccccccagccccagaagctgaagccccacgtgttcaccgtgggggagcagacctacagaaatgtgaagagcctgattgagcctgtgaaccagagcatcgtggtgtctggagagagcggggccggcaagacctggaccagccgctgcctgatgaagttctatgctgtggtggccaccagccctgcctcctgggagagccacaagattgctgagcgcatcgagcagaggatcctgaacagcaaccctgtgatggaggcctttggaaatgcctgcaccctgaggaacaacaacagcagcagatttgggaagttcatccagctgcagctgaacagagcccagcagatgactggagctgctgtgcagacctacctgctggagaagaccagggtggcctgccaggccagcagcgagaggaacttccacatcttctaccagatctgcaagggggcctctgaagatgagcggctgcagtggcacctgcctgagggcgccgccttctcctggctgcccaaccctgagaggagcctggaggaggactgctttgaggtgacccgggaggccatgctgcacctgggcatcgacacccccacccagaacaacatcttcaaggtgctggccggcctgctgcacctgggcaacatccagtttgctgcctctgaagatgaggcccagccctgccagcccatggatgatgccaagtacagcgtgaggacagctgccagcctgctgggcctgcctgaagatgtgctgctggagatggtgcagatccgcaccatccgggccggccggcagcagcaggtgttcaggaagccctgtgcccgggcagaatgtgacacccggcgggactgcctggccaagctgatctatgcccggctgtttgactggctggtgtctgtcatcaacagcagcatctgtgccgacacagacagctggaccaccttcatcggcctgctggatgtgtatggctttgagagcttcccagacaacagcctggagcagctgtgcatcaactatgccaatgagaagctgcagctggaggcctgtggcctggtggagaccatccacatctctgctgctggcttccccatccgggtgagccacaggaactttgtggagcgctacaagctgctgcggcggctgcacccctgcaccagcagcggccctgacagcccctacccagccaagggcctgcctgagtggtgcccccacagcgaggaggccaccctggagcccctcatccaggacatcctgcacaccctgcctgtgctgacccaggccgccgccatcactggagacagcgctgaggccatgcctgcccccatgcactgcggccgcaccaaggtgttcatgacagacagcatgctggagctgctggagtgtggccgggcccgggtgctggagcagtgtgcccgctgcatccagggcggctggaggaggcaccgccaccgggagcaggagcggcagtggagggctgtgatgctgatccaggccgccatccgctcctggctgaccaggaagcacatccagaggctgcacgccgccgccaccgtcatcaagagggcctggcagaagtggaggatccgcatggcctgcctggccgccaaggagctggatggagtggaggagaagcacttcagccaggccccctgcagcctgagcaccagccccctgcagacccggctgctggaggccatcatccggctgtggcccctgggcctggtgctggccaacacagccatgggcgtgggcagcttccagaggaagctggtggtgtgggcctgcctgcagctgccccggggcagccccagcagctacacagtgcagacagcccaggaccaggccggcgtgaccagcatccgggccctgccccagggcagcatcaagttccactgcaggaagagccccctgcgctatgctgacatctgcccagagcccagcccctacagcatcaccggcttcaaccagatcctgctggagcggcacaggctcatccacgtgaccagcagcgccttcaccggcctgggctag

SEQ ID NO: 18546 - DNA, 2796 bp, synthetic construct
  source 1..2796: mol_type = other DNA; note = Synthetic coding sequence
atggccgaggtggaggccgtgcagctgaaggaggagggcaacagacacttccagctgcaggactacaaggccgccaccaacagctacagccaggccctgaagctgaccaaggacaaggccctgctggccaccctgtacagaaacagagctgcctgtggcctgaagacagagagctatgtgcaggccgccagtgatgccagccgggccatcgacatcaacagcagtgacatcaaggccctgtaccgccgctgccaggccctggagcacctgggcaagctggaccaggccttcaaggatgtgcagagatgtgccaccctggagcccaggaaccagaacttccaggagatgctgcggcggctgaacaccagcatccaggagaagctgcgggtgcagttcagcacagacagccgggtgcagaagatgtttgagatcctgctggatgagaacagcgaggccgacaagcgggagaaggccgccaacaacctgattgtgctgggccgggaggaggccggggctgagaagatcttccagaacaatggagtggccctgctgctgcagctgctggacaccaagaagccagagctggtgctggccgctgtgaggaccctgagcggcatgtgcagcggccaccaggcccgggccaccgtcatcctgcatgctgtgagaattgaccgcatctgcagcctgatggctgtggagaatgaggagatgagcctggccgtgtgcaacctgctgcaggccatcatcgacagcctgtctggagaggacaagcgggagcaccggggcaaggaggaggccctggtgctggacaccaagaaggacctgaagcagatcaccagccacctgctggacatgctggtgtccaagaaggtgtctggccagggccgggaccaggccctgaacctgctgaacaagaatgtgcccaggaaggacctggccatccatgacaacagcaggaccatctacgtggtggacaatggcctgaggaagatcctgaaggtggtgggccaggtgcctgacctgcccagctgcctgcccctgacagacaacaccaggatgctggccagcatcctgatcaacaagctgtatgatgacctgcgctgtgaccctgagcgggaccacttcaggaagatctgtgaggagtacatcaccgggaagtttgacccccaggacatggacaagaacctgaatgccatccagacagtgtctggcatcctgcagggcccctttgacctgggcaaccagctgctgggcctgaagggcgtgatggagatgatggtggccctgtgtggcagcgagcgggagacagaccagctggtggccgtggaggccctgattcatgccagcaccaagctgagccgggccaccttcatcatcaccaatggagtgtccctgctgaagcagatctacaagaccaccaagaatgagaagatcaagatccgcaccctggtgggcctgtgcaagctgggcagcgctgggggcacagattatggcctgcggcagtttgctgagggcagcacagagaagctggccaagcagtgcaggaagtggctgtgcaacatgagcattgacaccaggacccggcgctgggccgtggagggcctggcctacctgaccctggatgctgatgtgaaggatgactttgtgcaggatgtgcctgccctgcaggccatgtttgagctggccaaggccggcaccagtgacaagaccatcctgtacagcgtggccaccaccctggtgaactgcaccaacagctatgatgtgaaggaggtgattcctgagctggtgcagctggccaagttcagcaagcagcacgtgcctgaggagcaccccaaggacaagaaggacttcatcgacatgagggtgaagaggctgctgaaggccggggtcatcagcgccctggcctgcatggtgaaggctgacagcgccatcctgacagaccagaccaaggagctgctggcccgggtcttcctggccctgtgtgacaaccccaaggaccggggcaccatcgtggcccagggcggcggcaaggccctgatccccctggccctggagggcacagatgtgggcaaggtgaaggccgcccacgccctggccaagattgctgctgtgagcaacccagacatcgccttccctggagagcgggtgtatgaggtggtgcggcccctggtgcggctgctggacacccagagagatggcctgcagaactatgaggccctgctgggcctgaccaacctgagcggccgcagtgacaagctgcggcagaagatcttcaaggagcgggccctgcctgacatcgagaactacatgtttgagaaccacgaccagctgcggcaggccgccacagagtgcatgtgcaacatggtgctgcacaaggaggtgcaggagcgcttcctggctgatggaaatgaccggctgaagctggtggtgctgctgtgtggagaagatgatgacaaggtgcagaatgctgctgctggggccctggccatgctgacagctgcccacaagaagctgtgcctgaagatgacccaggtgaccacccagtggctggagatcctgcagaggctgtgcctgcatgaccagctgtctgtgcagcaccggggcctggtgattgcctacaacctgctggccgcagatgctgagctggccaagaagctggtggagagcgagctgctggagatcctgactgtggtgggcaagcaggagccagatgagaagaaggccgaggtggtgcagacagcccgggagtgcctgatcaagtgcatggactatggcttcatcaagcctgtgtcctag

SEQ ID NO: 18547 - DNA, 2022 bp, synthetic construct
  source 1..2022: mol_type = other DNA; note = Synthetic coding sequence
atggccagccagttctgcctgcctgagagcccctgcctgagccccctgaagcccctgaagccccactttggagacatccaggagggcatctacgtggccatccagaggagtgacaagaggatccacctggccgtggtgacagagatcaaccgggagaactactgggtgacagtggagtgggtggagaaggctgtgaagaagggcaagaagattgacctggagaccatcctgctgctgaacccagccctggacagcgctgagcaccccatgcctcctccacccctgagccccctggccctggcccccagcagcgccatccgggaccagaggacagccaccaagtgggtggccatgatcccccagaagaaccagacagccagcggggacagcctggatgtgcgggtgcccagcaagccctgcctgatgaagcagaagaagagcccctgcctgtgggagatccagaagctgcaggagcagcgggagaagagaagaaggctgcagcaggagatccgggcccggcgggccctggatgtgaacaccaggaaccccaactatgagatcatgcacatgattgaggagtacagaagacacctggacagcagcaagatctctgtgctggagcccccccaggagcaccgcatctgtgtgtgtgtgaggaagaggcccctgaaccagcgggagaccaccctgaaggacctggacatcatcaccgtgcccagcgacaacgtggtgatggtgcatgagagcaagcagaaggtggacctgacccgctacctgcagaaccagaccttctgctttgaccacgcctttgatgacaaggccagcaatgagctggtgtaccagttcaccgcccagcccctggtggagagcatcttcaggaagggcatggccacctgctttgcctacggccagacaggcagcggcaagacctacaccatgggcggggacttcagcggcacagcccaggactgcagcaagggcatctatgccctggtggcccaggatgtgttcctgctgctgaggaacagcacctatgagaagctggacctgaaggtgtatggcaccttctttgagatctacggcggcaaggtgtatgacctgctgaactggaagaagaagctgcaggtgctggaggatggcaaccagcagatccaggtggtgggcctgcaggagaaggaggtgtgctgcgtggaggaggtgctgaacctggtggagatcggcaacagctgcaggaccagccggcagacccctgtgaatgcccacagcagccgcagccatgctgtgttccagatcatcctgaagagcggccgcatcatgcacggcaagttcagcctggtggacctggccggaaatgaaagaggagctgacaccaccaaggccagcaggaagaggcagctggagggcgctgagatcaacaagagcctgctggccctgaaggagtgcatcctggccctgggccagaacaagccccacacccccttccgggccagcaagctgaccctggtgctgcgggacagcttcatcggccagaacagcagcacctgcatgattgccaccatcagccctggcatgaccagctgtgagaacaccctgaacaccctgcgctatgccaacagagtgaagaagctgaatgtggatgtgcggccctaccaccggggccactaccccatcggccacgaggcccccaggatgctgaagagccacatcggcaacagcgagatgagcctgcagagagatgagttcatcaagatcccctacgtgcagagcgaggagcagaaggagattgaggaggtggagaccctgcccaccctgctgggcaaggacaccaccatcagcggcaagggcagcagccagtggctggagaacatccaggagagagctggaggagtgcaccacgacatcgacttctgcatcgcccggagcctgagcatcctggagcagaagattgatgccctgacagagatccagaagaagctgaagctgctgctggccgacctgcacgtgaagagcaaggtggagtag

SEQ ID NO: 18548 - DNA, 1236 bp, synthetic construct
  source 1..1236: mol_type = other DNA; note = Synthetic coding sequence
atggccaccacagccaccatggccaccagcggcagcgccaggaagaggctgctgaaggaggaggacatgaccaaggtggagtttgagaccagcgaggaggtggatgtgacccccacctttgacaccatgggcctgcgggaggacctgctgcggggcatctatgcctacggctttgagaagcccagcgccatccagcagagggccatcaagcagatcatcaagggcagagatgtgattgcccagagccagagcggcaccgggaagacagccaccttcagcatctctgtgctgcagtgcctggacatccaggtgcgggagacccaggccctgatcctggcccccacccgggagctggccgtgcagatccagaagggcctgctggccctgggggactacatgaatgtgcagtgccacgcctgcattggaggcaccaacgtgggggaggacatcaggaagctggactatggccagcacgtggtggccggcaccccaggccgggtgtttgacatgatcagaagaagaagcctgcggacccgggccatcaagatgctggtgctggatgaagcagatgagatgctgaacaagggcttcaaggagcagatctatgatgtgtaccgctacctgcccccagccacccaggtggtgctgatcagcgccaccctgccccatgagatcctggagatgaccaacaagttcatgacagaccccatccgcatcctggtgaagagagatgagctgaccctggagggcatcaagcagttctttgtggccgtggagcgggaggagtggaagtttgacaccctgtgtgacctgtatgacaccctgaccatcacccaggccgtcatcttctgcaacaccaagaggaaggtggactggctgacagagaagatgagggaggccaacttcaccgtgtcctccatgcacggggacatgccccagaaggagcgggagagcatcatgaaggagttccgcagcggggccagccgggtgctgatcagcacagatgtgtgggcccggggcctggatgtgccccaggtgtccctcatcatcaactatgacctgcccaacaaccgggagctgtacatccacagaattggccgcagcggccgctatggcaggaagggcgtggccatcaactttgtgaagaatgatgacatccgcatcctgcgggacatcgagcagtactacagcacccagattgatgagatgcccatgaatgtggccgacctgatctag

SEQ ID NO: 18549 - DNA, 1683 bp, synthetic construct
  source 1..1683: mol_type = other DNA; note = Synthetic coding sequence
atggagctgcctgctgtgggggagcacgtgtttgctgtggagagcattgagaagaagaggatcaggaagggccgggtggagtacctggtgaagtggaggggctggagccccaagtacaacacctgggagcctgaggagaacatcctggacccccggctgctgattgccttccagaaccgggagcggcaggagcagctgatgggctacaggaagaggggccccaagcccaagcccctggtggtgcaggtgcccacctttgcccggcgcagcaatgtgctgaccggcctgcaggacagcagcacagacaacagagccaagctggacctgggcgcccagggcaagggccagggccaccagtatgagctgaacagcaagaagcaccaccagtaccagccccacagcaaggagcgggccggcaagcccccacctcctgggaagagcggcaagtactactaccagctgaacagcaagaagcaccacccctaccagcctgaccccaagatgtatgacctgcagtaccagggcggccacaaggaggcccccagccccacctgcccagacctgggcgccaagagccaccccccagacaagtgggcccagggcgctggggccaagggctacctgggcgctgtgaagcccctggccggggccgccggggcccctggaaaaggaagtgagaagggccccccaaatggcatgatgcctgcccccaaggaggccgtgactggaaatggcatcggcggcaagatgaagatcgtgaagaacaagaacaagaatggccgcatcgtcatcgtgatgagcaagtacatggagaatggcatgcaggccgtgaagatcaagtctggagaggtggccgagggggaggcccggagccccagccacaagaagagagctgctgatgagcggcaccccccagctgacaggaccttcaagaaggccgccggggctgaggagaagaaggtggaggccccacccaagagaagagaggaggaggtgtctggagtgtctgacccccagccccaggatgctggcagcaggaagctgagccccaccaaggaggcctttggagagcagcccctgcagctgaccaccaagccagacctgctggcctgggaccctgccaggaacacccacccccccagccaccacccccacccccacccccaccaccaccaccaccaccaccaccaccaccaccacgctgtgggcctgaacctgagccacgtgaggaagcgctgcctgtctgagacccacggggagcgggagccctgcaagaagaggctgacagcccggagcatcagcacccccacctgcctgggcggcagccctgctgctgagaggcctgctgacctgcccccagctgctgccctgccccagcctgaggtgatcctgctggacagcgacctggatgagcccatcgacctgcgctgtgtgaagaccaggtctgaggccggggagccccccagcagcctgcaggtgaagccagagaccccagccagcgctgctgtggccgtggccgctgctgctgcccccaccaccacagctgagaagcccccagctgaggcccaggatgagcctgctgagagcctgtctgagttcaagcccttctttggaaacatcatcatcacagatgtgacagccaactgcctgactgtgaccttcaaggagtatgtgacagtgtag

SEQ ID NO: 18550 - DNA, 1218 bp, synthetic construct
  source 1..1218: mol_type = other DNA; note = Synthetic coding sequence
atggacagcctggtgacagccaacaccaagttctgctttgacctcttccaggagatcggcaaggatgacagacacaagaacatcttcttcagccccctgagcctgtctgctgccctgggcatggtgcggctgggcgcccggagtgacagcgcccaccagattgatgaggtgctgcacttcaatgagttcagccagaatgaaagcaaggagccagacccctgcctgaagagcaacaagcagaaggccggcagcctgaacaatgaaagtggcctggtgtcctgctacttcggccagctgctgagcaagctggaccgcatcaagacagactacaccctgagcatcgccaaccggctgtatggagagcaggagttccccatctgccaggagtacctggatggagtcatccagttctaccacaccaccatcgagagcgtggacttccagaagaaccctgagaagagccggcaggagatcaacttctgggtggagtgccagagccagggcaagatcaaggagctgttcagcaaggatgccatcaatgctgagaccgtgctggtgctggtgaatgctgtgtacttcaaggccaagtgggagacctactttgaccacgagaacacagtggatgcccccttctgcctgaatgccaatgaaaacaagtctgtgaagatgatgacccagaagggcctgtaccgcatcggcttcatcgaggaggtgaaggcccagatcctggagatgagatacaccaagggcaagctgtccatgtttgtgctgctgcccagccacagcaaggacaacctgaagggcctggaggagctggagaggaagatcacctatgagaagatggtggcctggagcagcagcgagaacatgtctgaggagagcgtggtgctgtccttcccccgcttcaccctggaggacagctatgacctgaacagcatcctgcaggacatgggcatcacagacatctttgatgagaccagggctgacctgaccggcatcagccccagccccaacctgtacctgagcaagatcatccacaagacctttgtggaggtggatgaaaatggcacccaggccgctgctgccactggagctgtggtgtctgagaggagcctgcgctcctgggtggagttcaatgccaaccaccccttcctgttcttcatccgccacaacaagacccagaccatcctcttctacggccgggtgtgcagcccctag

SEQ ID NO: 18551 - DNA, 3537 bp, synthetic construct
  source 1..3537: mol_type = other DNA; note = Synthetic coding sequence
atgctgaggatgaagctgcccctgaagcccacccaccctgctgagcccccacctgaggccgaggagcctgaggctgatgcccggcctggggccaaggcccccagcagaagaagaagagactgcaggcctcctcctcctcctcctcctcctgctggccccagccggggccccctgcccccacctcctccaccccggggcctgggcccccctgtggccggcggcgctgctgctggagctggcatgcctgggggcggcggcggccccagcgctgccctgcgggagcaggagcgggtgtatgagtggtttggcctggtgctgggcagcgcccagaggctggagttcatgtgtggcctgctggacctgtgcaaccccctggagctgcgcttcctgggcagctgcctggaggacctggccaggaaggactaccactacctgcgggacagcgaggccaaggccaacggcctgagtgaccccggccccctggccgacttccgggagcctgctgtgcgcagccgcctcatcgtgtacctggccctgctgggctctgaaaatcgggaggccgccggccgcctgcaccggctgctgccccaggtggacagcgtgctgaagagcctgcgggccgcccggggggagggcagcagaggaggagcagaagatgaaagaggagaagatggagatggagagcaggatgctgagaaggatggcagcggccctgagggcggcatcgtggagccccgggtgggcggcggcctgggcagccgggcccaggaggagctgctgctgctcttcaccatggccagcctgcacccagccttctccttccaccagagggtgaccctgcgggagcacctggagcggctgcgggccgccctgcggggcggcccagaagatgctgaggtggaggtggagccctgcaagtttgctggcccccgggcccagaacaacagcgcccacggggactacatgcagaacaatgaaagcagcctcatcgagcaggcccccatcccccaggacggcctgactgtggccccccaccgggcccagcgggaggccgtgcacatcgagaagatcatgctgaagggcgtgcagaggaagagagctgacaagtactgggagtacaccttcaaggtgaactggagcgacctgtctgtgaccaccgtgaccaagacccaccaggagctgcaggagttcctgctgaagctgcccaaggagctgagcagcgagacctttgacaagaccatcctgcgggccctgaaccagggcagcctgaagcgggaggagcggcggcacccagacctggagcccatcctgcggcagctgttcagcagcagcagccaggccttcctgcagagccagaaggtgcacagcttcttccagagcatcagcagtgacagcctgcacagcatcaacaacctgcagagcagcctgaagaccagcaagatcctggagcacctgaaggaggacagcagcgaggccagcagccaggaggaggatgtgctgcagcacgccatcatccacaagaagcacacaggcaagagccccatcgtgaacaacatcggcaccagctgcagccccctggatggcctgaccatgcagtacagcgagcagaatggaattgtggactggaggaagcagagctgcaccaccatccagcaccctgagcactgtgtgaccagcgctgaccagcacagcgctgagaagaggagcctgagcagcatcaacaagaagaagggcaagccccagacagagaaggagaagatcaagaagacagacaaccggctgaacagccgcatcaatggcatccggctgagcaccccccagcacgcccacggcggcaccgtgaaggatgtgaacctggacatcggcagcggccatgacacctgtggggagaccagcagcgagagctacagcagccccagcagccccaggcatgatggccgggagagctttgagagcgaggaggagaaggaccgggacacagacagcaacagtgaagattctggcaaccccagcaccacccgcttcaccggctacggctctgtgaaccagacagtgacagtgaagccccctgtgcagatcgccagcctgggcaatgaaaatggaaacctgctggaggaccccctgaacagccccaagtaccagcacatctccttcatgcccaccctgcactgtgtgatgcacaacggggcccagaagtctgaggtggtggtgcctgcccccaagccagcagatggcaagaccatcggcatgctggtgcccagccctgtggccatcagcgccatccgggagagcgccaacagcacccctgtgggcatcctgggccccacagcctgcacaggagagagcgagaagcacctggagctgctggccagccccctgcccatccccagcaccttcctgccccacagcagcaccccagccctgcacctgactgtgcagaggctgaagctgcccccaccccagggcagcagcgagagctgcaccgtgaacatcccccagcagcccccaggcagcctgagcatcgccagccccaacacagccttcatccccatccacaaccctggcagcttccctggcagccctgtggccaccacagaccccatcaccaagagcgccagccaggtggtgggcctgaaccagatggtgccccagatcgagggcaacacaggaacagtgccccagcccaccaacgtgaaggtggtgctgcctgctgctggcctgtctgctgcccagcccccagccagctaccccctgcccggcagccccctggccgccggcgtgctgcccagccagaacagctctgtgctgagcacagctgccaccagcccccagcctgccagcgctggcatcagccaggcccaggccaccgtgcccccagctgtgcccacccacaccccaggccctgcccccagccccagccctgccctgacccacagcacagcccagagcgacagcaccagctacatctctgctgtgggcaacaccaatgccaacggcaccgtggtgcccccccagcagatgggcagcggcccctgtggcagctgtggccgccgctgcagctgtggcaccaacggcaacctgcagctgaacagctactactaccccaaccccatgcctggccccatgtacagagtgcccagcttcttcaccctgcccagcatctgcaatggcagctacctgaaccaggcccaccagagcaatggaaaccagctgcccttcttcctgccccagaccccctatgccaacggcctggtgcatgaccctgtgatgggcagccaggccaactacggcatgcagcagatggccggcttcggccgcttctaccctgtgtacccagccccaaatgtggtggccaacaccagcggcagcggccccaagaagaatggaaatgtgtcctgctacaactgtggggtgtctggccactacgcccaggactgcaagcagagctccatggaggccaaccagcagggcacctaccgcctgcgctatgccccacccctgccccccagcaatgacaccctggacagcgctgactag

SEQ ID NO: 18552 - DNA, 411 bp, synthetic construct
  source 1..411: mol_type = other DNA; note = Synthetic coding sequence
atgcctgggaagaaggccaggaagaatgcccagcccagccctgcccgggccccagctggccctgctggaacagctggaacagcccgggaccaggccggctttgccatcggcatgcagctgcgcttcacccggggcaagaagctgctgagcagcagcctgagcagcagccccctggccctgccccggggccacgaggagcaggtgcaggtggccggcagccgggtgtgctacagcacccaggagatctggaggcagacagagctgcctgctgagaccagcgagagtgacatccagaccctgctgctgaggaacctgacagccagcaagacctgcatgaggggcctgctgcagaagagcttcctgcggcgctgcaccttccaccagtttgaggagcggctgcactgcaactag

SEQ ID NO: 18553 - DNA, 879 bp, synthetic construct
  source 1..879: mol_type = other DNA; note = Synthetic coding sequence
atgaaggccaccgtgctgatgaggcagcccggccgggtgcaggagatcgtgggcgccctgaggaagggcggcggggaccggctgcaggtgatcagtgactttgacatgaccctgagcagatttgcctacaacgggaagcgctgccccagcagctacaacatcctggacaacagcaagatcatcagcgaggagtgcaggaaggagctgacagccctgctgcaccactactaccccattgaaattgacccccacaggacagtgaaggagaagctgccccacatggtggagtggtggaccaaggcccacaacctgctgtgccagcagaagatccagaagttccagatcgcccaggtggtgcgggagagcaatgccatgctgcgggagggctacaagaccttcttcaacaccctgtaccacaacaacatccccctcttcatcttctctgctggcattggagacatcctggaggagatcatccggcagatgaaggtgttccaccccaacatccacatcgtgagcaactacatggacttcaatgaagatggcttcctgcagggcttcaagggccagctgatccacacctacaacaagaacagcagcgcctgtgaaaattctggctacttccagcagctggagggcaagaccaacgtcatcctgctgggggacagcatcggggacctgaccatggctgatggagtgcctggggtgcagaacatcctgaagattggcttcctgaatgacaaggtggaggagcggcgggagcgctacatggacagctatgacatcgtgctggagaaggatgagaccctggatgtggtgaatggcctgctgcagcacatcctgtgccagggcgtgcagctggagatgcagggcccctag

SEQ ID NO: 18554 - DNA, 2010 bp, synthetic construct
  source 1..2010: mol_type = other DNA; note = Synthetic coding sequence
atggacctgaggacagctgtgtacaatgctgccagagatggcaagctgcagctgctgcagaagctgctgagcggccgcagccgggaggagctggatgagctgactggagaggtggccggcggcggcacccccctgctgattgctgcccgctatggccacctggatgtggtggagtacctggtggacagatgtggggcctctgtggaggccggcggctctgtgcactttgatggagagaccattgaaggagccccacccctgtgggccgccagcgctgctggccacctggatgtggtgcgcagcctgctgcggcggggggcctctgtgaacagaaccaccaggaccaacagcacccccctgcgggccgcctgctttgatggccacctggaggtggtgcgctacctggtgggggagcaccaggccgacctggaggtggccaacagacatggccacacctgcctgatgatcagctgctacaagggccaccgggagatcgcccgctacctgctggagcagggcgcccaggtgaacagaagaagtgccaagggcaacacagccctgcatgactgtgccgagagcggcagcctggagatcctgcagctgctgctgggctgcaaggccaggatggagagagatggctacggcatgacccccctgctggccgcctctgtgacaggccacaccaacatcgtggagtacctgatccaggagcagcccggccaggagcaggtggccggcggggaggcccagcccggcctgccccaggaggaccccagcaccagccagggctgtgcccagccccagggcgccccctgctgcagcagcagccctgaggagcccctgaatggagagagctatgagagctgctgccccaccagccgggaggccgctgtggaggccctggagctgctgggcgccacctacgtggacaagaagagggacctgctgggcgccctgaagcactggaggcgggccatggagctgcggcaccagggcggggagtacctgcccaagccagagcccccccagctggtgctggcctatgactacagccgggaggtgaacaccacagaggagctggaggccctgatcacagatcctgatgagatgaggatgcaggccctgctgatccgggagcgcatcctgggccccagccacccagacaccagctactacatccgctacagaggagctgtgtatgctgacagcggcaactttgagcgctgcatccggctgtggaagtatgccctggacatgcagcagagcaacctggagcccctgagccccatgacagccagcagcttcctgagctttgctgagctgttctcctatgtgctgcaggaccgggccgccaagggcagcctgggcacccagattggatttgctgacctgatgggcgtgctgaccaagggcgtgcgggaggtggagcgggccctgcagctgccccgggagcccggggacagcgcccagttcaccaaggccctggccatcatcctgcacctgctgtacctgctggagaaggtggagtgcacccccagccaggagcacctgaagcaccagacagtgtaccgcctgctgaagtgtgccccccggggcaagaatggcttcacccccctgcacatggctgtggacaaggacaccaccaacgtgggccgctaccctgtgggccgcttccccagcctgcacgtggtgaaggtgctgctggactgtggggctgaccctgacagccgggactttgacaacaacacccccctgcacatcgccgcccagaacaactgcccagccatcatgaatgccctgattgaagctggggcccacatggatgccaccaatgccttcaagaagacagcctatgagctgctggatgagaagctgctggcccggggcaccatgcagcccttcaactacgtgaccctgcagtgcctggccgcccgggccctggacaagaacaagatcccctacaagggcttcatccctgaggacctggaggccttcatcgagctgcactag

SEQ ID NO: 18555 - DNA, 720 bp, synthetic construct
  source 1..720: mol_type = other DNA; note = Synthetic coding sequence
atggccgccaccctgctggccgcccggggagctggccctgccccagcctggggccctgaggccttcaccccagactgggagagccgggaggtgtccacaggcaccaccatcatggctgtgcagtttgatggaggagtggtgctgggcgctgacagcaggaccaccaccggcagctacatcgccaacagagtgacagacaagctgacccccatccatgaccgcatcttctgctgccgcagcggcagcgctgctgacacccaggccgtggctgatgctgtgacctaccagctgggcttccacagcattgagctgaatgaaccacccctggtgcacacagctgccagcctcttcaaggagatgtgctaccgctaccgggaggacctgatggccggcatcatcatcgccggctgggacccccaggagggcggccaggtgtacagcgtgcccatgggcggcatgatggtgcggcagagctttgccatcggcggcagcggcagcagctacatctacggctacgtggatgccacctaccgggagggcatgaccaaggaggagtgcctgcagttcaccgccaatgccctggccctggccatggagagagatggcagcagcggcggcgtcatccggctggccgccatcgccgagagcggcgtggagcggcaggtgctgctgggggaccagatccccaagtttgctgtggccaccctgcccccagcctag

SEQ ID NO: 18556 - DNA, 1383 bp, synthetic construct
  source 1..1383: mol_type = other DNA; note = Synthetic coding sequence
atgaacttcagcgaggtgttcaagctgagcagcctgctgtgcaagttctccccagatggcaagtacctggccagctgtgtgcagtaccgcctggtggtgagagatgtgaacaccctgcagatcctgcagctgtacacctgcctggaccagatccagcacatcgagtggagcgctgacagcctcttcatcctgtgtgccatgtacaagaggggcctggtgcaggtgtggagcctggagcagcctgagtggcactgcaagattgatgagggcagcgctggcctggtggccagctgctggagcccagatggccgccacatcctgaacaccacagagttccacctgcgcatcaccgtgtggagcctgtgcaccaagtctgtgtcctacatcaagtaccccaaggcctgcctgcagggcatcaccttcaccagagatggccgctacatggccctggccgagcggcgggactgcaaggactatgtgtccatctttgtgtgcagcgactggcagctgctgcggcactttgacacagacacccaggacctgaccggcatcgagtgggccccaaatggctgtgtgctggccgtgtgggacacctgcctggagtacaagatcctgctgtacagcctggatggccgcctgctgagcacctacagcgcctatgagtggagcctgggcatcaagtctgtggcctggagccccagcagccagttcctggccgtgggcagctatgatggcaaggtgcgcatcctgaaccacgtgacctggaagatgatcacagaatttggccaccctgctgccatcaatgaccccaagatcgtggtgtacaaggaggccgagaagagcccccagctgggcctgggctgcctgtccttccccccaccccgggccggggccggccccctgcccagcagcgagagcaaatatgagatcgcctctgtgcctgtgtccctgcagaccctgaagcctgtgacagaccgggccaaccccaagattggaattggcatgctggccttctccccagacagctacttcctggccaccagaaatgacaacatccccaatgctgtgtgggtgtgggacatccagaagctgcggctgtttgctgtgctggagcagctgagccctgtgcgggccttccagtgggacccccagcagccccggctggccatctgcaccggcggcagccggctgtacctgtggagccctgctggctgcatgtctgtgcaggtgcctggagagggggactttgctgtgctgagcctgtgctggcacctgagcggggacagcatggccctgctgagcaaggaccacttctgcctgtgcttcctggagacagaagctgtggtgggcacagcctgccggcagctgggcggccacacctag

SEQ ID NO: 18557 - DNA, 282 bp, synthetic construct
  source 1..282: mol_type = other DNA; note = Synthetic coding sequence
atgagcggcctgcgggtgtacagcacctctgtgacaggcagccgggagatcaagagccagcagagcgaggtgacccgcatcctggatggcaagaggatccagtaccagctggtggacatcagccaggacaatgccctgagagatgagatgagggccctggccggcaaccccaaggccaccccaccccagatcgtgaatggagaccagtactgtggggactatgagctgtttgtggaggccgtggagcagaacaccctgcaggagttcctgaagctggcctag

SEQ ID NO: 18558 - DNA, 1920 bp, synthetic construct
  source 1..1920: mol_type = other DNA; note = Synthetic coding sequence
atgaacctggagaagctgagcaagccagagctgctgaccctcttcagcatcctggagggggagctggaggcccgggacctggtgattgaggccctgaaggcccagcaccgggacaccttcatcgaggagagatatggcaagtacaacatcagtgaccccctgatggccctgcagagggactttgagaccctgaaggagaagaatgatggagagaagcagcctgtgtgcaccaaccccctgagcatcctgaaggtggtgatgaagcagtgcaagaacatgcaggagaggatgctgagccagctggccgctgctgagagccgccacaggaaggtgatcctggacctggaggaggagcggcagagacatgcccaggacacagcagaaggagatgatgtgacctacatgctggagaaggagcgggagcggctgacccagcagctggagtttgagaagagccaggtgaagaagtttgagaaggagcagaagaagctgagcagccagctggaggaggagaggagccgccacaagcagctgagctccatgctggtgctggagtgcaagaaggccaccaacaaggctgctgaggagggccagaaggccggggagctgagcctgaagctggagaaggagaagagccgggtgtccaagctggaggaggagctggccgctgagaggaagaggggcctgcagacagaggcccaggtggagaagcagctgtctgaatttgacatcgagcgggagcagctgcgggccaagctgaaccgggaggagaacagaaccaagaccctgaaggaggagatggagagcctgaagaagatcgtgaaggacctggaggccagccaccagcacagcagccccaatgagcagctgaagaagcctgtgacagtgtccaagggcacagccacagagcccctgatgctgatgtctgtgttctgccagacagagagcttccctgctgagaggacccacggcagcaacatcgccaagatgaccaacacaggcctgcccggccctgccaccccagcctacagctatgccaagaccaacggccactgtgaccctgagatccagaccacccgggagctgacagctggcaacaacgtggagaaccaggtgcccccccgggagaagtctgtggccctggcccaggagaagcctgtggagaatggaggctgccctgtgggcatcgagacccctgtgcccatgcccagccccctgagcagcagcggcagcagcctgagccccagcagcacagccagcagcagcctgaccagcagcccctgcagcagccctgtgctgaccaagaggctgctgggcagcagcgccagcagccctggctaccagagcagctaccaggtgggcatcaaccagcgcttccacgccgcccggcacaagttccagagccaggccgaccaggaccagcaggccagcggcctgcagagcccccccagccgggacctgagccccaccctgattgacaacagcgctgccaagcagctggccaggaacacagtgacccaggtgctgagccgcttcaccagccagcagggccccatcaagcctgtgagccccaacagcagcccctttggaacagactacagaaacctggccaacacagccaaccccaggggggacaccagccacagccccacccctgggaaggtgagcagccccctgagccccctgagccctggcatcaagagccccaccatccccagggctgagcggggcaaccccccacccatcccccccaagaagccaggcctgacccccagccccagcgccaccacccccctgaccaagacccacagccaggccgccagcctgaccacagctgaggacctggccagcagctgcagcagcaacacagtggtggccaacgggaaggatgtggagctgctgctgcccaccagcagctag

SEQ ID NO: 18559 - DNA, 2487 bp, synthetic construct
  source 1..2487: mol_type = other DNA; note = Synthetic coding sequence
atgaggttcctggaggcccggagcctggccgtggccatgggagacacagtggtggagcccgcccccctgaagcccaccagcgagcccaccagcggccccccaggcaacaatggaggcagcctgctgagcgtcatcacagagggcgtgggggagctgtctgtgattgatcctgaggtggcccagaaggcctgccaggaggtgctggagaaggtgaagctgctgcatggaggagtggccgtgagcagccggggcacccccctggagctggtgaatggagatggagtggacagcgagatccgctgcctggatgatcctccagcccagatccgggaggaggaggatgagatgggcgctgctgtggccagcggcacagccaagggggccaggagaagacggcagaacaacagcgccaagcagagctggctgctgcggctgtttgagagcaagctgtttgacatctccatggccatctcctacctgtacaacagcaaggagcccggggtgcaggcctacatcggcaacagactcttctgcttcagaaatgaagatgtggacttctacctgccccagctgctgaacatgtacatccacatggatgaagatgtgggagatgccatcaagccctacatcgtgcaccgctgccggcagagcatcaacttcagcctgcagtgtgccctgctgctgggcgcctacagcagtgacatgcacatcagcacccagaggcacagccggggcaccaagctgaggaagctgatcctgagtgatgagctgaagccagcccacaggaagcgggagctgcccagcctgagccctgccccagacaccggcctgagccccagcaagaggacccaccagaggagcaagagtgatgccacagccagcatcagcctgagcagcaacctgaagaggacagccagcaaccccaaggtggagaatgaagatgaggagctgagcagcagcacagagagcattgacaacagcttcagcagccctgtgcggctggcccctgagcgggagttcatcaagagcctgatggccatcggcaagaggctggccaccctgcccaccaaggagcagaagacccagaggctcatcagcgagctgagcctgctgaaccacaagctgcctgcccgggtgtggctgcccacagctggctttgaccaccacgtggtgcgggtgccccacacccaggccgtggtgctgaacagcaaggacaaggccccctacctgatctacgtggaggtgctggagtgtgaaaattttgacaccacctctgtgcctgcccgcatccctgagaaccgcatccgcagcaccaggtctgtggagaacctgcctgaatgtggcatcacccatgagcagagagctggcagcttcagcacagtgcccaactatgacaatgatgatgaggcctggagcgtggatgacatcggggagctgcaggtggagctgcctgaggtgcacaccaacagctgtgacaacatcagccagttctctgtggacagcatcaccagccaggagagcaaggagcccgtcttcatcgctgctggggacatcagaagaaggctgtctgagcagctggcccacacccccacagccttcaagagggaccctgaggaccccagcgctgtggccctgaaggagccctggcaggagaaggtgcggcgcatccgggagggcagcccctacggccacctgcccaactggaggctgctgagcgtcatcgtgaagtgtggagatgacctgcggcaggagctgctggccttccaggtgctgaagcagctgcagagcatctgggagcaggagcgggtgcccctgtggatcaagccctacaagatcctggtgatctctgctgacagcggcatgattgagcctgtggtgaatgctgtgtccatccaccaggtgaagaagcagagccagctgagcctgctggactacttcctgcaggagcacggcagctacaccacagaggccttcctgagcgcccagaggaactttgtgcagagctgtgccggctactgcctggtgtgctacctgctgcaggtgaaggacagacacaacggcaacatcctgctggatgctgagggccacatcatccacatcgactttggcttcatcctgagcagcagccccaggaacctgggctttgagaccagcgccttcaagctgaccacagaatttgtggatgtgatgggcggcctggatggagacatgttcaactactacaagatgctgatgctgcagggcctgattgctgccaggaagcacatggacaaggtggtgcagatcgtggagatcatgcagcagggcagccagctgccctgcttccacggcagcagcaccatccggaacctgaaggagcgcttccacatgtccatgacagaggagcagctgcagctgctggtggagcagatggtggatggctccatgaggagcatcaccaccaagctgtatgatggcttccagtacctgaccaacggcatcatgtag

SEQ ID NO: 18560 - DNA, 4233 bp, synthetic construct
  source 1..4233: mol_type = other DNA; note = Synthetic coding sequence
atggctgacacagacctcttcatggagtgtgaggaggaggagctggagccctggcagaagatcagtgatgtgattgaggacagcgtggtggaggactacaacagcgtggacaagaccaccaccgtgtctgtgtcccagcagcctgtgtctgcccctgtgcccatcgccgcccacgcctctgtggccggccacctgagcaccagcaccaccgtgagcagcagcggggcccagaacagcgacagcaccaagaagaccctggtgaccctcatcgccaacaacaatgccggcaaccccctggtgcagcagggcggccagcccctcatcctgacccagaacccagcccctggcctgggcaccatggtgacccagcctgtgctgcggcctgtgcaggtgatgcagaatgccaaccacgtgaccagcagccctgtggccagccagcccatcttcatcaccacccagggcttccctgtgagaaatgtgcggcctgtgcagaatgccatgaaccaggtgggcatcgtgctgaatgtgcagcagggccagacagtgcggcccatcaccctggtgcctgcccctggcacccagtttgtgaagcccaccgtgggcgtgccccaggtgttcagccagatgacccctgtgcggcccggcagcaccatgcctgtgcggcccaccaccaacaccttcaccaccgtcatcccagccaccctgaccatccgcagcacagtgccccagagccagagccagcagaccaagagcacccccagcaccagcaccacccccacagccacccagcccaccagcctgggccagctggccgtgcagagccctggccagagcaaccagaccaccaaccccaagctggcccccagcttccccagccccccagctgtgtccatcgccagctttgtgacagtgaagaggcctggggtgactggagagaacagcaatgaggtggccaagctggtgaacaccctgaacaccatccccagcctgggccagagccctggccctgtggtggtgagcaacaacagcagcgcccacggcagccagaggaccagcggccctgagagctccatgaaggtgaccagcagcatccctgtgtttgacctgcaggacggcggcaggaagatctgcccccgctgcaatgcccagttccgggtgacagaggccctgcggggccacatgtgctactgctgcccagagatggtggagtaccagaagaagggcaagagcctggacagcgagcccagcgtgcccagcgctgccaagccacccagccctgagaagacagcccctgtggccagcacccccagcagcacccccatcccagccctgagcccccccaccaaggtgcctgagcccaatgaaaatgtgggagatgctgtgcagaccaagctgatcatgctggtggatgacttctactacggcagagatggcggcaaggtggcccagctgaccaacttccccaaggtggccaccagcttccgctgcccccactgcaccaagaggctgaagaacaacatccgcttcatgaaccacatgaagcaccacgtggagctggaccagcagaatggagaggtggatggccacaccatctgccagcactgctaccggcagttcagcacccccttccagctgcagtgccacctggagaatgtgcacagcccctatgagagcaccaccaagtgcaagatctgtgagtgggcctttgaaagtgagcccctcttcctgcagcacatgaaggacacccacaagccaggagagatgccctacgtgtgccaggtgtgccagtaccgcagcagcctgtacagcgaggtggatgtgcacttcaggatgattcatgaggacaccaggcacctgctgtgcccctactgcctgaaggtgttcaagaatggaaatgccttccagcagcactacatgaggcaccagaagagaaatgtgtaccactgcaacaagtgccgcctgcagttcctgtttgccaaggacaagattgagcacaagctgcagcaccacaagaccttcaggaagcccaagcagctggagggcctgaagccaggcaccaaggtgaccatccgggccagccggggccagcccaggacagtgcctgtgagcagcaatgacaccccacccagcgccctgcaggaggccgcccccctgaccagctccatggaccccctgcccgtcttcctgtacccacctgtgcagaggagcatccagaagagagctgtgaggaagatgtctgtgatgggccggcagacctgcctggagtgcagctttgagatcccagacttccccaaccacttccccacctacgtgcactgcagcctgtgccgctacagcacctgctgcagccgggcctatgccaaccacatgatcaacaaccacgtgcccaggaagagccccaagtacctggccctcttcaagaacagcgtgtctggcatcaagctggcctgcaccagctgcacctttgtgacctctgtgggagatgccatggccaagcacctggtgttcaaccccagccacaggagcagcagcatcctgccccggggcctgacctggatcgcccacagccgccacggccagacccgggacagagtgcatgacagaaatgtgaagaacatgtaccccccacccagcttccccaccaacaaggccgccaccgtgaagtctgctggggccaccccagctgagcctgaggagctgctgacccccctggccccagccctgcccagccctgccagcacagccaccccaccacccacccccacccacccccaggccctggccctgccccccctggccacagagggcgctgagtgcctgaatgtggatgaccaggatgagggcagccctgtgacccaggagcctgagctggccagcggcggcggcggcagcggcggcgtgggcaagaaggagcagctgtctgtgaagaagctgcgggtggtgctgtttgccctgtgctgcaacacagagcaggccgctgagcacttcaggaacccccagaggcgcatccgccgctggctgcggcgcttccaggccagccagggcgagaacctggagggcaagtacctgagctttgaagctgaggagaagctggccgagtgggtgctgacccagcgggagcagcagctgcctgtgaatgaggagaccctcttccagaaggccaccaagattggccgcagcctggagggcggcttcaagatctcctatgagtgggccgtgcgcttcatgctgcggcaccacctgaccccccacgcccggcgggctgtggcccacaccctgcccaaggatgtggctgaaaatgccggcctcttcatcgactttgtgcagaggcagatccacaaccaggacctgcccctgtccatgattgtggccattgatgagatcagcctcttcctggacacagaggtgctgagcagtgatgacagaaaagaaaatgccctgcagacagtgggcaccggggagccctggtgtgatgtggtgctggccatcctggctgatggcaccgtgctgcccaccctggtgttctaccggggccagatggaccagcctgccaacatgccagacagcatcctgctggaggccaaggagagcggctacagtgatgatgagatcatggagctgtggagcaccagggtgtggcagaagcacacagcctgccagaggagcaagggcatgctggtgatggactgccacaggacccacctgtctgaggaggtgctggccatgctgagcgccagcagcaccctgcctgctgtggtgcctgctggctgcagcagcaagatccagcccctggatgtgtgcatcaagaggacagtgaagaacttcctgcacaagaagtggaaggagcaggcccgggagatggctgacacagcctgtgacagtgatgtgctgctgcagctggtgctggtgtggctgggggaggtgctgggcgtcatcggggactgcccagagctggtgcagaggagcttcctggtggcctctgtgctgcccggcccagatggcaacatcaacagccccaccagaaatgctgacatgcaggaggagctgattgccagcctggaggagcagctgaagctgagcggggagcacagcgagagcagcaccccccggcccaggagcagccctgaggagaccatcgagcctgagagcctgcaccagctgtttgaaggagagagcgagacagagagcttctacggctttgaggaggccgacctggacctgatggagatctag

SEQ ID NO: 18561 - DNA, 1488 bp, synthetic construct
  source 1..1488: mol_type = other DNA; note = Synthetic coding sequence
atgccccagctgctgcagaacatcaatggcatcatcgaggccttccgccgctatgccaggacagagggcaactgcacagccctgaccagaggagagctgaagaggctgctggagcaggagtttgctgatgtgattgtgaagccccatgaccctgccaccgtggatgaggtgctgcggctgctggatgaggaccacacaggcaccgtggagttcaaggagttcctggtgctggtgttcaaggtggcccaggcctgcttcaagaccctgtctgagagcgctgagggcgcctgtggcagccaggagagcggcagcctgcacagcggggccagccaggagctgggggagggccagaggtctggaacagaggtgggccgggccggcaagggccagcactatgagggcagcagccaccggcagagccagcagggcagccggggccagaacagacctggggtgcagacccagggccaggccactggaagtgcctgggtgagcagctatgaccggcaggccgagagccagagccaggagcgcatcagcccccagatccagctgagcggccagacagagcagacccagaaggccggggagggcaagaggaaccagaccacagagatgaggcctgagcggcagccccagacccgggagcaggaccgggcccaccagacaggagagaccgtgacaggcagcggcacccagacccaggccggggccacccagacagtggagcaggacagcagccaccagacaggccgcaccagcaagcagacccaggaggccaccaatgaccagaacagaggaacagagacccacggccagggccgcagccagaccagccaggccgtgactggaggccacgcccagatccaggccggcacccacacccagacccccacccagacagtggagcaggacagcagccaccagacaggcagcaccagcacccagacccaggagagcaccaacggccagaacagaggaacagagatccacggccagggccgcagccagaccagccaggccgtgactggaggccacacccagatccaggccggcagccacacagaaacagtggagcaggacaggagccagacagtgagccacggcggggcccgggagcagggccagacccagacccagcccggcagcggccagcgctggatgcaggtgagcaaccctgaggccggggagaccgtgcctgggggccaggcccagacaggagccagcacagagagcggccggcaggagtggagcagcacccacccccggcgctgtgtgacagagggccagggcgaccggcagcccaccgtggtgggggaggagtgggtggatgaccacagccgggagaccgtcatcctgcggctggaccagggcaacctgcacacctctgtgagcagcgcccagggccaggatgctgcccagagcgaggagaagaggggcatcacagcccgggagctgtacagctacctgcggagcaccaagccctag

SEQ ID NO: 18562 - DNA, 1233 bp, synthetic construct
  source 1..1233: mol_type = other DNA; note = Synthetic coding sequence
atgaacatgcccagcacccccctggcccccaccaccggcacagccacctgctcctggagcgccagcacctgcaccaccaccaggcctgctgtgcggcccccatccttcccccaccggcccccaggaaatgctgccctgcccagcctgatgcccagccggcccacccaggtggccggccagtgtggggccggcaacaactgggccaagggccactacacagaaggagctgagctgatggagagcgtgatggatgtggtgaggaaggaggccgagagctgtgactgcctgcagggcttccagctgacccacagcctgggcggcggcactggaagtggcatgggcaccctgctgctgagcaagatccgggaggagtacccagaccgcatcatcaacaccttcagcatcctgcccagccccaaggtgtctgacacagtggtggagccctacaatgccaccctgtctgtgcaccagctgattgaaaatgctgatgagaccttctgcatcgacaatgaggccctgtatgacatctgcagcaagaccctgaagctgcccacccccacctacggggacctgaaccacctggtgtctgccaccatgtctggagtgaccacctgcctgcgcttccctggccagctgaatgctgacctgaggaagctggccgtgaacatggtgcccttcccccggctgcacttcttcatgcctggctttgcccccctgaccagccggggcagccagcagtaccgggccctgactgtggccgagctgacccagcagatgtttgatgccaagaacatgatggccgcctgtgaccccaggcatggccgctacctgacagctgctgccatcttccggggccgcatgcccatgagggaggtggatgagcagatgttcaacatccaggacaagaacagcagctactttgctgactggctgcccaacaacgtgaagacagctgtgtgtgacatccccccccggggcctgaagatgtctgccaccttcatcggcaacaacacagccatccaggagctgttcaagagggtgtctgagcagttcaccgccatgttccggaggaaggccttcctgcactggtacacaggagagggcatggatgagatggagttcacagaagctgagagcaacatgaatgacctggtgtctgagtaccagcagtaccaggatgccacagctgaggaggaggaggatgaggagtatgcagaggaggaggtggcctag

SEQ ID NO: 18563 - DNA, 2106 bp, synthetic construct
  source 1..2106: mol_type = other DNA; note = Synthetic coding sequence
atgggcagcgctgctgatgtgcgcttcagcctgggcaccaccacccacgcccctcctggggtgcaccggcgctacagcgccctgcgggaggagagcgccaaggactgggagaccagccccctgcccggcatgctggccccagctgctggccctgcctttgacagcgaccctgagatcagtgatgtggatgaagatgagcccggcggcctggtgggcagcgcagatgtggtgagccccagcggccacagtgatgcccagaccctggccatgatgctgcaggagcagctggatgccatcaatgaggagatccgcatgatccaggaggagaaggagagcacagagctgcgggcagaggagattgagaccagggtgaccagcggctccatggaggccctgaacctgaagcagctgaggaagaggggcagcatccccaccagcctgacagccctgagcctggccagcgccagcccccccctgagcggccgcagcacccccaagctgaccagccgctctgctgcccaggacctggacaggatgggcgtgatgaccctgcccagcgacctgaggaagcacaggaggaagctgctgagccctgtgtcccgggaggagaaccgggaggacaaggccaccatcaagtgtgagaccagcccccccagcagccccaggaccctgcggctggagaagctgggccacccagccctgagccaggaggagggcaagagcgccctggaggaccagggcagcaaccccagcagcagcaacagcagccaggacagcctgcacaagggggccaagaggaagggcatcaagagcagcatcggccgcctgtttgggaagaaggagaagggccgcctcatccagctgagcagagatggagccaccggccacgtgctgctgacagacagcgagttctccatgcaggagcccatggtgcctgccaagctgggcacccaggccgagaaggaccggcggctgaagaagaagcaccagctgctggaggatgcccggaggaagggcatgccctttgcccagtgggatggccccaccgtggtgtcctggctggagctgtgggtgggcatgcctgcctggtacgtggccgcctgccgggccaacgtgaagagcggggccatcatgtctgccctgagtgacacagagatccagcgggagatcggcatcagcaatgccctgcaccggctgaagctgcggctggccatccaggagatggtgtccctgaccagccccagcgccccacccaccagcaggaccagcagtggaaatgtgtgggtgacccatgaggagatggagaccctggagaccagcaccaagacagattctgaggagggctcctgggcccagaccctggcctacggggacatgaaccacgagtggattggaaatgagtggctgcccagcctgggcctgccccagtaccgcagctacttcatggagtgcctggtggatgccaggatgctggaccacctgaccaagaaggacctgcgggtgcacctgaagatggtggacagcttccacaggaccagcctgcagtatggcatcatgtgcctgaagaggctgaactatgacaggaaggagctggagaagaggcgggaggagagccagcacgagatcaaggatgtgctggtgtggaccaatgaccaggtggtgcactgggtgcagagcatcggcctgcgggactatgccggcaacctgcacgagagcggcgtgcatggagccctgctggccctggatgaaaattttgaccacaacaccctggccctgatcctgcagatccccacccagaacacccaggcccggcaggtgatggagcgggagttcaacaacctgctggccctgggcacagacaggaagctggatgatggagatgacaaggtgttccggcgggcccccagctggaggaagcgcttccggccccgggagcaccacggccggggcggcatgctgagcgccagcgctgagaccctgcctgctggcttccgggtgtccaccctgggcaccctgcagcccccaccagccccacccaagaagatcatgcctgaggcccacagccactacctgtatggccacatgctgagcgccttccgggactag

SEQ ID NO: 18564 - DNA, 1029 bp, synthetic construct
  source 1..1029: mol_type = other DNA; note = Synthetic coding sequence
atggcctctgtgaccagggctgtgtttggagagctgcccagcggcggcggcaccgtggagaagttccagctgcagagcgacctgctgcgggtggacatcatctcctggggctgcaccatcacagccctggaggtgaaggaccggcagggccgggccagtgatgtggtgctgggctttgctgagctggagggctacctgcagaagcagccctactttggagctgtgattggccgggtggccaacagaattgccaagggcaccttcaaggtggatggcaaggagtaccacctggccatcaacaaggagcccaacagcctgcatggaggagtgcggggctttgacaaggtgctgtggaccccccgggtgctgagcaatggagtgcagttcagccgcatcagcccagatggagaggagggctacccaggagagctgaaggtgtgggtgacctacaccctggatggaggagagctgattgtgaactaccgggcccaggccagccaggccacccctgtgaacctgaccaaccacagctacttcaacctggccggccaggccagccccaacatcaatgaccacgaggtgaccatcgaggccgacacctacctgcctgtggatgagaccctcatccccactggagaggtggcccctgtgcagggcacagcctttgacctgaggaagcctgtggagctgggcaagcacctgcaggacttccacctgaatggatttgaccacaacttctgcctgaagggcagcaaggagaagcacttctgtgcccgggtgcaccacgccgccagcggccgggtgctggaggtgtacaccacccagcccggggtgcagttctacacaggcaacttcctggatggcaccctgaagggcaagaatggagctgtgtaccccaagcacagcggcttctgcctggagacccagaactggccagatgctgtgaaccagccccgcttcccccctgtgctgctgcggcctggagaggagtatgaccacaccacctggttcaagttctctgtggcctag

SEQ ID NO: 18565 - DNA, 2295 bp, synthetic construct
  source 1..2295: mol_type = other DNA; note = Synthetic coding sequence
atgtctgacacccggcggcgggtgaaggtgtacaccctgaatgaagatcggcagtgggatgaccggggcaccggccacgtgagcagcacctacgtggaggagctgaagggcatgagcctgctggtgcgggcagagagtgatggcagcctgctgctggagagcaagatcaaccccaacacagcctaccagaagcagcaggacaccctcatcgtgtggagcgaggccgagaactatgacctggccctgtccttccaggagaaggccggctgtgatgagatctgggagaagatctgccaggtgcagggcaaggaccccagcgtggaggtgacccaggacctgattgatgaaagtgaggaggagagatttgaggagatgcctgagaccagccacctgattgacctgcccacctgtgagctgaacaagctggaggagattgctgacctggtgacctctgtgctgagcagccccatccggcgggagaagctggccctggccctggagaatgaaggctacatcaagaagctgctgcagctgttccaggcctgtgagaacctggagaacacagagggcctgcaccacctgtatgagatcatccggggcatcctcttcctgaacaaggccaccctgtttgaggtgatgttcagtgatgagtgcatcatggatgtggtgggctgcctggagtatgaccctgccctggcccagcccaagaggcaccgggagttcctgaccaagacagccaagttcaaggaggtgatccccatcacagattctgagctgcggcagaagatccaccagacctacagagtgcagtacatccaggacatcatcctgcccaccccatctgtgtttgaggagaacttcctgagcaccctgaccagcttcatcttcttcaacaaggtggagatcgtgtccatgctgcaggaggatgagaagttcctgtctgaggtgtttgcccagctgacagatgaggccacagatgatgacaagaggcgggagctggtgaacttcttcaaggagttctgtgccttcagccagaccctgcagccccagaacagagatgccttcttcaagaccctggccaagctgggcatcctgcctgccctggagatcgtgatgggcatggatgacctgcaggtgcgctctgctgccacagacatcttctcctacctggtggagttcagccccagcatggtgcgggagtttgtgatgcaggaggcccagcagagtgatgatgacatcctgctgatcaacgtggtgattgagcagatgatctgtgacacagatcctgagctgggcggcgctgtgcagctgatgggcctgctgcggaccctgattgatcctgagaacatgctggccaccaccaacaagacagagaagtctgagttcctgaacttcttctacaaccactgcatgcacgtgctgacagcccccctgctgaccaacaccagcgaggacaagtgtgagaaggacaacatcgtgggcagcaacaagaacaacaccatctgccctggggccctgcgcttcatgaggcgcatcatcggcctgaaggatgagttctacaaccgctacatcaccaagggcaacctgtttgagcccgtcatcaatgccctgctggacaatggcacccgctacaacctgctgaacagcgctgtgattgagctgtttgagttcatccgggtggaggacatcaagagcctgacagcccacatcgtggagaacttctacaaggccctggagagcattgaatatgtgcagaccttcaagggcctgaagaccaagtatgagcaggagaaggaccggcagaaccagaagctgaacagcgtgcccagcatcctgcggagcaaccgcttcagaagagatgccaaggccctggaggaggatgaggagatgtggttcaatgaagatgaggaggaggagggcaaggctgtggtggcccctgtggagaagcccaagccagaagatgacttcccagacaactatgagaagttcatggagaccaagaaggccaaggagagcgaggacaaggagaacctgcccaagaggaccagccctgggggcttcaagttcaccttcagccacagcgccagcgctgccaacggcaccaacagcaagtctgtggtggcccagatccccccagccaccagcaatggcagcagcagcaagaccaccaacctgcccacctctgtgacagccaccaagggcagcctggtgggcctggtggactacccagatgatgaggaggaggatgaggaggaggagagcagccccaggaagaggccccggctgggcagctag

SEQ ID NO: 18566 - DNA, 231 bp, synthetic construct
  source 1..231: mol_type = other DNA; note = Synthetic coding sequence
atgagcaaggcccaccccccagagctgaagaagttcatggacaagaagctgagcctgaagctgaatggaggccgccacgtgcagggcatcctgcggggctttgaccccttcatgaacctggtgattgatgaatgtgtggagatggccaccagcggccagcagaacaacatcggcatggtggtgatccggggcaacagcatcatcatgctggaggccctggagcgggtgtag

SEQ ID NO: 18567 - DNA, 528 bp, synthetic construct
  source 1..528: mol_type = other DNA; note = Synthetic coding sequence
atgcagctgacccaccagctggacctcttccctgagtgccgggtgaccctgctgctcttcaaggatgtgaagaatgctggggacctgcggaggaaggccatggagggcaccattgatggcagcctcatcaaccccaccgtcatcgtggaccccttccagatcctggtggccgccaacaaggctgtgcacctgtacaagctgggcaagatgaagaccaggaccctgagcacagagatcatcttcaacctgagccccaacaacaacatcagcgaggccctgaagaagtttggcatcagcgccaatgacaccagcatcctgattgtgtacatcgaggagggggagaagcagatcaaccaggagtacctgatcagccaggtggagggccaccaggtgtccctgaagaacctgcctgagatcatgaacatcacagaggtgaagaagatctacaagctgagcagccaggaggagagcatcggcaccctgctggatgccatcatctgcaggatgagcaccaaggatgtgctgtag

SEQ ID NO: 18568 - DNA, 909 bp, synthetic construct
  source 1..909: mol_type = other DNA; note = Synthetic coding sequence
atggccctgcatgacatggaggacttcacctttgatggcaccaagaggctgtctgtgaactacgtgaagggcatcctgcagcccacagacacctgtgacatctgggacaagatctggaacttccaggccaagccagatgacctgctgatcagcacctaccccaaggccggcaccacctggacccaggagatcgtggagctgatccagaatgaaggagatgtggagaagagcaagagggcccccacccaccagcgcttccccttcctggagatgaagatccccagcctgggcagcggcctggagcaggcccacgccatgcccagcccccgcatcctgaagacccacctgcccttccacctgctgccccccagcctgctggagaagaactgcaagatcatctacgtggccaggaaccccaaggacaacatggtgtcctactaccacttccagaggatgaacaaggccctgcctgcccctggcacctgggaggagtactttgagaccttcctggccggcaaggtgtgctggggctcctggcatgagcacgtgaagggctggtgggaggccaaggacaagcaccgcatcctgtacctgttctatgaggacatgaagaagaaccccaagcatgagatccagaagctggccgagttcatcggcaagaagctggatgacaaggtgctggacaagatcgtgcactacaccagctttgatgtgatgaagcagaaccccatggccaactacagcagcatcccagctgagatcatggaccacagcatcagccccttcatgaggaaaggagctgtgggggactggaagaagcacttcaccgtggcccagaatgaaagatttgatgaggactacaagaagaagatgacagacacccggctgaccttccacttccagttctag

SEQ ID NO: 18569 - DNA, 2892 bp, synthetic construct
  source 1..2892: mol_type = other DNA; note = Synthetic coding sequence
atgtggtgcctgcactgcaacagcgagaggacccagagcctgctggagctggagctggacagcggcgtggagggggaggcccccagcagcgagaccggcaccagcctggacagccccagcgcctacccccagggccccctggtgcccggcagcagcctgagcccagaccactatgagcacacctctgtgggcgcctacggcctgtacagcggccccccaggccagcagcagaggacccggcggcccaagctgcagcacagcaccagcatcctgaggaagcaggccgaggaggaggccatcaagaggagccgcagcctgtctgagagctatgagctgagcagtgacctgcaggacaagcaggtggagatgctggagaggaaatatggaggccgcctggtgaccaggcatgctgcccggaccatccagacagccttccggcagtaccagatgaacaagaactttgagcggctgcggagctccatgtctgaaaataggatgagccgccgcatcgtgctgagcaacatgaggatgcagttctcctttgagggccctgagaaggtgcacagcagctactttgagggcaagcaggtgtctgtgaccaatgatggcagccagctgggcgccctggtgtccccagaatgtggggacctgtctgagcccaccaccctgaagagccctgcccccagcagtgactttgctgatgccatcacagagctggaggatgccttcagccggcaggtgaagagcctggccgagagcattgatgatgccctgaactgccgcagcctgcacacagaggaggccccagccctggatgctgcccgggcccgggacacagagccccagacagccctgcacggcatggaccacaggaagctggatgagatgacagccagctacagtgatgtgaccctgtacattgatgaggaggagctgagcccccccctgcccctgagccaggccggggaccggcccagcagcacagaaagtgacctgcggctgcgggccggcggggccgccccagactactgggccctggcccacaaggaggacaaggctgacacagacaccagctgccgcagcacccccagcctggagcggcaggagcagaggctgcgggtggagcacctgcccctgctgaccatcgagccccccagcgacagctctgtggacctgagtgacagaagtgagcggggcagcctgaagaggcagagcgcctatgaaagaagcctgggcggccagcagggcagccccaagcacggcccccacagcggggcccccaagagcctgccccgggaggagcctgagctgcggcccaggcctccccggcccctggacagccacctggccatcaatggcagcgccaaccggcagagcaagtctgagagtgactacagtgatggagacaatgacagcatcaacagcaccagcaacagcaatgacaccatcaactgcagcagcgagagcagcagccgggacagcctgcgggagcagaccctgagcaagcagacctaccacaaggaggccaggaacagctgggacagccctgccttcagcaatgatgtgatcaggaagaggcactaccgcatcggcctgaacctcttcaacaagaagccagagaagggcgtgcagtacctgattgagcggggctttgtgcctgacacccctgtgggcgtggcccacttcctgctgcagaggaagggcctgagccggcagatgattggagagttcctgggcaaccggcagaagcagttcaacagagatgtgctggactgtgtggtggatgagatggacttcagcaccatggagctggatgaggccctgaggaagttccaggcccacatccgggtgcagggcgaggcccagaaggtggagcggctcatcgaggccttcagccagcgctactgcatctgcaaccctggggtggtgcggcagttcagaaatccagacaccatcttcatcctggcctttgccatcatcctgctgaacacagacatgtacagccccaacgtgaagccagagaggaagatgaagctggaggacttcatcaagaacctgcggggcgtggatgatggagaggacatcccccgggagatgctgatgggcatctatgaaagaatcaggaagcgggagctgaagaccaatgaagaccacgtgtcccaggtgcagaaggtggagaagctgattgtgggcaagaagcccatcggcagcctgcaccctggcctgggctgtgtgctgagcctgccccaccggcggctggtgtgctactgccgcctgtttgaggtgcctgaccccaacaagccccagaagctgggcctgcaccagcgggagatcttcctgttcaatgacctgctggtggtgaccaagatcttccagaagaagaagaacagcgtgacctacagcttccggcagagcttcagcctgtatggcatgcaggtgctgctgtttgagaaccagtactacccaaatggcatccggctgaccagctctgtgcctggagctgacatcaaggtgctgatcaacttcaatgcccccaacccccaggacaggaagaagttcacagatgacctgcgggagagcattgctgaggtgcaggagatggagaagcaccgcatcgagagcgagctggagaagcagaagggcgtggtgcggcccagcatgagccagtgcagcagcctgaagaaggagagcggaaatggcaccctgagccgggcctgcctggatgacagctatgccagcggggagggcctgaagaggtctgccctgagcagcagcctgcgggacctgtctgaggccggcaagagaggaagaagaagcagcgctggcagcctggagagcaatgtggagttccagccctttgagcccctgcagcccagcgtgctgtgcagctag

SEQ ID NO: 18570 - DNA, 711 bp, synthetic construct
  source 1..711: mol_type = other DNA; note = Synthetic coding sequence
atggccagcctggacagagtgaaggtgctggtgctgggggacagcggcgtgggcaagagcagcctggtgcacctgctgtgccagaaccaggtgctgggcaaccccagctggacagtgggctgcagcgtggatgtgcgggtgcatgactacaaggagggcaccccagaggagaagacctactacatcgagctgtgggatgtgggcggctctgtgggcagcgccagctctgtgaagagcaccagggctgtgttctacaacagcgtgaatggcatcatctttgtgcatgacctgaccaacaagaagagcagccagaacctgcggcgctggagcctggaggccctgaacagagacctggtgcccactggagtgctggtgaccaatggagactatgaccaggagcagtttgctgacaaccagatccccctgctggtgattggcaccaagctggaccagatccacgagaccaagagacatgaggtgctgaccaggacagccttcctggccgaggacttcaaccctgaggagatcaacctggactgcaccaacccccgctacctggccgccggcagcagcaatgctgtgaagctgagccgcttctttgacaaggtgattgagaagcgctacttcctgcgggagggcaaccagatccctggcttcccagacaggaagagatttggagctggcaccctgaagagcctgcactatgactag

SEQ ID NO: 18571 - DNA, 2784 bp, synthetic construct
  source 1..2784: mol_type = other DNA; note = Synthetic coding sequence
atgcagagcatcctgtaccacggcctcatccgggaccaggcctgccggcggcagacagactactggcagtttgtgaaggacatccgctggctgagcccccacagcgccctgcacgtggagaagttcatctctgtgcatgaaaatgaccagagcagcgcagatggagccagcgagagagctgtggccgagctgtggctgcagcacagcctgcagtaccactgcctgagcgcccagctgcggcccctgctgggggaccggcagtacatcaggaagttctacacagatgctgccttcctgctgagtgatgcccacgtgacagccatgctgcagtgcctggaggccgtggagcagaacaacccccggctgctggcccagattgatgcctccatgtttgccaggaagcatgagagccccctgctggtgaccaagagccagagcctgacagccctgcccagcagcacctacaccccacccaacagctatgcccagcacagctacttcggcagcttcagcagcctgcaccagagcgtgcccaacaacggcagcgagcggcgcagcaccagcttccccctgagcggcccccccaggaagccccaggagagccggggccacgtgtccccagctgaggaccagaccatccaggcccctcctgtgtctgtgtctgccctggcccgggacagccccctgaccccaaatgagatgagcagcagcaccctgaccagccccatcgaggcctcctgggtgagcagccagaatgacagccctggagatgccagcgagggccctgagtacctggccatcggcaacctggacccccggggccgcacagccagctgccagagccacagcagcaatgctgagagcagcagcagcaacctcttcagcagcagcagcagccagaagccagacagcgctgccagcagcctgggggaccaggagggcggcggggagagccagctgagctctgtgctgcggcgcagcagcttcagcgagggccagaccctgactgtgaccagcggggccaagaagagccacatccgcagccacagcgacaccagcatcgccagcagaggagcccctgggggccccaggaacatcaccatcatcgtggaggaccccatcgccgagagctgcaatgacaaggccaagctgcggggccccctgccctacagcggccagagcagcgaggtgtccacccccagcagcctgtacatggagtatgaaggaggccgctacctgtgcagcggggagggcatgttcagaagacccagcgagggccagagcctcatctcctacctgtctgagcaggactttggcagctgtgccgacctggagaaggaaaatgcccacttcagcatcagcgagagcctgattgctgccatcgagctgatgaagtgcaacatgatgagccagtgcctggaggaggaggaggtggaggaggaggacagcgaccgggagatccaggagctgaagcagaagatccggctgcggcggcagcagatccgcaccaagaacctgctgcccatgtaccaggaggccgagcacggcagcttccgggtgaccagcagcagcagccagttcagcagccgggacagcgcccagctgagtgacagcggcagcgcagatgaggtggatgaatttgagatccaggatgctgacatcagaagaaacacagccagcagcagcaagagctttgtgagcagccagagcttcagccactgcttcctgcacagcaccagcgctgaggccgtggccatgggcctgctgaagcagtttgagggcatgcagctgcctgctgccagcgagctggagtggctggtgcctgagcatgatgccccccagaagctgctgcccatcccagacagcctgcccatcagcccagatgatggccagcacgccgacatctacaagctgcgcatccgggtgcggggcaacctggagtgggccccaccccggccccagatcatcttcaacgtgcacccagcccccaccaggaagattgctgtggccaagcagaactaccgctgtgccggctgcggcatcagaacagatcctgactacatcaagaggctgcgctactgtgagtacctgggcaagtacttctgccagtgctgccatgaaaatgcccagatggccatccccagccgggtgctgaggaagtgggacttcagcaagtactacgtgagcaacttcagcaaggacctgctgatcaagatctggaatgaccccctcttcaacgtgcaggacatcaacagcgccctgtacaggaaggtgaagctgctgaaccaggtgcggctgctgcgggtgcagctgtgccacatgaagaacatgttcaagacctgccgcctggccaaggagctgctggacagctttgacacagtgcccggccacctgacagaggacctgcacctgtacagcctgaatgacctgacagccaccaggaaaggagagctgggcccccggctggccgagctgacccgggccggggccacccacgtggagcgctgcatgctgtgccaggccaagggcttcatctgtgagttctgccagaatgaagatgacatcatcttcccctttgagctgcacaagtgcaggacctgtgaggagtgcaaggcctgctaccacaaggcctgcttcaagagcggcagctgcccccgctgtgagcggctgcaggcccggcgggaggccctggcccggcagagcctggagagctacctgagtgactatgaggaggagcctgctgaggccctggccctggaggccgctgtgctggaggccacctag

SEQ ID NO: 18572 - DNA, 300 bp, synthetic construct
  source 1..300: mol_type = other DNA; note = Synthetic coding sequence
atggccagcgccagcgcccggggcaaccaggacaaggatgcccacttccccccacccagcaagcagagcctgctcttctgccccaagagcaagctgcacatccacagagctgagatcagcaagatcatgagggagtgccaggaggagagcttctggaagagggccctgcccttcagcctggtgtccatgctggtgacccagggcctggtgtaccagggctacctggccgccaacagcagatttggcagcctgcccaaggtggccaggacagccagcctgcctgtgagaaatgccaagtag

SEQ ID NO: 18573 - DNA, 786 bp, synthetic construct
  source 1..786: mol_type = other DNA; note = Synthetic coding sequence
atggtggtgctgtctgtgcctgctgaggtgaccgtcatcctgctggacatcgagggcaccaccacccccatcgcctttgtgaaggacatcctcttcccctacattgaagaaaatgtgaaggagtacctgcagacccactgggaggaggaggagtgccagcaggatgtgtccctgctgaggaagcaggccgaggaggatgcccacctggatggagctgtgcccatcccagctgccagcggaaatggagtggatgacctgcagcagatgatccaggccgtggtggacaacgtgtgctggcagatgagcctggacaggaagaccacagccctgaagcagctgcagggccacatgtggagggctgccttcaccgctggccgcatgaaggccgagttctttgctgatgtggtgcctgctgtgaggaagtggagggaggccggcatgaaggtgtacatctacagcagcggctctgtggaggcccagaagctgctgtttggccacagcacagaaggagacatcctggagctggtggatggccactttgacaccaagattggccacaaggtggagagcgagagctacaggaagattgctgacagcatcggctgcagcaccaacaacatcctcttcctgacagatgtgacccgggaggccagcgctgctgaggaggctgatgtgcacgtggccgtggtggtgcggcctggaaatgccggcctgacagatgatgagaagacctactacagcctcatcaccagcttcagcgagctgtacctgcccagcagcacctag

SEQ ID NO: 18574 - DNA, 1188 bp, synthetic construct
  source 1..1188: mol_type = other DNA; note = Synthetic coding sequence
atggctgaagatggcctgcccaagatctacagccaccccccaacagagagcagcaagacccccacagctgccaccatcttcttcggggctgacaatgccatccccaagtctgagaccaccatcaccagcgagggggaccacgtgacctctgtgaatgagtacatgctggagagtgacttcagcaccaccacagacaacaagctgacagccaagaaggagaagctgaagtcagaagatgacatgggcacagacttcatcaagagcaccacccacctgcagaaggagatcaccagcctgaccggcaccaccaacagcatcacccgggacagcatcacagagcacttcatgcctgtgaagattggcaacatcagcagccctgtgaccaccgtgtccctgattgacttcagcacagacatcgccaaggaggacatcctgctggccaccatcgacacaggagatgctgagatcagcatcaccagcgaggtgtctggcaccctgaaggacagcagcgctggggtggctgatgccccagccttccccaggaagaaggatgaggccgacatgagcaactacaacagcagcatcaagagcaatgtgcctgcagatgaggccgtgcaggtgacagacagcaccatccctgaggccgagatccccccagcccctgaggagagcttcaccaccatcccagacatcacagccctggaggaggagaagatcacagaaattgacctgtctgtgctggaggatgacaccagcgctgtggccaccctgacagacagtgatgagaagttcatcaccgtgtttgagctgaccaccagcgctgagaaggacaaggacaagcgggaggacaccctgctgacagatgaggagaccacagagggcgccagcatctggatggagcgggacacagccaatgaagctgagacccacagcgtgctgctgacagctgtggagagccgctatgactttgtggtgcctgccagcatcgccaccaacctggtggaggagagcagcacagaggaggacctgtctgaaacagacaacacagaaacagtgcccaagatcacagagcccttcagcggcaccacctctgtgctggacaccccagactacaaggaggacaccagcaccacagaaacagacatctttgagctgctgaaggaggagccagatgagttcatgatctag

SEQ ID NO: 18575 - DNA, 921 bp, synthetic construct
  source 1..921: mol_type = other DNA; note = Synthetic coding sequence
atgtacttctgctggggcgctgacagccgggagctgcagaggagaagaacagctggcagccctggagctgagctgctgcaggccgccagcggggagcggcacagcctgctgctgctgaccaaccaccgggtgctgagctgtggggacaacagccggggccagctgggcagaagaggagcccagagaggagagctgcctgagcccatccaggccctggagaccctcatcgtggacctggtgtcctgtgggaaggagcacagcctggccgtgtgccacaagggccgggtgtttgcctggggcgccggcagcgagggccagctgggcattggagagttcaaggagatctccttcacccccaagaagatcatgaccctgaatgacatcaagatcatccaggtgtcctgtggccactaccacagcctggccctgagcaaggacagccaggtgttctcctggggcaagaacagccacggccagctgggcctgggcaaggagttccccagccaggccagcccccagagggtgcgcagcctggagggcatccccctggcccaggtggccgccggcggggcccacagctttgccctgagcctgtgtggcaccagctttggctggggcagcaacagcgctggccagctggccctgagcggcagaaatgtgcctgtgcagagcaacaagcccctgtctgtgggcgccctgaagaacctgggcgtggtgtacatcagctgtggagatgcccacacagctgtgctgacccaggacggcaaggtgttcaccttcggggacaacagaagtggccagctgggctacagccccaccccagagaagaggggcccccagctggtggagagaattgatggcctggtgtcccagattgactgtggcaggaacagcaagcacggcttcatgaccttcttctag

SEQ ID NO: 18576 - DNA, 909 bp, synthetic construct
  source 1..909: mol_type = other DNA; note = Synthetic coding sequence
atgggcaactgctgctggacccagtgcttcggcctgctgaggaaggaggccggccgcctgcagagggtgggcggcggcggcggcagcaagtacttccgcacctgcagcagaggagagcacctgaccattgaatttgagaacctggtggagagtgatgaaggagagagccctggcagcagccaccggcccctgacagaggaggagatcgtggacctgcgggagcggcactatgacagcattgctgagaagcagaaggacctggacaagaagatccagaaggagctggccctgcaggaggagaagctgcggctggaggaggaggccctgtatgctgcccagcgggaggccgcccgggccgccaagcagaggaagctgctggagcaggagcggcagagaattgtgcagcagtaccaccccagcaacaacggggagtaccagagcagcggcccagaagatgactttgagagctgcctgaggaacatgaagagccagtatgaggtgttccgcagcagccggctgagcagtgatgccaccgtgctgacccccaacacagagagcagctgtgacctgatgaccaagaccaagagcaccagcggaaatgatgacagcaccagcctggacctggagtgggaggatgaggagggcatgaacaggatgctgcccatgagggagaggagcaagacagaggaggacatcctgcgggccgccctgaagtacagcaacaagaagacaggcagcaaccccaccagcgccagtgatgacagcaatggcctggagtgggagaatgactttgtgtctgctgagatggatgacaatggaaattctgagtacagcggctttgtgaaccctgtgctggagctgagtgacagcggcatccgccacagcgacacagaccagcagaccaggtag

SEQ ID NO: 18577 - DNA, 1641 bp, synthetic construct
  source 1..1641: mol_type = other DNA; note = Synthetic coding sequence
atggccaccctggtggtgaacaagctgggcgccggcgtggacagcggccggcagggcagccggggcacagctgtggtgaaggtgctggagtgtggggtgtgtgaagatgtgttcagcctgcagggcgacaaggtgccccggctgctgctgtgtggccacacagtgtgccacgactgcctgacccggctgcccctgcacggccgggccatccgctgcccctttgaccggcaggtgacagacctgggggacagcggcgtgtggggcctgaagaagaactttgccctgctggagctgctggagcggctgcagaatggccccatcggccagtacggggctgctgaggagagcatcggcatcagcggggagagcatcatccgctgtgatgaagatgaggcccacctggcctctgtgtactgcaccgtgtgtgccacccacctgtgcagtgaatgttcccaggtgacccacagcaccaagaccctggccaagcaccggcgggtgcccctggccgacaagccccatgagaagaccatgtgcagccagcaccaggtgcacgccatcgagtttgtgtgcctggaggagggctgccagaccagccccctgatgtgctgcgtgtgcaaggagtatggcaagcaccagggccacaagcacagcgtgctggagcctgaggccaaccagatccgggccagcatcctggacatggcccactgcatccgcaccttcacagaggagatcagtgactacagcaggaagctggtgggcatcgtgcagcacatcgagggcggggagcagatcgtggaggatggcatcggcatggcccacacagagcacgtgcccggcacagcagaaaatgcccggagctgcatccgggcctacttctatgacctgcacgagaccctgtgccggcaggaggagatggccctgtctgtggtggatgcccacgtgcgggagaagctgatctggctgcggcagcagcaggaggacatgaccatcctgctgtctgaggtgtctgctgcctgcctgcactgtgagaagaccctgcagcaggatgactgccgggtggtgctggccaagcaggagatcacccggctgctggagaccctgcagaagcagcagcagcagttcacagaggtggccgaccacatccagctggatgccagcatccctgtgaccttcaccaaggacaacagagtgcacatcggccccaagatggagatccgggtggtgaccctgggcctggatggagctgggaagaccaccatcctcttcaagctgaagcaggatgagttcatgcagcccatccccaccatcggcttcaacgtggagaccgtggagtacaagaacctgaagttcaccatctgggatgtgggcggcaagcacaagctgcggcccctgtggaagcactactacctgaacacccaggccgtggtgtttgtggtggacagcagccaccgggaccgcatcagcgaggcccacagcgagctggccaagctgctgacagagaaggagctgagagatgccctgctgctgatctttgccaacaagcaggatgtggccggggccctgtctgtggaggagatcacagagctgctgagcctgcacaagctgtgctgcggccgcagctgcttcagtgacaacatgtag

SEQ ID NO: 18578 - DNA, 609 bp, synthetic construct
  source 1..609: mol_type = other DNA; note = Synthetic coding sequence
atggctgtgcctgctgccctgatcctgcgggagagccccagcatgaagaaggctgtgtccctcatcaatgccatcgacaccggccgcttcccccggctgctgacccgcatcctgcagaagctgcacctgaaggccgagagcagcttcagcgaggaggaggaggagaagctgcaggccgccttcagcctggagaagcaggacctgcacctggtgctggagaccatctccttcatcctggagcaggccgtgtaccacaacgtgaagccagctgccctgcagcagcagctggagaacatccacctgcggcaggacaaggccgaggcctttgtgaacacctggagctccatgggccaggagaccgtggagaagttccggcagaggatcctggccccctgcaagctggagaccgtgggctggcagctgaacctgcagatggcccacagcgcccaggccaagctgaagagcccccaggccgtgctgcagctgggcgtgaacaatgaagacagcaagagcctggagaaggtgctggtggagttcagccacaaggagctgtttgacttctacaacaagctggagaccatccaggcccagctggacagcctgacctag

SEQ ID NO: 18579 - DNA, 1521 bp, synthetic construct
  source 1..1521: mol_type = other DNA; note = Synthetic coding sequence
atggaggccgacatcatcaccaacctgcgctgccgcctgaaggaggccgaggaggagcggctgaaggccgcccagtatggcctgcagctggtggagagccagaatgagctgcagaaccagctggacaagtgcagaaatgagatgatgaccatgacagagagctatgagcaggagaagtacaccctgcagcgggaggtggagctgaagagcaggatgctggagagcctgagctgtgaatgtgaggccatcaagcagcagcagaagatgcacctggagaagctggaggagcagctgagccgcagccacggccaggaggtgaatgagctgaagaccaagattgagaagctgaaggtggagctggatgaggcccggctgtctgagaagcagctgaagcaccaggtggaccaccagaaggagctgctgagctgcaagtctgaggagctgcgggtgatgtctgagcgggtgcaggagagcatgagcagcgagatgctggccctgcagatcgagctgacagagatggagagcatgaaggtgaagtaccagagcctgaagaagcagaatgtgttcaaccgggagcagatgcagaggatgaagctgcagatcgccaccctgctgcagatgaagggcagccagacagaatttgagcagcaggagcggctgctggccatgctggagcagaagaatggagagatcaagcacctgctgggggagatccggaacctggagaagttcaagaacctgtatgacagcatggagagcaagcccagcgtggacagcggcaccctggaggacaacacctactacacagacctgctgcagatgaagctggacaacctgaacaaggagattgagagcaccaagggggagctgagcatccagaggatgaaggccctgtttgagagccagagggccctggacattgaaaggaagctgtttgccaatgaacgctgcctgcagctgtctgagagcgagaacatgaagctgcgggccaagctggatgagctgaagctgaagtatgagcctgaggagaccgtggaggtgcctgtgctgaagaagagaagagaggtgctgcctgtggacatcaccacagccaaggatgcctgtgtgaacaacagcgccctgggcggggaggtgtaccgcctgcccccccagaaggaggagacccagagctgccccaacagcctggaggacaacaacctgcagctggagaagtctgtgtccatctacacccctgtggtgtccctgagcccccacaagaacctgcctgtggacatgcagctgaagaaggagaagaagtgtgtgaagctgattggagtgcctgcagatgctgaggccctgtctgagaggagcggcaacacccccaacagcccccggctggccgctgagagcaagctgcagacagaggtgaaggagggcaaggagaccagcagcaagctggagaaggagacctgcaagaagctgcaccccatcctgtatgtgagcagcaagagcaccccagagacccagtgcccccagcagtag

SEQ ID NO: 18580 - DNA, 1842 bp, synthetic construct
  source 1..1842: mol_type = other DNA; note = Synthetic coding sequence
atggccaccatcccagactggaagctgcagctgctggcccggcggcggcaggaggaggcctctgtgcggggccgggagaaggccgagcgggagcggctgagccagatgcctgcctggaagaggggcctgctggagaggagaagagccaagctgggcctgagccctggagagcccagccctgtgctgggcaccgtggaggccggccccccagaccctgatgaatctgctgtgctgctggaggccatcggccctgtgcaccagaaccgcttcatccggcaggagcggcagcagcagcagcagcagcagcagaggtctgaggagctgctggccgagaggaagccaggccccctggaggcccgggagcggcggcccagccctggagagatgagggaccagagccccaagggccgggagagccgggaggagcggctgagcccccgggagacccgggagcggcggctgggcatcggcggggcccaggagctgagcctgcggcccctggaggcccgggactggaggcagagccctggagaggtgggggacaggagcagccggctgtctgaggcctggaagtggaggctgagccctggagagaccccagagaggagcctgcggctggccgagagccgggagcagagccccaggaggaaggaggtggagagccggctgagccctggagagagcgcctaccagaagctgggcctgacagaggcccacaagtggaggccagacagccgggagagccaggagcagagcctggtgcagctggaggccacagagtggaggctgcggtctggagaggagcggcaggactacagtgaagaatgtggcaggaaggaggagtggcctgtgcctggggtggcccccaaggagacagctgagctgtctgagaccctgacccgggaggcccagggcaacagcagcgctggggtggaggccgctgagcagaggcctgtggaggatggagagcggggcatgaagcccacagagggctggaagtggaccctgaacagcggcaaggcccgggagtggaccccccgggacatcgaggcccagacccagaagccagagcccccagagagcgctgagaagctgctggagagccctggggtggaggccggggagggggaggccgagaaggaggaggccggggcccagggccggcccctgcgggccctgcagaactgctgcagcgtgcccagccccctgcccccagaagatgctggcaccggcggcctgcggcagcaggaggaggaggccgtggagctgcagcccccacctccagcccccctgagccccccacctccagcccccacagccccccagcccccaggggaccccctgatgagccgcctcttctacggcgtgaaggccggccctggggtgggcgccccccggcgcagcggccacaccttcaccgtgaaccccaggagatctgtgcccccagccaccccagccacccccaccagccctgccaccgtggatgctgctgtgcctggagctgggaagaagcgctaccccacagctgaggagatcctggtgctgggcggctacctgcggctgagccgcagctgcctggccaagggcagccctgagcggcaccacaagcagctgaagatctccttcagcgagacagccctggagaccacctaccagtaccccagcgagagctctgtgctggaggagctgggccctgagcctgaggtgcccagcgcccccaaccccccagctgcccagccagatgatgaggaggatgaggaggagctgctgctgctgcagcctgagctgcagggcggcctgcggaccaaggccctgattgtggatgagagctgcagaagatag

SEQ ID NO: 18581 - DNA, 654 bp, synthetic construct
  source 1..654: mol_type = other DNA; note = Synthetic coding sequence
atgtcctggacctgcccccgctgccagcagcctgtgttctttgctgagaaggtgagcagcctgggcaagaactggcaccgcttctgcctgaagtgtgagcgctgccacagcatcctgagccctgggggccatgctgagcacaacggccggccctactgccacaagccctgctacggggccctgtttggcccccggggcgtgaacattggaggagtgggcagctacctgtacaacccccccacccccagccctggctgcaccacccccctgagccccagcagcttcagccccccccggcccaggacaggcctgccccagggcaagaagagccccccccacatgaagaccttcaccggggagaccagcctgtgccccggctgtggggagcctgtgtactttgctgagaaggtgatgagcctgggcaggaactggcaccggccctgcctgcgctgccagcgctgccacaagaccctgacagctggcagccacgccgagcatgatggagtgccctactgccacgtgccctgctacggctacctgtttggccccaagggcggccagccccaccccaggcactgggatggcatgtacatgcctgaggtgtggcacgtgcacggcctgtgggtgtgtgtggacaacttcccctgtggctag

SEQ ID NO: 18582 - DNA, 1503 bp, synthetic construct
  source 1..1503: mol_type = other DNA; note = Synthetic coding sequence
atgaaccagaggagaagtgagagccggcccggcaaccaccggctgcaggcctatgcagagcctggaaaaggagacagcggcggggccggccccctgagcggcagcgcccggcggggccggggcggcggcggggccatccgggtgagaagaccctgctggagcggcggggccggccggggcggcggccctgcctgggccgtgcggctgcccaccgtgacagctggctggacctggccagccctgcggaccctgagcagcctgcgggccggccccagcgagccccacagccctggaagaagaccaccccgggccggccggcccctgtgccaggccgacccccagcccgggaaggccgcccggcgcagcctggagccagaccctgcccagacaggccccaggcctgcccgggccgccggcatgtctgaggccaggaaaggaccagatgaggccgaggagagccagtatgattctggaattgagagcctgcggagcctgcggagcctgcctgagagcaccagcgccccagccagcggccccagtgatggcagcccccagccctgcacccaccccccaggccctgtgaaggagccccaggagaaggaggatgctgatggagagagagctgacagcacctacggcagcagcagcctgacctacaccctgagcctgctgggcggccctgaggccgaggaccctgccccccggctgcccctgccccacgtgggcgccctgagcccccagcagctggaggccctgacctacatcagtgaagatggagacaccctggtgcacctggccgtcatccacgaggccccagctgtgctgctgtgctgcctggccctgctgccccaggaggtgctggacatccagaacaacctgtaccagacagccctgcacctggccgtgcacctggaccagcctggagctgtgcgggccctggtgctgaagggggccagccgggccctgcaggacagacatggagacacagccctgcacgtggcctgccagaggcagcacctggcctgtgcccgctgcctgctggagggccggcctgagcccggccggggcaccagccacagcctggacctgcagctgcagaactggcagggcctggcctgcctgcacatcgccaccctgcagaagaaccagcccctgatggagctgctgctgagaaatggagctgacattgatgtgcaggagggcaccagcggcaagacagccctgcacctggccgtggagacccaggagcggggcctggtgcagttcctgctgcaggccggggcccaggtggatgccaggatgctgaatggctgcacccccctgcacctggccgccggccggggcctgatgggcatcagcagcaccctgtgcaaggccggggctgacagcctgctgagaaatgtggaggatgagaccccccaggacctgacagaggagagcctggtgctgctgccctttgatgacctgaagatcagcggcaagctgctgctgtgcacagactag

SEQ ID NO: 18583 - DNA, 1881 bp, synthetic construct
  source 1..1881: mol_type = other DNA; note = Synthetic coding sequence
atggagggcccccgggagaaccaggaccccccacccaggagcctggcccggcacctgagtgatgctgaccggctgaggaaggtgatccaggagctggtggacacagagaagagctatgtgaaggacctgagctgcctgtttgagctgtacctggagcccctgcagaatgagaccttcctgacccaggatgagatggagagcctgtttggcagcctgcctgagatgctggagttccagaaggtgttcctggagaccctggaggatggcatcagcgccagcagtgacttcaacaccctggagacccccagccagttcaggaagctgctcttcagcctgggcggcagcttcctgtactatgctgaccacttcaagctgtacagcggcttctgtgccaaccacatcaaggtgcagaaggtgctggagcgggccaagacagacaaggccttcaaggccttcctggatgccaggaaccccaccaagcagcacagcagcaccctggagagctacctgatcaagcctgtgcagagggtgctgaagtaccccctgctgctgaaggagctggtgtccctgacagaccaggagagcgaggagcactaccacctgacagaggccctgaaggccatggagaaggtggccagccacatcaatgagatgcagaagatctatgaagattatggaacagtgtttgaccagctggtggccgagcagagcggcacagagaaggaggtgacagagctgtccatgggagagctgctgatgcacagcacagtgtcctggctgaaccccttcctgagcctgggcaaggccaggaaggacctggagctgactgtgtttgtgttcaagagagctgtgatcctggtgtacaaggagaactgcaagctgaagaagaagctgcccagcaacagcaggcctgcccacaacagcacagacctggaccccttcaagttccgctggctgatccccatcagcgccctgcaggtgcggctgggcaacccagctggaacagagaacaacagcatctgggagctgatccacaccaagtcagaaattgagggccggcctgagaccatcttccagctgtgctgcagcgacagcgagagcaagaccaacatcgtgaaggtgatccgcagcatcctgcgggagaacttccgccgccacatcaagtgtgagctgcccctggagaagacctgcaaggaccggctggtgcccctgaagaacagagtgcctgtgtctgccaagctggccagcagccgcagcctgaaggtgctgaagaacagcagcagcaatgagtggacaggagaaacaggcaagggcaccctgctggacagtgatgagggcagcctgagcagcggcacccagagcagcggctgccccacagctgagggccggcaggacagcaagagcaccagccctgggaagtacccccaccctggcctggccgactttgctgacaacctgatcaaggagagtgacatcctgagtgatgaagatgatgaccaccggcagacagtgaagcagggcagccccaccaaggacatcgagatccagttccagaggctgcgcatcagcgaggaccctgatgtgcaccctgaggccgagcagcagcccggccctgagagcggggagggccagaagggcggggagcagcccaagctggtgcggggccacttctgccccatcaagaggaaggccaacagcaccaagagggaccggggcaccctgctgaaggcccagatccgccaccagagcctggacagccagagtgaaaatgccaccatcgacctgaacagcgtgctggagcgggagttctctgtgcagagcctgacctctgtggtgtctgaggagtgcttctatgaaacagagagccacggcaagagctag

SEQ ID NO: 18584 - DNA, 1596 bp, synthetic construct
  source 1..1596: mol_type = other DNA; note = Synthetic coding sequence
atggctgctgtgaagaccctgaaccccaaggccgaggtggcccgggcccaggccgccctggccgtgaacatctctgctgcccggggcctgcaggatgtgctgcggaccaacctgggccccaagggcaccatgaagatgctggtgtctggagctggggacatcaagctgaccaaggatggaaatgtgctgctgcacgagatgcagatccagcaccccacagccagcctgattgccaaggtggccacagcccaggatgacatcactggagatggcaccaccagcaatgtgctgatcattggagagctgctgaagcaggccgacctgtacatcagcgagggcctgcacccccgcatcatcacagagggctttgaagctgccaaggagaaggccctgcagttcctggaggaggtgaaggtgtcccgggagatggaccgggagaccctgattgatgtggcccggaccagcctgcggaccaaggtgcacgccgagctggctgatgtgctgacagaagctgtggtggacagcatcctggccatcaagaagcaggatgagcccatcgacctcttcatgattgagatcatggagatgaagcacaagtcagaaacagacaccagcctcatccggggcctggtgctggaccacggggcccggcacccagacatgaagaagagggtggaggatgcctacatcctgacctgcaatgtgtccctggagtatgagaagacagaggtgaacagcggcttcttctacaagtctgctgaggagcgggagaagctggtgaaggccgagaggaagttcatcgaggacagagtgaagaagatcatcgagctgaagaggaaggtgtgtggggacagcgacaagggctttgtggtgatcaaccagaagggcatcgaccccttcagcctggatgccctgagcaaggagggcatcgtggccctgcggcgggccaagagaagaaacatggagcggctgaccctggcctgtggcggcgtggccctgaacagctttgatgacctgagcccagactgcctgggccatgctggcctggtgtatgagtacaccctgggggaggagaagttcaccttcatcgagaagtgcaacaaccccaggtctgtgaccctgctgatcaagggccccaacaagcacaccctgacccagatcaaggatgctgtgagagatggcctgcgggctgtgaagaatgccattgatgatggctgtgtggtgcctggagctggagctgtggaggtggccatggccgaggccctgatcaagcacaagcccagcgtgaagggccgggcccagctgggcgtgcaggcctttgctgatgccctgctgatcatccccaaggtgctggcccagaacagcggctttgacctgcaggagaccctggtgaagatccaggccgagcacagcgagagcggccagctggtgggcgtggacctgaacacaggagagcccatggtggccgctgaggtgggcgtgtgggacaactactgtgtgaagaagcagctgctgcacagctgcaccgtgattgccaccaacatcctgctggtggatgagatcatgagagctggcatgagcagcctgaagggctag

SEQ ID NO: 18585 - DNA, 666 bp, synthetic construct
  source 1..666: mol_type = other DNA; note = Synthetic coding sequence
atgtctgccttcggccatgatgaggcctggatggaggccggcggcttcggcctggaggccgctgagaggacagagtaccagagcctgtgcaagagcaagctgctcttcctgggggagcagagcggcaagaccagcatcatcagccgcttcatgtacaacagctttggctgtgcctgccaggccaccgtgggcatcgacttcctgagcaagaccatgtacctggaggaccagatcgtgcagctgcagctgtgggacacagctggccaggagcgcttccacagcctcatccccagctacatccgggacagcaccatcgctgtggtggtgtatgacatcaccaacatcaacagcttcaaggagacagacaagtgggtggagcacgtgcgggcagagagaggagatgatgtggtgatcatgctgctgggcaacaagattgacctggacaacaagaggcaggtgacagctgagcagggcgaggagaagagcaggaacctgaatgtgatgttcatcgagaccagcgccaagacaggctacaacgtgaagaagctgttcagaagagtggccagcgccctgctgagcaccaggaccagccccccacccaaggagggcaccgtggagattgagctggagagctttgaggagagcggcaacagaagctactgctag

SEQ ID NO: 18586 - DNA, 6222 bp, synthetic construct
  source 1..6222: mol_type = other DNA; note = Synthetic coding sequence
atggccgaggtgaggaagttcaccaagaggctgagcaagccaggcacagctgctgagctgcggcagagcgtgtctgaggccgtgcggggctctgtggtgctggagaaggccaaggtggtggagcccctggactatgaaaatgtgattgcccagaggaagacccagatctacagcgaccccctgcgggacctgctgatgttccccatggaggacatcagcatctctgtgattggccggcagaggagaacagtgcagagcacagtgcctgaagatgctgagaagagggcccagagcctgtttgtgaaggagtgcatcaagacctacagcacagactggcacgtggtgaactacaagtatgaggacttcagcggggacttcaggatgctgccctgcaagagcctgcggcctgagaagatccccaaccacgtgtttgaaattgatgaggactgtgagaaggatgaggacagcagcagcctgtgcagccagaagggcggcgtcatcaagcagggctggctgcacaaggccaacgtgaacagcaccatcaccgtgaccatgaaggtgttcaagaggcgctacttctacctgacccagctgcctgatggcagctacatcctgaacagctacaaggatgagaagaacagcaaggagagcaagggctgcatctacctggatgcctgcattgatgtggtgcagtgccccaagatgagaagacatgcctttgagctgaagatgctggacaagtacagccactacctggccgctgagacagagcaggagatggaggagtggctgatcaccctgaagaagatcatccagatcaacacagacagcctggtgcaggagaagaaggagaccgtggagacagcccaggatgatgagaccagcagccagggcaaggccgagaacatcatggccagcctggagaggtccatgcaccctgagctgatgaagtatggccgggagacagagcagctgaacaagctgagcagaggagatggccggcagaacctcttctcctttgacagcgaggtgcagaggctggacttcagcggcatcgagccagacatcaagccctttgaggagaagtgcaacaagcgcttcctggtgaactgccacgacctgaccttcaacatcctgggccagatcggggacaatgccaagggcccccccaccaacgtggagcccttcttcatcaacctggccctgtttgatgtgaagaacaactgcaagatctctgctgacttccacgtggacctgaaccccccatctgtgcgggagatgctgtggggcagcagcacccagctggccagtgatggcagccccaagggcagcagccctgagagctacatccatggaattgctgagagccagctgcgctacatccagcagggcatcttctctgtgaccaacccccaccctgagatcttcctggtggccagaattgagaaggtgctgcagggcaacatcacccactgtgccgagccctacatcaagaacagcgaccctgtgaagacagcccagaaggtgcacaggacagccaagcaggtgtgcagccggctgggccagtacaggatgccctttgcctgggccgcccggcccatcttcaaggacacccagggcagcctggacctggatggccgcttcagccccctgtacaagcaggacagcagcaagctgagcagcgaggacatcctgaagctgctgtctgagtacaagaagccagagaagaccaagctgcagatcatccctggccagctgaacatcaccgtggagtgtgtgcctgtggacctgagcaactgcatcaccagcagctatgtgcccctgaagccctttgagaagaactgccagaacatcaccgtggaggtggaggagtttgtgcctgagatgaccaagtactgctaccccttcaccatctacaagaaccacctgtatgtgtaccccctgcagctgaagtatgacagccagaagacctttgccaaggccaggaacattgctgtgtgtgtggagttccgggacagtgatgaaagtgatgccagcgccctgaagtgcatctacggcaagccagctggctctgtgttcaccaccaatgcctatgctgtggtgagccaccacaaccagaaccctgagttctatgatgagatcaagattgagctgcccatccacctgcaccagaagcaccacctgctcttcaccttctaccacgtgtcctgtgagatcaacaccaagggcaccaccaagaagcaggacacagtggagacccctgtgggctttgcctgggtgcccctgctgaaggatggccgcatcatcacctttgagcagcagctgcctgtgtctgccaacctgcccccaggctacctgaacctgaatgatgctgagagccggcggcagtgcaatgtggacatcaagtgggtggatggagccaagcccctgctgaagatcaagagccacctggagagcaccatctacacccaggacctgcacgtgcacaagttcttccaccactgccagctgatccagagcggcagcaaggaggtgcctggagagctgatcaagtacctgaagtgcctgcacgccatggagatccaggtgatgatccagttcctgcctgtgatcctgatgcagctgttccgggtgctgaccaacatgacccatgaagatgatgtgcccatcaactgcaccatggtgctgctgcacatcgtgtccaagtgccacgaggagggcctggacagctacctgcggagcttcatcaagtacagcttccggcctgagaagcccagcgccccccaggcccagctgatccacgagaccctggccaccaccatgattgccatcctgaagcagagcgctgacttcctgagcatcaacaagctgctgaagtacagctggttcttctttgagatcatcgccaagtccatggccacctacctgctggaggagaacaagatcaagctgccccggggccagcgcttccctgagacctaccaccacgtgctgcacagcctgctgctggccatcatcccccacgtgaccatccgctatgcagagatcccagatgagagcagaaatgtgaactacagcctggccagcttcctgaagcgctgcctgaccctgatggaccggggcttcatcttcaacctgatcaatgactacatcagcggcttcagccccaaggaccccaaggtgctggccgagtacaagtttgagttcctgcagaccatctgcaaccacgagcactacatccccctgaacctgcccatggcctttgccaagcccaagctgcagagggtgcaggacagcaacctggagtacagcctgagtgatgagtactgcaagcaccacttcctggtgggcctgctgctgcgggagaccagcatcgccctgcaggacaactatgagatccgctacacagccatcagcgtcatcaagaacctgctgatcaagcacgcctttgacacccgctaccagcacaagaaccagcaggccaagatcgcccagctgtacctgccctttgtgggcctgctgctggagaacatccagaggctggccggccgggacaccctgtacagctgtgccgccatgcccaacagcgccagcagagatgagttcccctgtggcttcaccagccctgccaacagaggcagcctgagcacagacaaggacacagcctacggcagcttccagaatggccacggcatcaagcgggaggacagccggggcagcctcatccctgagggcgccaccggcttcccagaccagggcaacacaggagagaacacccggcagagcagcaccaggagctctgtgtcccagtacaaccggctggaccagtatgagatccgcagcctgctgatgtgctacctgtacatcgtgaagatgatcagcgaggacaccctgctgacctactggaacaaggtgagcccccaggagctgatcaacatcctgatcctgctggaggtgtgcctcttccacttccgctacatgggcaagaggaacatcgcccgggtgcatgatgcctggctgagcaagcacttcggcatcgacaggaagagccagaccatgcctgccctgaggaacagaagtggagtgatgcaggcccggctgcagcacctgagcagcctggagagcagcttcaccctgaaccacagcagcaccaccacagaggccgacatcttccaccaggccctgctggagggcaacacagccacagaggtgtccctgactgtgctggacaccatctccttcttcacccagtgcttcaagacccagctgctgaacaatgatggccacaaccccctgatgaagaaggtgtttgacatccacctggccttcctgaagaatggccagagcgaggtgtccctgaagcacgtgtttgccagcctgcgggccttcatcagcaagttccccagcgccttcttcaagggccgggtgaacatgtgtgccgccttctgctatgaggtgctgaagtgctgcaccagcaagatcagcagcaccagaaatgaggccagcgccctgctgtacctgctgatgaggaacaactttgagtacaccaagaggaagaccttcctgcggacccacctgcagatcatcatcgctgtgtcccagctgattgctgatgtggccctgagcggcggcagccgcttccaggagagcctcttcatcatcaacaactttgccaacagcgaccggcccatgaaggccacagccttccctgctgaggtgaaggacctgaccaagaggatcagaacagtgctgatggccacagcccagatgaaggagcacgagaaggaccctgagatgctgattgacctgcagtacagcctggccaagagctatgccagcaccccagagctgaggaagacctggctggacagcatggccaagatccacgtgaagaatggagacttcagcgaggccgccatgtgctacgtgcacgtggccgccctggtggccgagttcctgcacaggaagaagctgttccccaacggctgcagcgccttcaagaagatcacccccaacattgatgaggagggcgccatgaaggaggatgctggcatgatggatgtgcactacagcgaggaggtgctgctggagctgctggagcagtgtgtggatggcctgtggaaggccgagagatatgagatcatcagcgagatcagcaagctgattgtgcccatctatgagaagagaagagaatttgagaagctgacccaggtgtaccgcaccctgcatggagcctacaccaagatcctggaggtgatgcacaccaagaagaggctgctgggcaccttcttccgggtggccttctacggccagagcttctttgaggaggaggatggcaaggagtacatctacaaggagcccaagctgaccggcctgtctgagatcagcctgcggctggtgaagctgtatggagagaagtttggaacagaaaatgtgaagatcatccaggacagcgacaaggtgaatgccaaggagctggaccccaagtatgcccacatccaggtgacctacgtgaagccctactttgatgacaaggagctgacagagaggaagacagaatttgagaggaaccacaacatcagcagatttgtgtttgaggccccctacaccctgagcggcaagaagcagggctgcatcgaggagcagtgcaagaggaggaccatcctgaccaccagcaacagcttcccctacgtgaagaagaggatccccatcaactgtgagcagcagatcaacctgaagcccattgatgtggccacagatgagatcaaggacaagacagctgagctgcagaagctgtgcagcagcacagatgtggacatgatccagctgcagctgaagctgcagggctgtgtgtctgtgcaggtgaatgccggccccctggcctatgcccgggccttcctgaatgacagccaggccagcaagtacccacccaagaaggtgtctgagctgaaggacatgttcaggaagttcatccaggcctgcagcatcgccctggagctgaatgaaagactcatcaaggaggaccaggtggagtaccacgagggcctgaagagcaacttccgggacatggtgaaggagctgagtgacatcatccacgagcagatcctgcaggaggacaccatgcacagcccctggatgagcaacaccctgcacgtgttctgtgccatcagcggcaccagcagtgaccggggctacggcagccccaggtatgcagaggtgtag

SEQ ID NO: 18587 - DNA, 1644 bp, synthetic construct
  source 1..1644: mol_type = other DNA; note = Synthetic coding sequence
atgggcggctgcatccccttcctgaaggccgcccgggccctgtgcccccgcatcatgccacccctgctgctgctgagcgccttcatcttcctggtgtctgtgctgggcggggcccctggccacaacccagacaggaggaccaagatggtgtccatccacagcctgtctgagctggagcggctgaagctgcaggagacagcctaccacgagctggtggcccggcacttcctgtctgagttcaagccagaccgggccctgcccatcgaccggcccaacaccctggacaagtggttcctgatcctgcggggccagcagagagctgtgagccacaagaccttcggcatcagcctggaggaggtgctggtgaatgagttcaccaggaggaagcacctggagctgacagccaccatgcaggtggaggaggccaccggccaggccgccggcagaagaagaggaaatgtggtgcggcgggtgtttggccgcatccgccgcttcttcagcagaagaagaaatgagcccaccctgccccgggagttcacccggcggggcagaagaggagctgtgtctgtggacagcctggccgagctggaggatggagccctgctgctgcagaccctgcagctgagcaagatctccttccccatcggccagaggctgctgggcagcaagaggaagatgagcctgaaccccatcgccaagcagatcccccaggtggtggaggcctgctgccagttcatcgagaagcacggcctgtctgctgtgggcatcttcaccctggagtacagcgtgcagagggtgcggcagctgcgggaggagtttgaccagggcctggatgtggtgctggatgacaaccagaatgtgcatgatgtggccgccctgctgaaggagttcttccgggacatgaaggacagcctgctgcctgatgacctgtacatgtccttcctgctgacagccaccctgaagccccaggaccagctgagcgccctgcagctgctggtgtacctgatgccaccctgccacagcgacaccctggagcggctgctgaaggccctgcacaagatcacagagaactgtgaagattccatcggcattgatggccagctggtgcccggcaacaggatgaccagcaccaacctggccctggtgtttggaagtgccctgctgaagaagggcaagtttgggaagcgggagagcaggaagaccaagctgggcatcgaccactacgtggcctctgtgaatgtggtgcgggccatgattgacaactgggatgtgctcttccaggtgcccccccacatccagaggcaggtggccaagagggtgtggaagagcagccctgaggccctggacttcatcagaagaagaaacctgaggaagatccagagcgcccgcatcaagatggaggaggatgccctgctgagtgaccctgtggagaccagcgctgaggcccgggctgctgtgctggcccagagcaagcccagtgatgagggcagcagcgaggagcctgctgtgcccagcggcacagcccggagccatgatgatgaggagggcgccggcaacccccccatccctgagcaggaccggcccctgctgcgggtgccccgggagaaggaggccaagacaggagtgtcctacttcttcccctag

SEQ ID NO: 18588 - DNA, 5613 bp, synthetic construct
  source 1..5613: mol_type = other DNA; note = Synthetic coding sequence
atggcccgctggatccccaccaagaggcagaagtatggagtggccatctacaactacaatgccagccaggatgtggagctgagcctgcagattggagacacagtgcacatcctggagatgtatgagggctggtaccggggctacaccctgcagaacaagagcaagaagggcatcttccctgagacctacatccacctgaaggaggccaccgtggaggacctgggccagcatgaaacagtcatccctggagagctgcccctggtgcaggagctgaccagcaccctgcgggagtgggccgtcatctggaggaagctgtatgtgaacaacaagctgaccctcttccggcagctgcagcagatgacctacagcctgattgagtggaggagccagatcctgagcggcaccctgcccaaggatgagctggccgagctgaagaagaaggtgacagccaagattgaccacggcaacaggatgctgggcctggacctggtggtgagagatgacaatggaaacatcctggaccctgatgagaccagcaccatcgccctcttcaaggcccacgaggtggccagcaagagaattgaggagaagatccaggaggagaagagcatcctgcagaacctggacctgcggggccagagcatcttcagcaccatccacacctacggcctgtatgtgaacttcaagaactttgtgtgcaacattggagaagatgctgagctgttcatggccctgtatgaccctgaccagagcaccttcatcagcgagaactacctgatccgctggggcagcaatggcatgcccaaggagattgagaagctgaacaacctgcaggccgtgttcacagacctgagctccatggacctgatccggccccgggtgtccctggtgtgccagatcgtgcgggtgggccacatggagctgaaggagggcaagaagcacacctgtggcctgcggcggcccttcggcgtggccgtgatggacatcacagacatcatccacggcaaggtggatgatgaggagaagcagcacttcatccccttccagcagatcgccatggagacctacatccggcagaggcagctgatcatgagccccctcatcaccagccacgtgattggagaaaatgagcccctgacctctgtgctgaacaaggtgattgctgccaaggaggtgaaccacaagggccagggcctgtgggtgtccctgaagctgctgcccggggacctgacccaggtgcagaagaacttcagccacctggtggacaggagcacagccatcgccaggaagatgggcttccctgagatcatcctgcctggagatgtgagaaatgacatctacgtgaccctcatccacggggagtttgataaaggcaagaagaagacccccaagaatgtggaggtgaccatgtctgtgcatgatgaggagggcaagctgctggagaaggccatccaccctggggccggctatgagggcatcagcgagtacaagtctgtggtgtactaccaggtgaagcagccctgctggtatgagaccgtgaaggtgtccatcgccatcgaggaggtgacccgctgccacatccgcttcaccttccgccacaggagcagccaggagacccgggacaagtctgagcgggcctttggagtggcctttgtgaagctgatgaacccagatggcaccaccctgcaggacggcagacatgacctggtggtgtacaagggggacaacaagaagatggaggatgccaagttctacctgaccctgcccggcaccaagatggagatggaggagaaggagctgcaggccagcaagaacctggtgaccttcacccccagcaaggacagcaccaaggacagcttccagatcgccaccctcatctgcagcaccaagctgacccagaatgtggacctgctgggcctgctgaactggaggagcaacagccagaacatcaagcacaacctgaagaagctgatggaggtggatggaggagaaattgtgaagttcctgcaggacaccctggatgccctcttcaacatcatgatggagatgtctgacagcgagacctatgacttcctggtgtttgatgccctggtgttcatcatcagcctcatcggggacatcaagttccagcacttcaaccctgtgctggagacctacatctacaagcacttcagcgccaccctggcctacgtgaagctgagcaaggtgctgaacttctacgtggccaatgctgatgacagcagcaagacagagctgctgtttgctgccctgaaggccctgaagtacctgttccgcttcatcatccagagccgggtgctgtacctgcgcttctacggccagagcaaggatggagatgagttcaacaacagcatccggcagctgttcctggccttcaacatgctgatggaccggcccctggaggaggccgtgaagatcaagggagctgccctgaagtacctgcccagcatcatcaatgatgtgaagctggtgtttgatcctgtggagctgtctgtgctcttctgcaagttcatccagagcatcccagacaaccagctggtgcggcagaagctgaactgcatgaccaagatcgtggagagcaccctcttccggcagagtgaatgtcgggaggtgctgctgcccctgctgacagaccagctgagcggccagctggatgacaacagcaacaagccagaccacgaggccagcagccagctgctgagcaacatcctggaggtgctggacaggaaggatgtgggcgccacagctgtgcacatccagctgatcatggagcggctgctgcggcgcatcaacagaacagtgattggcatgaaccggcagagcccccacatcggcagctttgtggcctgcatgattgccctgctgcagcagatggatgacagccactacagccactacatcagcaccttcaagacccggcaggacatcatcgacttcctgatggagaccttcatcatgttcaaggacctgattggcaagaatgtgtatgccaaggactggatggtgatgaacatgacccagaacagagtcttcctgcgggccatcaaccagtttgctgaggtgctgacccgcttcttcatggaccaggccagctttgagctgcagctgtggaacaactacttccacctggccgtggccttcctgacccatgagagcctgcagctggagaccttcagccaggccaagaggaacaagatcgtgaagaagtacggggacatgaggaaggagatcggcttccgcatccgggacatgtggtacaacctgggcccccacaagatcaagttcatccccagcatggtgggccccatcctggaggtgaccctgaccccagaggtggagctgaggaaggccaccatccccatcttctttgacatgatgcagtgtgagttcaacttctctggaaatggaaacttccacatgtttgaaaatgaactcatcaccaagctggaccaggaggtggagggcggcagaggagatgagcagtacaaggtgctgctggagaagctgctgctggagcactgcaggaagcacaagtacctgagcagcagtggagaggtgtttgccctgctggtgagcagcctgctggagaacctgctggactaccgcaccatcatcatgcaggatgagagcaaggagaacaggatgagctgcaccgtgaatgtgctgaacttctacaaggagaagaagcgggaggacatctacatccgctacctgtacaagctgcgggacctgcaccgggactgtgagaactacacagaggccgcctacaccctgctgctgcacgccgagctgctgcagtggagcgacaagccctgtgtgccccacctgctgcagaaggacagctactacgtgtacacccagcaggagctgaaggagaagctgtaccaggagatcatctcctactttgacaagggcaagatgtgggagaaggccatcaagctgagcaaggagctggccgagacctatgagagcaaggtgtttgattatgagggcctgggcaacctgctgaagaagagggccagcttctatgagaacatcatcaaggccatgaggccccagcctgagtactttgctgtgggctactacggccagggcttccccagcttcctgaggaacaagatcttcatctaccggggcaaggagtatgaaagaagagaggacttcagcctgcggctgctgacccagttccccaatgctgagaagatgaccagcaccaccccacctggagaggacatcaagagcagccccaagcagtacatgcagtgcttcaccgtgaagcctgtgatgagcctgccccccagctacaaggacaagcctgtgcctgagcagatcctgaactactaccgggccaatgaggtgcagcagttccgctacagccggcccttcaggaagggggagaaggaccctgacaatgaatttgccaccatgtggattgaaagaaccacctacaccacagcctacaccttccctggcatcctgaagtggtttgaggtgaagcagatcagcacagaggagatcagccccctggagaatgccatcgagaccatggagctgaccaatgaaagaatcagcaactgtgtgcagcagcacgcctgggacaggagcctgtctgtgcaccccctgtccatgctgctgagcggcatcgtggaccctgctgtgatgggcggcttcagcaactatgagaaggccttcttcacagagaagtacctgcaggagcaccctgaggaccaggagaaggtggagctgctgaagaggctgattgccctgcagatgcccctgctgacagagggcatccgcatccatggagagaagctgacagagcagctgaagcccctgcacgagcggctgagcagctgcttccgggagctgaaggagaaggtggagaagcactatggagtcatcaccctgccccccaacctgacagagaggaagcagagcaggacaggcagcatcgtgctgccctacatcatgagcagcaccctgcggcggctgagcatcacctctgtgaccagctctgtggtgtccaccagcagcaacagcagtgacaatgcccccagccggcccggcagtgatggcagcatcctggagcccctgctggagcggcgggccagcagcggggcccgggtggaggacctgagcctgcgggaggagaacagcgagaaccgcatcagcaagttcaagaggaaggactggagcctgagcaagagccaggtgattgctgagaaggcccctgagccagacctgatgagccccaccaggaaggcccagaggcccaagagcctgcagctgatggacaaccggctgagccccttccacggcagcagccccccccagagcacccccctgagccccccacccctgacccccaaggccaccaggaccctgagcagccccagcctgcagacagatggcattgctgccacccctgtgcccccacctcctccacccaagagcaagccctatgagggcagccagaggaacagcacagagctggccccacccctgcctgtgcggcgggaggccaaggcccctcctcctcctccacccaaggccaggaagagcggcatccccaccagcgagcccggcagccagtag

SEQ ID NO: 18589 - DNA, 1623 bp, synthetic construct
  source 1..1623: mol_type = other DNA; note = Synthetic coding sequence
atgtctgccagcctgaactacaagagcttcagcaaggagcagcagaccatggacaacctggagaagcagctgatctgccccatctgcctggagatgttcaccaagcctgtggtgatcctgccctgccagcacaacctgtgcaggaaatgtgccagtgacatcttccaggccagcaacccctacctgcccacccggggcggcaccaccatggccagcggcggccgcttccgctgccccagctgcagacatgaggtggtgctggacagacatggagtgtatggcctgcagaggaacctgctggtggagaacatcatcgacatctacaagcaggagagcaccaggcctgagaagaagagtgaccagcccatgtgtgaggagcacgaggaggagcgcatcaacatctactgcctgaactgtgaggtgcccacctgcagcctgtgcaaggtgtttggagcccacaaggactgccaggtggcccccctgacccacgtgttccagaggcagaagtctgagctgagtgatggcatcgccatcctggtgggcagcaatgacagagtgcagggcgtcatcagccagctggaggacacctgcaagaccatcgaggagtgctgcaggaagcagaagcaggagctgtgtgagaagtttgactacctgtatggcatcctggaggagaggaagaatgagatgacccaggtgatcaccaggacccaggaggagaagctggagcacgtgcgggccctgatcaagaagtacagcgaccacctggagaatgtgtccaagctggtggagagcggcatccagttcatggatgagcctgagatggctgtgttcctgcagaatgccaagaccctgctgaagaagatcagcgaggccagcaaggccttccagatggagaagattgagcacggctatgagaacatgaaccacttcaccgtgaacctgaaccgggaggagaagatcatccgggagattgacttctacagagaagatgaagatgaggaggaggaggagggcggggagggggagaaggagggggagggggaggtgggcggggaggccgtggaggtggaggaggtggagaatgtgcagacagagttccctggagaagatgaaaatcctgagaaggccagcgagctgagccaggtggagctgcaggccgcccctggggccctgcctgtgagcagccctgagcccccaccagccctgcccccagctgctgatgcccctgtgacccagggcgaggtggtgcccaccggcagcgagcagaccacagagagcgagacccctgtgcctgctgctgctgagacagctgaccccctcttctaccccagctggtacaagggccagaccaggaaggccaccaccaaccccccctgcaccccaggcagcgagggcctgggccagatcggccccccaggcagcgaggacagcaatgtgaggaaggccgaggtggccgctgctgctgccagcgagagagctgctgtgtctgggaaggagaccagcgccccagctgccaccagccaggagctggtgatctgcctggccctgctggccttcctgatcctgcactacatctggagccagatccagtgcctgatcttcaccctgatggactggatctag

SEQ ID NO: 18590 - DNA, 3252 bp, synthetic construct
  source 1..3252: mol_type = other DNA; note = Synthetic coding sequence
atgagccagacccaggactatgagtgccgcagccacaacgtggacctgcctgagagccgcatccctggcagcaacacccggctggagtgggtggagatcatcgagcccaggacccgggagaggatgtatgccaacctggtgactggagaatgtgtgtgggaccccccagctggggtgcgcatcaagaggaccagcgagaaccagtggtgggagctgtttgaccccaacaccagccgcttctactactacaatgccagcacccagaggacagtgtggcaccggccccagggctgtgacatcatccccctggccaagctgcagaccctgaagcagaacacagagagcccccgggccagcgctgagagcagccctggccggggcagctctgtgtcccgggagggcagcaccagcagcagcctggagcctgagccagacacagagaaggcccaggagctgcctgcccgggccggccggcctgctgccttcggcaccgtgaaggaggacagcggcagcagcagccccccaggagtcttcctggagaaggactatgagatctacagagactacagcgcagatggccagctgctgcactaccgcaccagcagcctgcgctggaacagcggggccaaggagaggatgctgatcaaggtggccgaccgggagcccagcttcctggccgcccagggcaatggctacgccccagatggccccccaggagtgcgcagcagaagacccagcggcagccagcacagccccagcctgcagacctttgcccctgaggctgatggcaccatcttcttccctgagcggcggcccagccccttcctgaagagagctgagctgcccggcagcagcagccccctgctggcccagcccaggaagcccagcggggacagccagcccagcagccccaggtatggctatgagccccccctgtatgaggagccccctgtggagtaccaggcccccatctatgatgagccccccatggatgtgcagtttgaggccggcggcggctaccaggccggcagcccccagaggagccctggcaggaagccccggcccttcctgcagcccaacaagcagggcccccccagcccctgccagcagctggtgctgaccaagcagaagtgcccagagcgcttcctgagcctggagtacagccctgctgggaaggagtatgtgcggcagctggtgtatgtggagcaggccggcagcagccccaagctgcgggccggccccaggcacaagtatgcccccaaccctgggggcggcagctacagcctgcagcccagcccctgcctgctgcgggaccagaggctgggcgtgaagagcggggactacagcaccatggagggccctgagctgcggcacagccagccccccacccccctgccccaggcccaggaggatgccatgtcctggagcagccagcaggacaccctgagcagcacaggctacagccctggcaccaggaagaggaagagcaggaagcccagcctgtgccaggccaccagcgccacccccacagagggccctggggacctgctggtggagcagcccctggccgaggagcagcccccctgtggcaccagcctggcccctgtgaagagagctgagggggaggccgagggcgcccggggagctgctgagcccttcctggcccaggcccggctggcctgggaggcccagcaggcccacttccacatgaagcagaggagctcctgggacagccagcaggacggcagcggctatgaaagtgatggagccctgcccctgcccatgcctggccctgtggtgcgggccttctctgaagatgaggccctggcccagcaggagaacagacactggaggcggggcacctttgagaagctgggcttcccccagatcctgctggagaagtctgtgtctgtgcagaccaacctggccagccctgagccctacctgcaccccagccagagcgaggacctggccgcctgtgcccagtttgagagcagccggcagagccgctctggagtgcccagcagcagctgtgtgttccccaccttcaccctgaggaagcccagcagcgagacagacatcgagaactgggccagcaagcacttcaacaagcacacccagggcctcttccggaggaaggtgtccatcgccaacatgctggcctggagcagcgagagcatcaagaagcccatgattgtgaccagtgacagacatgtgaagaaggaggcctgtgagctgttcaagctgatccagatgtacatgggagacagaagagccaaggctgaccccctgcacgtggccctggaggtggccaccaagggctggagcgtgcagggcctgagagatgagctgtacatccagctgtgccggcagaccacagagaacttccggctggagagcctggcccggggctgggagctgatggccatctgcctggccttcttcccccccacccccaagttccacagctacctggagggctacatctaccgccacatggaccctgtgaatgacaccaagggcgtggccatcagcacctacgccaagtactgctaccacaagctgcagaaggccgccctgactggagccaagaagggcctgaagaagcccaacgtggaggagatcagacatgccaagaatgctgtgttcagccccagcatgtttggcagcgccctgcaggaggtgatgggcatgcagcgggagcgctacccagagcggcagctgccctgggtgcagacccggctgtctgaggaggtgctggccctgaatggagaccagacagagggcatcttccgggtgcctggggacattgatgaggtgaatgccctgaagctgcaggtggaccagtggaaggtgcccaccggcctggaggacccccacgtgcctgccagcctgctgaagctgtggtaccgggagctggaggagcccctcatcccccatgagttctatgagcagtgcatcgcccactatgacagccctgaggccgctgtggccgtggtgcacgccctgccccgcatcaacaggatggtgctgtgctacctgatccgcttcctgcaggtgtttgtgcagcctgccaacgtggccgtgaccaagatggatgtgagcaacctggccatggtgatggcccccaactgcctgcgctgccagagtgatgaccccagggtcatctttgagaacaccaggaaggagatgtccttcctgcgggtgctgatccagcacctggacaccagcttcatggagggcgtgctgtag

SEQ ID NO: 18591 - DNA, 426 bp, synthetic construct
  source 1..426: mol_type = other DNA; note = Synthetic coding sequence
atgggcaagggcatccccctgaatgaccaggaccgcatcccctggctgtgcaacctgcatgacatcctgctgagagatgtggccagcggccagagggtggtgctggcctgcagcgccctgaagaagacctacagagacatcctgacccagggcaaggatggagtggccctgaagtgtgaggagagcggcaaggaggccaagcaggccgagatgcagctgctggtggtgcacctgagcggcagctttgaggtgatcagcggccgcctgctgaagcgggagggccacttcatgcctcctgagctgctgcagagccagtttgagaccctggagcccccagctgcccctgagaacttcatccagatctctgtggacaagaatgtgtctgagatcatcgccaccatcatggagaccctgaagatgaagtag

SEQ ID NO: 18592 - DNA, 1701 bp, synthetic construct
  source 1..1701: mol_type = other DNA; note = Synthetic coding sequence
atggacatccagctggaccctgccagagatgacctgcccctgatggccaacaccagccacatcctggtgaagcactacgtgctggacctggatgtggactttgagagccaggtgattgagggcaccatcgtgctcttcctggaggatggcaaccgcttcaagaagcagaacagcagcattgaggaggcctgccagagcgagagcaacaaggcctgcaagtttggcatgcctgagccctgccacatccctgtgaccaatgcccggaccttcagcagcgagatggagtacaatgactttgccatctgcagcaagggggagaaggacaccagtgacaaggatggcaaccacgacaaccaggagcacgccagcggcatcagcagcagcaagtactgctgtgacaccggcaaccacggcagcgaggacttcctgctggtgctggactgctgtgacctgtctgtgctgaaggtggaggaggtggatgtggccgctgtgcccggcctggagaagttcaccaggagccctgagctgactgtggtgtctgaggagttcaggaaccagatcgtgcgggagctggtgaccctgcctgccaaccgctggagggagcagctggactactatgcccgctgcagccaggcccctggctgtggggagctgctgtttgacacagacacctggagcctgcagatcaggaagacaggagcccagacagccacagacttcccccacgccatccgcatctggtacaagaccaagccagagggccgctctgtgacctggaccagtgaccagagcggccggccctgtgtgtacacagtgggcagccccatcaacaacagagccctcttcccctgccaggagccccctgtggccatgagcacctggcaggccaccgtgcgggctgctgccagctttgtggtgctgatgtctggagaaaattctgccaagcccacccagctgtgggaggagtgcagctcctggtactactacgtgaccatgcccatgcctgccagcaccttcaccatcgctgtgggctgctggacagagatgaagatggagacctggagcagcaatgacctggccacagagcggcccttcagccccagcgaggccaacttccgccacgtgggcgtgtgcagccacatggagtacccctgccgcttccagaatgccagcgccaccacccaggagatcatcccccaccgggtgtttgcccctgtgtgcctgactggagcctgccaggagaccctgctgcggctcatccccccctgcctgtctgctgcccacagcgtgctgggcgcccaccccttcagccggctggatgtgctgattgtgcctgccaacttccccagcctgggcatggccagcccccacatcatgttcctgagccagagcatcctgactggaggcaaccacctgtgtggcacccggctgtgccatgaaattgcccacgcctggtttggcctggccatcggggcccgggactggacagaggagtggctgtctgagggctttgccacccacctggaggatgtgttctgggccacagcccagcagctggccccctatgaggcccgggagcagcaggagctgcgggcctgcctgcgctggaggcggctgcaggatgagatgcagtgcagccctgaggagatgcaggtgctgcgcttcccccacgtgggcggctgcagcggcagcttctcctag

SEQ ID NO: 18593 - DNA, 1266 bp, synthetic construct
  source 1..1266: mol_type = other DNA; note = Synthetic coding sequence
atgcccttcctgcacggcttccgccgcatcatctttgagtaccagcccctggtggatgccatcctgggcagcctgggcatccaggaccctgagcggcaggagagcctggaccggcccagctatgtggccagcgaggagagccgcatcctggtgctgacagagctgctggagaggaaggcccacagccccttctaccaggagggcgtgtccaatgccctgctgaagatggccgagctgggcctgaccagggctgctgatgtgctgctgcggcatggagccaacctgaactttgaggaccctgtgacctactacacagccctgcacatcgctgtgctgaggaaccagcctgacatggtggagctgctggtgcaccacggggctgatgtgaacagaagagaccgcatccacgagagcagccccctggacctggccagcgaggagcctgagcggctgccctgcctgcagaggctgctggacctgggcgcagatgtgaatgctgctgacaagcacggcaagacagccctgctgcacgccctggccagcagtgatggagtgcagatccacaacacagagaacatccggctgctgctggagggcggcgcagatgtgaaggccaccaccaaggatggagacaccgtcttcacctgcatcatcttcctgctgggggagaccgtgggcggggacaaggaggaggcccagatgatcaaccgcttctgcttccaggtgacccggctgctgctggcccatggagctgaccccagtgaatgtcctgcccacgagagcctgacccacatctgcctgaagagcttcaagctgcacttccccctgctgcgcttcctgctggagagcggggccgcctacaactgcagcctgcacggggccagctgctggagcggcttccacatcatctttgagcggctgtgcagccaccctggctgcacagaagatgagagccacgccgacctgctgaggaaggccgagaccgtgctggacctgatggtgaccaacagccagaagctgcagctgcctgagaactttgacatccaccctgtgggcagcctggccgagaagatccaggccctgcacttcagcctgcggcagctggagagctaccccccacccctgaagcacctgtgccgggtggccatccggctgtacctgcagccctggcctgtggatgtgaaggtgaaggccctgcccctgcctgaccggctgaagtggtacctgctgtctgagcacagcggctctgtggaggatgacatctag

SEQ ID NO: 18594 - DNA, 594 bp, synthetic construct
  source 1..594: mol_type = other DNA; note = Synthetic coding sequence
atgcccttcctgcacggcttccgccgcatcatctttgagtaccagcccctggtggatgccatcctgggcagcctgggcatccaggaccctgagcggcaggagagcctggaccggcccagctatgtggccagcgaggagagccgcatcctggtgctgacagagctgctggagaggaaggcccacagccccttctaccaggagggcgtgtccaatgccctgctgaagatggccgagctgggcctgaccagggctgctgatgtgctgctgcggcatggagccaacctgaactttgaggaccctgtgacctactacacagccctgcacatcgctgtgctgaggaaccagcctgacatggtggagctgctggtgcaccacggggctgatgtgaacagaagagaccgggagaagctgctgtgcagcatgctgtggccagctgccaccggctgccgcagcaccatcctgcggacctttgtgtcctactggaaggagggccagaccagccggcccccacccaagatgggcacccagtgcagccctgccagcagcagctgcctggtgcggccctgggagggcaccaagaggcggcccaggtag

SEQ ID NO: 18595 - DNA, 684 bp, synthetic construct
  source 1..684: mol_type = other DNA; note = Synthetic coding sequence
atgtctgacatcaacctggactgggtggaccggcggcagctgcagaggctggaggagatgctgattgtggtggatgaaaatgacaaggtgattggagctgacaccaagaggaactgccacctgaatgaaaatattgagaagggcctgctgcaccgggccttctctgtggtgctcttcaacaccaagaaccgcatcctgatccagcagaggagtgacaccaaggtgaccttccctggctacttcacagacagctgcagcagccaccccctgtacaacccagctgagctggaggagaaggatgccatcggcgtgagaagagctgcccagaggcggctgcaggccgagctgggcatccctggagagcagatcagccctgaggacatcgtgttcatgaccatctaccaccacaaggccaagagtgaccgcatctggggcgagcacgagatctgctacctgctgctggtgaggaagaatgtgaccctgaacccagaccccagcgagaccaagagcatcctgtacctgagccaggaggagctgtgggagctgctggagcgggaggcccggggggaggtgaaggtgaccccctggctgcggaccatcgccgagcgcttcctgtaccgctggtggccccacctggatgatgtgaccccatttgtggagctgcacaagatccaccgggtgtag

SEQ ID NO: 18596 - DNA, 864 bp, synthetic construct
  source 1..864: mol_type = other DNA; note = Synthetic coding sequence
atggaggtgatggagggccccctgaacctggcccaccagcagagccggcgggctgaccggctgctggccgccggcaagtatgaggaggccatcagctgccacaagaaggccgccgcctacctgtctgaggccatgaagctgacccagagcgagcaggcccacctgagcctggagctgcagagggacagccacatgaagcagctgctgctgatccaggagcgctggaagagggcccagcgggaggagcggctgaaggcccagcagaacacagacaaggatgctgctgcccacctgcagaccagccacaagcccagcgcagaagatgctgagggccagagccccctgagccagaagtacagccccagcacagagaagtgcctgcctgagatccagggcatctttgaccgggaccctgacaccctgctgtacctgctgcagcagaagtctgagcctgctgagccctgcatcggcagcaaggcccccaaggatgacaagaccatcatcgaggagcaggccaccaagattgctgacctgaagagacatgtggagttcctggtggccgagaatgaaaggctgaggaaagaaaacaagcagctgaaggccgagaaggcccggctgctgaagggccccatcgagaaggagctggatgtggatgctgactttgtggagaccagcgagctgtggagcctgccccctcatgctgagacagccacagccagcagcacctggcagaagtttgctgccaacacaggcaaggccaaggacatccccatccccaacctgccccccctggacttccccagccctgagctgcccctgatggagctgtctgaggacatcctgaagggcttcatgaacaactag

SEQ ID NO: 18597 - DNA, 2844 bp, synthetic construct
  source 1..2844: mol_type = other DNA; note = Synthetic coding sequence
atgtgtgtggacagcctggtgcgcatctgcagcggcctgtcctatggccgcatccggaacatcaagagcctgagtgacatccagatcgtgcaggtggcctgtggctactaccacagcctggccctgagcaaggccagcgaggtgttctgctggggccagaacaagtatggccagctgggcctgggcacagactgcaagaagcagaccagcccccagctgctgaagagcctgctgggcatccccttcatgcaggtggccgccggcggggcccacagctttgtgctgaccctgagcggggccatcttcggctggggcaggaacaagtttggccagctgggcctgaatgatgaaaatgacagatatgtgcccaacctgctgaagagcctgcggagccagaagatcgtgtacatctgctgcggggaggaccacacagctgccctgaccaaggagggcggcgtcttcaccttcggggccggcggctacggccagctgggccacaacagcaccagccatgagatcaaccccaggaaggtgtttgagctgatgggcagcatcgtgacagaaattgcctgtggccggcagcacaccagcgcctttgtgcccagcagcggccgcatctacagctttggcctgggcggcaatggccagctgggcaccggcagcaccagcaacaggaagagccccttcaccgtgaagggcaactggtacccctacaacggccagtgcctgcctgacatcgacagcgaggagtacttctgtgtgaagaggatcttctctggaggagaccagagcttcagccactacagcagcccccagaactgtggccccccagatgacttccgctgccccaaccccaccaagcagatctggacagtgaatgaggccctgatccagaagtggctgagctaccccagcggccgcttccctgtggagatcgccaatgaaattgatggcaccttcagcagcagcggctgcctgaatggcagcttcctggccgtgtccaatgatgaccactacagaacaggcacccgcttcagcggcgtggacatgaatgctgcccggctgctcttccacaagctgatccagcctgaccacccccagatcagccagcaggtggccgccagcctggagaagaacctgatccccaagctgaccagcagcctgcctgatgtggaggccctgcgcttctacctgaccctgcctgagtgccccctgatgtctgacagcaacaacttcaccaccatcgccatcccctttggaacagccctggtgaacctggagaaggcccccctgaaggtgctggagaactggtggagcgtgctggagcccccactcttcctgaagatcgtggagctgttcaaggaggtggtggtgcacctgctgaagctgtacaagattggcatccccccatctgaaagacgcatcttcaacagcttcctgcacacagccctgaaggtgctggagatcctgcaccgggtgaatgagaagatgggccagatcatccagtatgacaagttctacatccacgaggtgcaggagctgattgacatcagaaatgactacatcaactgggtgcagcagcaggcctacggcatggatgtgaaccacggcctgacagagctggccgacatccctgtgaccatctgcacctacccctttgtgtttgatgcccaggccaagaccaccctgctgcagacagatgctgtgctgcagatgcagatggccatcgaccaggcccaccggcagaatgtgagcagcctcttcctgcccgtcatcgagagcgtgaacccctgcctgatcctggtggtgcggcgggagaacatcgtgggagatgccatggaggtgctgaggaagaccaagaacatcgactacaagaagcccctgaaggtgatctttgtgggagaagatgctgtggatgctgggggcgtgaggaaggagttcttcctgctgatcatgagggagctgctggaccccaagtatggcatgttccgctactatgaggacagccgcctcatctggttcagtgacaagacctttgaggacagcgacctcttccacctgattggagtcatctgtggcctggccatctacaactgcaccatcgtggacctgcacttccccctggccctgtacaagaagctgctgaagaagaagcccagcctggatgacctgaaggagctgatgccagatgtgggccgctccatgcagcagctgctggactacccagaagatgacatcgaggagaccttctgcctgaacttcaccatcaccgtggagaactttggagccacagaggtgaaggagctggtgctgaatggagctgacacagctgtgaacaagcagaaccggcaggagtttgtggatgcctacgtggactacatcttcaacaagtctgtggccagcctgtttgatgccttccacgccggcttccacaaggtgtgtggcggcaaggtgctgctgctcttccagcccaatgagctgcaggccatggtgattggcaacaccaactatgactggaaggagctggagaagaacacagagtacaagggggagtactgggccgagcaccccaccatcaagatcttctgggaggtgttccacgagctgcccctggagaagaagaagcagttcctgctcttcctgaccggcagtgaccgcatccccatcctgggcatgaagagcctgaagctggtgatccagagcactggaggaggagaggagtacctgcctgtgagccacacctgcttcaacctgctggacctgcccaagtacacagagaaggagaccctgcggagcaagctgatccaggccatcgaccacaatgaaggcttcagcctcatctag

SEQ ID NO: 18598 - DNA, 2541 bp, synthetic construct
  source 1..2541: mol_type = other DNA; note = Synthetic coding sequence
atgcctgccttcctgggcctgaagtgcctgggcaagctgtgcagcagcgagaagagcaaggtgaccagcagcgagaggaccagcgcccggggcagcaacaggaagaggctcatcgtggaggaccggcgggtgtctggcaccagcttcaccgcccacagaagagccaccatcacccacctgctgtacctgtgccccaaggactactgcccccggggccgggtgtgcaacagcgtggacccctttgtggcccacccccaggacccccaccaccccagcgagaagcctgtgatccactgccacaagtgtggggagccctgcaagggggaggtgctgcgggtgcagaccaagcacttccacatcaagtgcttcacctgcaaggtgtgtggctgtgacctggcccagggcggcttcttcatcaagaatggagagtacctgtgcaccctggactaccagaggatgtatggcacccgctgccacggctgtggggagtttgtggagggggaggtggtgacagccctgggcaagacctaccaccccaactgctttgcctgcaccatctgcaagaggcccttccccccaggggacagagtgaccttcaacggccgggactgcctgtgccagctgtgtgcccagcccatgagcagcagccccaaggagaccaccttcagcagcaactgtgccggctgcggccgggacatcaagaatggccaggccctgctggccctggacaagcagtggcacctgggctgcttcaagtgcaagagctgtgggaaggtgctgactggagagtacatcagcaaggatggagccccctactgtgagaaggactaccagggcctgtttggagtgaagtgtgaggcctgccaccagttcatcaccgggaaggtgctggaggccggggacaagcactaccaccccagctgtgcccgctgcagccgctgcaaccagatgttcacagaaggagaggagatgtacctgcagggcagcacagtgtggcacccagactgcaagcagagcaccaagacagaggagaagctgcggctgcccaacatccgccgcagcagcagtgacttcttctacagcaagagcctcatccggaggacaggccgcagccccagcctgcagcccaccaggaccagcagcgagagcatctacagccggcccggcagcagcatccctggcagccctggccacaccatctatgccaaggtggacaatgagatcctggactacaaggacctggccgccatccccaaggtgaaggccatctatgacatcgagaggccagacctgatcacctatgagcccttctacaccagcggctatgatgacaagcaggagcggcagagcctgggggagagccccaggaccctgagccccaccccatctgctgagggctaccaggatgtgcgggacaggatgatccacaggagcaccagccagggcagcatcaacagccctgtgtacagccgccacagctacacccccaccaccagccgcagcccccagcacttccacaggcctgagctgctgagccctggggtgcagaggctgagctacctgcggaccagcagcctgagccccacccacagcgacagccggcccaacccccccttccgccaccacttcatcccccacatcaagggaaatgagcccagcagcggcaggaacagccccctgccctacagaccagacagccggcccctgacccccacctacgcccaggcccccaagcacttccacgtgcctgaccagggcatcaacatctacaggaagccacccatctacaagcagcacgccgccctggccgcccagagcaagagcagcgaggacatcatcaagttcagcaagtttcctgctgcccaggccccagaccccagcgagacccccaagattgaaacagaccactggccaggcccccccagctttgctgtggtgggccctgacatgaagaggaggagcagcggccgggaggaggatgatgaggagctgctgcggcggcggcagctgcaggaggagcagctgatgaagctgaacagcggcctgggccagctgatcctgaaggaggagatggagaaggagagccgggagaggagcagcctgctggccagccgctatgacagccccatcaacagcgccagccacatccccagcagcaagacagccagcctgcccggctatggaagaaatggcctgcacaggcctgtgtccacagactttgcccagtacaacagctatggagatgtgtctgggggcgtgcgggactaccagaccctgcctgatggccacatgcctgccatgaggatggaccggggcgtgtccatgcccaacatgctggagcccaagatcttcccctatgagatgctgatggtgaccaacagaggaagaaacaagatcctgcgggaggtggacaggacccggctggagcggcacctggcccctgaggtgttccgggagatcttcggcatgagcatccaggagtttgaccggctgcccctgtggaggagaaatgacatgaagaagaaggccaagctgttctag

SEQ ID NO: 18599 - DNA, 594 bp, synthetic construct
  source 1..594: mol_type = other DNA; note = Synthetic coding sequence
atgtttggctgcctggtggccggccgcctggtgcagacagctgcccagcaggtggccgaggacaagtttgtgtttgacctgcctgactatgagagcatcaaccacgtggtggtgttcatgctgggcaccatccccttccctgagggcatgggcggctctgtgtacttctcctacccagacagcaatggcatgcctgtgtggcagctgctgggctttgtgaccaacgggaagcccagcgccatcttcaagatcagcggcctgaagtctggagagggcagccagcacccctttggagccatgaacatcgtgaggaccccatctgtggcccagatcggcatctctgtggagctgctggacagcatggcccagcagacccctgtgggcaatgctgctgtgtcctctgtggacagcttcacccagttcacccagaagatgctggacaacttctacaactttgccagcagctttgctgtgtcccaggcccagatgacccccagccccagcgagatgttcatcccagccaacgtggtgctgaagtggtatgagaacttccagaggcggctggcccagaaccccctcttctggaagacctag

SEQ ID NO: 18600 - DNA, 930 bp, synthetic construct
  source 1..930: mol_type = other DNA; note = Synthetic coding sequence
atggtgtttcctgccaagcgcttctgcctggtgcccagcatggagggcgtgcgctgggccttcagctgtggcacctggctgcccagcagagctgagtggctgctggccgtgcgcagcatccagcctgaggagaaggagcgcatcggccagtttgtgtttgccagagatgccaaggccgccatggccggccgcctgatgatcaggaagctggtggccgagaagctgaacatcccctggaaccacatccggctgcagaggacagccaagggcaagcctgtgctggccaaggacagcagcaacccctaccccaacttcaacttcaacatcagccaccagggcgactatgctgtgctggccgctgagcctgagctgcaggtgggcatcgacatcatgaagaccagcttccctggccggggcagcatccctgagttcttccacatcatgaagaggaagttcaccaacaaggagtgggagaccatccgctccttcaaggatgagtggacccagctggacatgttctacagaaactgggccctgaaggagagcttcatcaaggccatcggcgtgggcctgggctttgagctgcagaggctggagtttgacctgagccccctgaacctggacatcggccaggtgtacaaggagaccaggctcttcctggatggagaggaggagaaggagtgggcctttgaggagagcaagattgatgagcaccactttgtggccgtggccctgaggaagccagatggcagccgccaccaggatgtgcccagccaggatgacagcaagcccacccagaggcagttcaccatcctgaacttcaatgacctgatgagcagcgctgtgcccatgaccccagaggaccccagcttctgggactgcttctgcttcacagaggagatccccatcagaaatggcaccaagagctag

SEQ ID NO: 18601 - DNA, 1599 bp, synthetic construct
  source 1..1599: mol_type = other DNA; note = Synthetic coding sequence
atgcagagctgtgagagcagcggggacagcgcagatgaccccctgagccggggcctgcggcggcggggccagccccgggtggtggtgattggagctggcctggccggcctggccgccgccaaggccctgctggagcagggcttcacagatgtgacagtgctggaggccagcagccacatcggcggccgggtgcagagcgtgaagctgggccacgccacctttgagctgggcgccacctggatccacggcagccacggcaaccccatctaccacctggccgaggccaacggcctgctggaggagaccacagatggagagaggtctgtgggccgcatcagcctgtacagcaagaatggagtggcctgctacctgaccaaccacggccgccgcatccccaaggatgtggtggaggagttcagtgacctgtacaatgaggtgtacaacctgacccaggagttcttcagacatgacaagcctgtgaatgctgagagccagaacagcgtgggcgtcttcacccgggaggaggtgaggaaccgcatcagaaatgaccctgatgatcctgaggccaccaagaggctgaagctggccatgatccagcagtacctgaaggtggagagctgtgagagcagcagccacagcatggatgaggtgtccctgagcgccttcggggagtggacagagatccctggggcccaccacatcatccccagcggcttcatgagggtggtggagctgctggccgagggcatcccagcccacgtgatccagctgggcaagcctgtgcgctgcatccactgggaccaggccagcgcccggccccggggccctgagattgagccccggggcgtgctgaagaggcagtacaccagcttcttccggcccggcctgcccacagagaaggtggccgccatccaccggctgggcatcggcaccacagacaagatcttcctggagtttgaggagcccttctggggccctgagtgcaacagcctgcagtttgtgtgggaggatgaagctgagagccacaccctgacctacccacctgagctgtggtacaggaagatctgtggctttgatgtgctgtacccacctgagagatatggccacgtgctgagcggctggatctgtggggaggaggccctggtgatggagaagtgtgatgatgaggccgtggccgagatctgcacagagatgctgcggcagttcaccggcaaccccaacatccccaagccccggcgcatcctgcggagcgcctggggcagcaacccctacttccggggcagctacagctacacccaggtgggcagcagtggagcagatgtggagaagctggccaagcccctgccctacacagagagcagcaagacagcccacggcagcagcaccaagcagcagcccggccacctgttcagcagcaaatgtcctgagcagcccctggatgccaacagaggagctgtgaagcccatgcaggtgctcttcagcggggaggccacccacaggaagtactacagcaccacccatggagccctgctgagcggccagcgggaggccgcccggctgattgagatgtacagagacctcttccagcagggcacctag

SEQ ID NO: 18602 - DNA, 2349 bp, synthetic construct
  source 1..2349: mol_type = other DNA; note = Synthetic coding sequence
atggacagcagcatccacctgagcagcctcatcagcagacatgatgatgaggccaccaggaccagcaccagcgagggcctggaggagggggaggtggagggggagaccctgctgattgtggagagcgaggaccaggcctctgtggacctgagccatgaccagagcggggacagcctgaacagtgatgaaggagatgtgtcctggatggaggagcagctgagctacttctgtgacaagtgccagaagtggatcccagccagccagctgcgggagcagctgagctacctgaagggggacaacttcttccgcttcacctgcagcgactgcagcgcagatggcaaggagcagtatgagcggctgaagctgacctggcagcaggtggtgatgctggccatgtacaacctgagcctggagggcagcggccggcagggctacttccgctggaaggaggacatctgtgccttcatcgagaagcactggaccttcctgctgggcaacaggaagaagaccagcacctggtggagcacagtggccggctgcctgtctgtgggcagccccatgtacttccgcagcggggcccaggagtttggagagcccggctggtggaagctggtgcacaacaagccacccaccatgaagccagagggggagaagctgagcgccagcaccctgaagatcaaggccgccagcaagcccaccctggaccccatcatcaccgtggagggcctgaggaagagggccagcagaaatcctgtggagagcgccatggagctgaaggagaagaggagcaggacccaggaggccaaggacatccggcgggcccagaaggaggccgccggcttcctggacaggagcaccagcagcacccctgtgaagttcatcagccggggccggcggccagatgtgatcctggagaagggggaggtgattgacttcagcagcctgagcagcagtgacaggacccccctgaccagccccagccccagccccagcctggacttcagcgcccctggcaccccagccagccacagcgccacccccagcctgctgtctgaggccgacctgatcccagatgtgatgccaccccaggccctcttccatgatgatgatgagatggagggagatggagtcatcgaccccggcatggagtatgtgcccccacctgctggctctgtggccagcggccctgtggtgggcgtgaggaagaaggtgcggggccctgagcagatcaagcaggaggtggagagcgaggaggagaagccagacaggatggacatcgacagcgaggacacagacagcaacaccagcctgcagacccgggcccgggagaagaggaagccccagctggagaaggacaccaagcccaaggagccccgctacacccctgtgtccatctatgaggagaagctgctgctgaagaggctggaggcctgccctggagctgtggccatgaccccagaggcccggcggctgaagaggaagctgattgtgcggcaggccaagagggaccggggcctgcccctgtttgacctggaccaggtggtgaatgctgccctgctgctggtggatggcatctacggggccaaggagggcggcatcagccggctgcctgctggccaggccacctaccgcaccacctgccaggacttccgcatcctggaccgctaccagaccagcctgcccagcaggaagggcttccgccaccagaccaccaagttcctgtaccgcctggtgggcagcgaggacatggctgtggaccagagcatcgtgagcccctacaccagccgcatcctgaagccctacatcagaagagattatgagaccaagccacccaagctgcagctgctgagccagatccgcagccacctgcacagaagtgacccccactggaccccagagccagatgcccccctggactactgctacgtgcggcccaaccacatccccaccatcaacagcatgtgccaggagttcttctggccaggcatcgacctgtctgaatgtctgcagtacccagacttctctgtggtggtgctgtacaagaaggtgatcatcgccttcggcttcatggtgcctgatgtgaagtacaatgaggcctacatctccttcctgtttgtgcaccctgagtggaggagagctggcatcgccaccttcatgatctaccacctgatccagacctgcatgggcaaggatgtgaccctgcacgtgtctgccagcaacccagccatgctgctgtaccagaagtttggcttcaagacagaggagtatgtgctggacttctatgacaagtactaccccctggagagcacagagtgcaagcacgccttcttcctgcggctgcggaggtag

SEQ ID NO: 18603 - DNA, 2745 bp, synthetic construct
  source 1..2745: mol_type = other DNA; note = Synthetic coding sequence
atgggcaccacagcccctggccccatccacctgctggagctgtgtgaccagaagctgatggagttcctgtgcaacatggacaacaaggacctggtgtggctggaggagatccaggaggaggccgagaggatgttcacccgggagttcagcaaggagcctgagctgatgcccaagacccccagccagaagaacagaaggaagaagaggcgcatctcctatgtgcaggatgaaaatagagaccccatcagaagaaggctgagcaggaggaagagccgcagcagccagctgagcagccggcggctgcggagcaaggacagcgtggagaagctggccaccgtggtgggggagaatggatctgtgctgcggcgggtgaccagggctgctgctgctgctgctgctgccaccatggccctggccgcccccagcagccccaccccagagagccccaccatgctgaccaagaagccagaggacaaccacacccagtgccagctggtgcctgtggtggagatcggcatcagcgagcggcagaatgctgagcagcacgtgacccagctgatgagcacagagcccctgcccaggaccctgagccccaccccagccagcgccacagcccccaccagccagggcatccccaccagtgatgaggagagcacccccaagaagagcaaggcccgcatcctggagagcatcaccgtgagcagcctgatggccaccccccaggaccccaagggccagggcgtgggcaccggccgcagcgccagcaagctgagaattgcccaggtgtccccaggcccccgggacagccctgccttcccagacagcccctggagggagcgggtgctggcccccatcctgcctgacaacttcagcacccccaccggcagcaggacagacagccagagcgtgcgccacagccccatcgcccccagcagccccagcccccaggtgctggcccagaagtacagcctggtggccaagcaggagagcgtggtgagaagagccagccggcggctggccaagaagacagctgaggagcctgctgccagcggccgcatcatctgccacagctacctggagcggctgctgaatgtggaggtgccccagaaggtgggcagcgagcagaaggagcccccagaggaggccgagcctgtggccgctgctgagcctgaggtgcctgagaacaacggcaacaacagctggccccacaatgacacagagatcgccaacagcacccccaaccccaagccagctgccagcagccctgagacccccagcgctggccagcaggaggccaagacagaccaggctgatggcccccgggagcccccccagagcgcccggaggaagaggagctacaagcaggccgtgtctgagctggatgaggagcagcacctggaggatgaggagctgcagcccccaagaagcaagacccccagcagcccctgcccagccagcaaggtggtgcggcccctgcggaccttcctgcacacagtgcagaggaaccagatgctgatgacccccaccagcgcccccaggtctgtgatgaagagcttcatcaagaggaacacccccctgaggatggaccccaaggagaaggagcggcagaggctggagaacctgcggaggaaggaggaggccgagcagctgcggcggcagaaggtggaggaggacaagagaagaaggctggaggaggtgaagctgaagcgggaggagcggctgaggaaggtgctgcaggcccgggagcgggtggagcagatgaaggaggagaagaagaagcagatcgagcagaagtttgcccagattgatgagaagacagagaaggccaaggaggagcggctggccgaggagaaggccaagaagaaggccgccgccaagaagatggaggaggtggaggcccggaggaagcaggaggaggaggcccggcggctgcgctggctgcagcaggaggaggaggagcggcggcaccaggagctgctgcagaagaagaaggaggaggagcaggagcggctgaggaaggctgctgaggccaagaggctggccgagcagcgggagcaggagcggcgggagcaggagcggcgggagcaggagcggcgggagcaggagcggcgggagcaggagcggcgggagcaggagcggcagctggccgagcaggagaggagaagagagcaggagcggctgcaggccgagcgggagctgcaggagcgggagaaggccctgcggctgcagaaggagcagctgcagcgggagctggaggagaagaagaagaaggaggagcagcagaggctggccgagcggcagctgcaggaggagcaggagaagaaggccaaggaggccgccggggccagcaaggccctgaatgtgacagtggatgtgcagagccctgcctgcaccagctaccagatgaccccccagggccaccgggccccacccaagatcaacccagacaactacggcatggacctgaacagtgatgacagcacagatgatgaggcccaccccaggaagcccatccccacctgggcccggggcacccccctgagccaggccatcatccaccagtactaccacccccccaacctgctggagctgtttggcaccatcctgcccctggacctggaggacatcttcaagaagagcaagccccgctaccacaagaggaccagcagcgctgtgtggaacagcccccccctgcagggcgcccgggtgcccagcagcctggcctacagcctgaagaagcactag

SEQ ID NO: 18604 - DNA, 4149 bp, synthetic construct
  source 1..4149: mol_type = other DNA; note = Synthetic coding sequence
atggatgaggaggagaaccactacgtgtcccagctgcgggaggtgtacagcagctgtgacaccaccggcaccggcttcctggaccggcaggagctgacccagctgtgcctgaagctgcacctggagcagcagctgcctgtgctgctgcagaccctgctgggcaatgaccactttgcccgggtgaactttgaggagttcaaggagggctttgtggccgtgctgagcagcaatgctggggtgcggcccagtgatgaggacagcagcagcctggagagcgctgccagcagcgccatcccccccaagtatgtgaatggcagcaagtggtatggaagaagaagcaggcctgagctgtgtgatgctgccacagaggccaggagagtgcctgagcagcagacccaggccagcctgaagagccacctgtggaggtctgccagcctggagagcgtggagagccccaagagtgatgaggaggccgagagcaccaaggaggcccagaatgagctgtttgaggcccagggccagctgcagacctgggacagtgaagattttggcagcccccagaagagctgcagccccagctttgacaccccagagagccagatccggggcgtgtgggaggagctgggcgtgggcagcagcggccacctgtctgagcaggagctggccgtggtgtgccagagcgtgggcctgcagggcctggagaaggaggagctggaggacctcttcaacaagctggaccaggatggagatggcaaggtgtccctggaggagttccagctgggcctcttcagccatgagcccgccctgctgctggagagcagcaccagggtgaagcccagcaaggcctggagccactaccaggtgcctgaggagagcggctgccacaccaccaccaccagcagcctggtgtccctgtgcagcagcctgcggctcttcagcagcattgatgatggcagcggctttgccttcccagaccaggtgctggccatgtggacccaggagggcatccagaatggccgggagatcctgcagagcctggacttctctgtggatgagaaggtgaacctgctggagctgacctgggccctggacaatgagctgatgacagtggacagcgctgtgcagcaggccgccctggcctgctaccaccaggagctgagctaccagcagggccaggtggagcagctggcccgggagcgggacaaggcccggcaggacctggagcgggcagagaagaggaacctggagtttgtgaaggagatggatgactgccacagcaccctggagcagctgacagagaagaagatcaagcacctggagcagggctaccgggagcggctgagcctgctgcggtctgaggtggaggccgagcgggagctgttctgggagcaggcccaccggcagagagctgccctggagtgggatgtgggccgcctgcaggccgaggaggccggcctgcgggagaagctgaccctggccctgaaggagaacagccggctgcagaaggagatcgtggaggtggtggagaagctgagtgacagcgagcggctggccctgaagctgcagaaggacctggagtttgtgctgaaggacaagctggagccccagagcgctgagctgctggcccaggaggagagatttgctgctgtgctgaaggagtatgagctgaagtgccgggacctgcaggacagaaatgatgagctgcaggccgagctggagggcctgtgggcccggctgcccaagaacagacacagccccagctggagcccagatggaagaagacggcagctgcccggcctgggccctgctggcatctccttcctgggcaacagcgcccctgtgtccattgaaacagagctgatgatggagcaggtgaaggagcactaccaggacctgcggacccagctggagaccaaggtgaactactatgagcgggagattgctgccctgaagaggaactttgagaaggagaggaaggacatggagcaggcccggcggcgggaggtgtctgtgctggagggccagaaggctgacctggaggagctgcacgagaagagccaggaggtgatctggggcctgcaggagcagctgcaggacacagcccggggccctgagcctgagcagatgggcctggccccctgctgcacccaggccctgtgtggcctggccctgcggcaccacagccacctgcagcagatccggcgggaggccgaggccgagctgagcggggagctgagcggcctgggcgccctgcctgcccggcgggacctgaccctggagctggaggagcccccccagggccccctgccccggggcagccagaggtctgagcagctggagctggagcgggccctgaagctgcagccctgtgccagcgagaagagggcccagatgtgtgtgtccctggccctggaggaggaggagctggagctggcccggggcaagagggtggatggccccagcctggaggccgagatgcaggccctgcccaaggatggcctggtggccggcagcggccaggagggcacccggggcctgctgcccctgcggcccggctgtggggagcggcccctggcctggctggcccctggagatggccgggagagcgaggaggccgccggggccggcccccggcggcggcaggcccaggacacagaggccacccagagccctgccccagccccagccccagccagccacggccccagcgagcgctggagcaggatgcagccctgtggggtggatggagacatcgtgcccaaggagcctgagccctttggagccagcgctgctggcctggagcagcccggggcccgggagctgcccctgctgggcacagaaagagatgccagccagacccagcccaggatgtgggagccccccctgcggcctgctgccagctgccggggccaggccgagcggctgcaggccatccaggaggagcgggcccgctcctggagccggggcacccaggagcaggccagcgagcagcaggcccgggcagagggcgccctggagcccggctgccacaagcacagcgtggaggtggcccggcggggcagcctgcccagccacctgcagctggccgacccccagggctcctggcaggagcagctggccgcccctgaggagggggagaccaagatcgccctggagcgggagaaggatgacatggagaccaagctgctgcacctggaggatgtggtgcgggccctggagaagcacgtggacctgcgggagaatgaccggctggagttccaccggctgtctgaggagaacaccctgctgaagaatgacctgggccgggtgcggcaggagctggaggccgctgagagcacccatgatgcccagaggaaggagattgaggtgctgaagaaggacaaggagaaggcctgcagcgagatggaggtgctgaaccggcagaaccagaactacaaggaccagctgagccagctgaatgtgcgggtgctgcagctgggccaggaggccagcacccaccaggcccagaatgaggagcaccgggtgaccatccagatgctgacccagagcctggaggaggtggtgcgcagcggccagcagcagagcgaccagatccagaagctgcgggtggagctggagtgcctgaaccaggagcaccagagcctgcagctgccctggagcgagctgacccagaccctggaggagagccaggaccaggtgcagggcgcccacctgcggctgcggcaggcccaggcccagcacctgcaggaggtgcggctggtgccccaggacagagtggccgagctgcaccggctgctgagcctgcagggcgagcaggcccggcggcggctggatgcccagcgggaggagcacgagaagcagctgaaggccacagaggagcgggtggaggaggccgagatgatcctgaagaacatggagatgctgctgcaggagaaggtggacaagctgaaggagcagtttgagaagaacaccaagagtgacctgctgctgaaggagctgtatgtggagaatgcccacctggtgcgggccctgcaggccacagaggagaagcagagaggagctgagaagcagagccggctgctggaggagaaggtgcgggccctgaacaagctggtgtccagaattgccccagctgccctgtctgtgtag

SEQ ID NO: 18605 - DNA, 4383 bp, synthetic construct
  source 1..4383: mol_type = other DNA; note = Synthetic coding sequence
atggccggccggcccctgcgcatcggggaccagctggtgctggaggaggactatgatgagacctacatccccagcgagcaggagatcctggagtttgcccgggagatcggcatcgaccccatcaaggagcctgagctgatgtggctggcccgggagggcatcgtggcccccctgcctggagagtggaagccctgccaggacatcactggagacatctactacttcaactttgccaacggccagagcatgtgggaccacccctgtgatgagcactaccgcagcctggtgatccaggagcgggccaagctgagcaccagcggggccatcaagaagaagaagaagaagaaggagaagaaggacaagaaggaccgggacccccccaagagcagcctggccctgggcagcagcctggcccctgtgcacgtgcccctgggcggcctggcccccctgcggggcctggtggacaccccaccttctgccctgcggggcagccagagcgtgtccctgggcagctctgtggagagcggccggcagctgggggagctgatgctgcccagccagggcctgaagaccagcgcctacaccaagggcctgctgggcagcatctatgaggacaagacagccctgagcctgctgggcctgggggaggagaccaatgaagaagatgaggaggagagtgacaaccagagcgtgcacagcagcagcgagcccctgaggaacctgcacctggacattggagccctgggcggggactttgaatatgaggagagcctgcggaccagccagcctgaggagaagaaggatgtgtccctggacagtgatgctgctggcccccccaccccctgcaagcccagcagccctggagctgacagcagcctgagcagcgctgtgggcaagggccggcagggcagcggggcccggcccggcctgcctgagaaggaggagaatgagaagtctgagcccaagatctgcaggaacctggtgacccccaaggctgaccccactggaagtgagcccgccaaggccagcgagaaggaggccccagaagatactgtggatgctggggaggagggcagccggcgggaggaggccgccaaggagcccaagaagaaggccagcgccctggaggagggcagcagtgatgccagccaggagctggagatcagcgagcacatgaaggagccccagctgagtgacagcatcgccagtgaccccaagagcttccacggcctggactttggcttccgcagccgcatcagcgagcacctgctggatgtggatgtgctgagccctgtgctgggcggggcctgccggcaggcccagcagcccctgggcatcgaggacaaggatgacagccagagcagccaggatgagctgcagagcaagcagagcaagggcctggaggagcggctgagcccccccctgccccatgaggagcgggcccagagcccccccaggagcctggccacagaggaggagcccccccagggccctgagggccagcctgagtggaaggaggccgaggagctgggggaggacagcgctgccagcctgagcctgcagctgagcctgcagcgggagcaggcccccagccccccagctgcctgtgagaagggcaaggagcagcacagccaggccgaggagctgggccctggccaggaggaggctgaagatcctgaggagaaggtggccgtgagccccaccccacctgtgtccccagaggtgcgcagcacagagcctgtggcccctcctgagcagctgtctgaggccgccctgaaggccatggaggaggccgtggcccaggtgctggagcaggaccagaggcacctgctggagagcaagcaggagaagatgcagcagctgcgggagaagctgtgccaggaggaggaggaggagatcctgcggctgcaccagcagaaggagcagagcctgagcagcctgcgggagcggctgcagaaggccatcgaggaggaggaggccaggatgagggaggaggagagccagaggctgtcctggctgcgggcccaggtgcagagcagcacccaggctgatgaggaccagatccgggcagagcaggaggccagcctgcagaagctgcgggaggagctggagagccagcagaaggccgagcgggccagcctggagcagaagaaccggcagatgctggagcagctgaaggaggagattgaggccagcgagaagtctgagcaggccgccctgaatgctgccaaggagaaggccctgcagcagctgcgggagcagctggagggggagaggaaggaggccgtggccaccctggagaaggagcacagcgctgagctggagcggctgtgcagcagcctggaggccaagcaccgggaggtggtgagcagcctgcagaagaagatccaggaggcccagcagaaggaggaggcccagctgcagaagtgcctgggccaggtggagcaccgggtgcaccagaagagctaccacgtggccggctatgagcacgagctgagcagcctgctgcgggagaagaggcaggaggtggagggggagcatgaaagaaggctggacaagatgaaggaggagcaccagcaggtgatggccaaggcccgggagcagtatgaagctgaggagaggaagcagagagctgagctgctgggccacctgactggagagctggagcggctgcagagggcccacgagcgggagctggagaccgtgcggcaggagcagcacaagaggctggaggacctgcggcggcggcaccgggagcaggagaggaagctgcaggacctggagctggacctggagacccgggccaaggatgtgaaggcccggctggccctgctggaggtgcaggaggagacagcccggcgggagaagcagcagctgctggatgtgcagaggcaggtggccctgaagtctgaggaggccacagccacccaccagcagctggaggaggcccagaaggagcacacccacctgctgcagagcaaccagcagctgcgggagatcctggatgagctgcaggccaggaagctgaagctggagagccaggtggacctgctgcaggcccagagccagcagctgcagaagcacttcagcagcctggaggccgaggcccagaagaagcagcacctgctgcgggaggtgacagtggaggagaacaatgccagcccccactttgagccagacctgcacatcgaggacctgaggaagagcctgggcaccaaccagaccaaggaggtgagcagcagcctgagccagagcaaagaagatctctacctggacagcctgagcagccacaacgtgtggcacctgctgtctgctgagggcgtggccctgcggagcgccaaggagttcctggtgcagcagaccaggtccatgagaagacggcagacagccctgaaggccgcccagcagcactggaggcatgagctggccagcgcccaggaggtggccaaggaccccccaggcatcaaggccctggaggacatgaggaagaacctggagaaggagaccaggcacctggatgagatgaagagcgccatgaggaagggccacaacctgctgaagaagaaggaggagaagctgaaccagctggagagcagcctgtgggaggaggccagtgatgagggcaccctgggcggcagccccaccaagaaggctgtgacctttgacctgagtgacatggacagcctgagcagcgagagcagcgagagcttcagccccccccaccgggagtggtggaggcagcagagaattgacagcacccccagcctgaccagcaggaagatccacggcctgagccacagcctgcggcagatcagcagccagctgagctctgtgctgagcatcctggacagcctgaacccccagagccccccacccctgctggcctccatgcctgcccagctgcccccccgggaccccaagagcacccccacccccacctactacggcagcctggcccgcttcagcgccctgagcagcgccacccccaccagcacccagtgggcctgggacagcggccagggcccccggctgcccagctctgtggcccagacagtggatgacttcctgctggagaagtggaggaagtacttccccagcggcatccccctgctgagcaacagccccacccccctggagagccggctgggctacatgtctgccagcgagcagctgcggctgctgcagcacagccacagccaggtgcctgaggccggcagcaccaccttccagggcatcatcgaggccaacagacgctggctggagcgggtgaagaatgacccccggctgcccctcttcagcagcacccccaagcccaaggccaccctgagcctgctgcagctgggcctggatgagcacaacagagtgaaggtgtaccgcttctag

SEQ ID NO: 18606 - DNA, 1881 bp, synthetic construct
  source 1..1881: mol_type = other DNA; note = Synthetic coding sequence
atgatggccaatgatgccaagccagatgtgaagacagtgcaggtgctgcgggacacagccaaccggctgcgcatccacagcatccgggccacctgtgccagcggcagcggccagctgaccagctgctgcagcgctgctgaggtggtgtctgtgctcttcttccacaccatgaagtacaagcagacagatcctgagcacccagacaatgaccgcttcatcctgagccggggccatgctgcccccatcctgtatgctgcctgggtggaggtgggggacatcagcgagagtgacctgctgaacctgaggaagctgcacagcgacctggagcggcaccccaccccccggctgccctttgtggatgtggccaccggcagcctgggccagggcctgggcacagcctgtggcatggcctacacaggcaagtacctggacaaggccagctacagagtcttctgcctgatgggagatggagagagcagcgagggctctgtgtgggaggcctttgcctttgccagccactacaacctggacaacctggtggccgtgtttgatgtgaaccggctgggccagagcggccctgcccccctggagcacggggctgacatctaccagaactgctgtgaggccttcggctggaacacctacctggtggatggccatgatgtggaggccctgtgccaggccttctggcaggccagccaggtgaagaacaagcccacagccatcgtggccaagaccttcaagggccggggcatccccaacattgaagatgctgagaactggcacggcaagcctgtgcccaaggagcgggcagatgccatcgtgaagctgattgagagccagatccagaccaatgaaaacctgatccccaagagccctgtggaggacagcccccagatcagcatcacagacatcaagatgaccagccccccagcctacaaggtgggggacaagatcgccacccagaagacctacggcctggccctggccaagctgggccgggccaatgaaagagtcatcgtgctgagcggggacaccatgaacagcaccttcagcgagatcttcaggaaggagcaccctgagcgcttcatcgagtgcatcatcgccgagcagaacatggtgtctgtggccctgggctgtgccacccggggccgcaccatcgcctttgctggggcctttgctgccttcttcacccgggcctttgaccagctgaggatgggcgccatcagccaggccaacatcaacctgattggcagccactgcggcgtgtccactggagaagatggagtgtcccagatggccctggaggacctggccatgttccgcagcatccccaactgcaccgtcttctaccccagtgatgccatcagcacagagcacgccatctacctggccgccaacaccaagggcatgtgcttcatccgcaccagccagcctgagacagctgtgatctacaccccccaggagaactttgaaattggccaggccaaggtggtgagacatggagtgaatgacaaggtgaccgtcatcggggccggcgtgaccctgcacgaggccctggaggccgctgaccacctgagccagcagggcatctctgtgcgggtcatcgaccccttcaccatcaagcccctggatgctgccaccatcatcagcagcgccaaggccaccggcggccgggtcatcaccgtggaggaccactaccgggagggcggcatcggggaggccgtgtgtgccgctgtgtcccgggagccagacatcctggtgcaccagctggccgtgtctggagtgccccagaggggcaagaccagcgagctgctggacatgtttggcatcagcaccaggcacatcatcgctgctgtgaccctgaccctgatgaagtag

SEQ ID NO: 18607 - DNA, 999 bp, synthetic construct
  source 1..999: mol_type = other DNA; note = Synthetic coding sequence
atggccaccatcaagtctgagctgatcaagaactttgctgaggaggaggccatccaccacaacaagatcagcatcgtgggcaccggctctgtgggcgtggcctgtgccatcagcatcctgctgaagggcctgagtgatgagctggtgctggtggatgtggatgagggcaagctgaagggggagaccatggacctgcagcacggcagccccttcatgaagatgcccaacatcgtgagcagcaaggactacctggtgacagccaacagcaacctggtgatcatcacagctggggcccggcagaagaagggggagacccggctggacctggtgcagagaaatgtgtccatcttcaagctgatgatccccaacatcacccagtacagcccccactgcaagctgctgattgtgaccaaccctgtggacatcctgacctacgtggcctggaagctgagcggcttccccaagaacagagtgattggcagcggctgcaacctggacagcgcccgcttccgctacttcatcggccagaggctgggcatccacagcgagagctgccacggcctcatcctgggggagcacggggacagctctgtgcctgtgtggagcggcgtgaacattgctggggtgcccctgaaggacctgaacccagacatcggcacagacaaggaccctgagcagtgggagaatgtgcacaagaaggtgatcagcagcggctatgagatggtgaagatgaagggctacacctcctggggcatcagcctgtctgtggccgacctgacagagagcatcctgaagaacctgcggcgggtgcaccctgtgtccaccctgagcaagggcctgtatggcatcaatgaagacatcttcctgtctgtgccctgcatcctgggagaaaatggcatcacagacctgatcaaggtgaagctgaccctggaggaggaggcctgcctgcagaagtctgctgagaccctgtgggagatccagaaggagctgaagctgtag

SEQ ID NO: 18608 - DNA, 972 bp, synthetic construct
  source 1..972: mol_type = other DNA; note = Synthetic coding sequence
atgcctgagatgcctgaggacatggagcaggaggaggtgaacatccccaacagaagagtgctggtgactggagccaccggcctgctgggccgggctgtgcacaaggagttccagcagaacaactggcatgctgtgggctgcggcttccggcgggcccggcccaagtttgagcaggtgaacctgctggacagcaatgctgtgcaccacatcatccatgacttccagccccacgtgattgtgcactgtgccgctgagcggcggccagatgtggtggagaaccagccagatgctgccagccagctgaatgtggatgccagcggcaacctggccaaggaggccgctgctgtgggcgccttcctgatctacatcagcagtgactatgtgtttgatggcaccaaccccccctaccgggaggaggacatcccagcccccctgaacctgtatggcaagaccaagctggatggagagaaggctgtgctggagaacaacctgggcgctgctgtgctgcgcatccccatcctgtatggagaggtggagaagctggaggagagcgctgtgacagtgatgtttgacaaggtgcagttcagcaacaagagcgccaacatggaccactggcagcagcgcttccccacccacgtgaaggatgtggccaccgtgtgccggcagctggccgagaagaggatgctggaccccagcatcaagggcaccttccactggagcggaaatgagcagatgaccaagtatgagatggcctgtgccatcgcagatgccttcaacctgcccagcagccacctgcggcccatcacagacagccctgtgctgggcgcccagaggcccagaaatgcccagctggactgcagcaagctggagaccctgggcatcggccagaggacccccttccgcatcggcatcaaggagagcctgtggcccttcctgattgacaagcgctggaggcagaccgtcttccactag

SEQ ID NO: 18609 - DNA, 3285 bp, synthetic construct
  source 1..3285: mol_type = other DNA; note = Synthetic coding sequence
atggccgagagcagcagcgagagtgaccacttccgctgccgggaccggctgagcccctgggccgcccggagcacccaccggggcaccaggagcctgcccaccgtggaggtgacagagaaggtgaacaccatcaccagcaccctgcaggacaccagcaggaacctgcggcaggtggaccagatgctgggccgctaccgggagtacagcaatggccaggccggggccatcgagcacctgaaggagagcctggagcagagcattgaccagctgcggagccagaggctgctgagaaattctgggggccgcagcatctctgtgaccagcctgagcgccagtgacctggatggcggcaccggcagcgagctgcaccacttcccccccaccagccccctgaaggactatggagacccccagggcatcaagaggatgaggagcaggactggagtgcgctttgtgcaggagacagatgacatgacccagctgcacggcttccaccagagcctgcgggacctgagcagcgagcagatccggctgggagatgacttcaaccgggagctgagccgccgcagcagaagtgatgctgagaccaagagggccctggaggagctgacagagaagctgaatgaggcccagaagcaggaggtggtgtctgacagagtggagcggcggctgcaggagctggagcgggagatgaggacagagcgggagctggtggagcggcggcaggaccagctgggcctgatgagcctgcagctgcaggaggccctgaagaagcaggaggccaaggcagatgagcacgagggcgccatcaagaacaagctgcggcagacagaaacagagaagaaccagctggagcaggagctggagctgagccggcggctgctgaaccagagcgagggcagccgggagaccctgctgcaccaggtggaggagctgcggacccagctgaccaaggccgagggggacaggaagggcctgcagcaccaggtgtcccagatcagcaagcagcagagcaactaccaggatgagcagggcgaggactggaggttcagaagaggagtggagcgggagaagcaggacctggagaagcagatgtctgacctgcgggtgcagctgaacttcagcgccatggccagcgagctggaggaggtgaagcgctgcatggagaggaaggacaaggagaaggcccacctggccagccaggtggagaacctgacccgggagctggagaatggagagaagcagcagctgcagatgctggaccggctgaaggagatccagaaccactttgacacctgtgaggccgagaggaagcacgccgacctgcagatcagcgagctgaccaggcatgctgaagatgccaccaagcaggccgagcgctacctgtctgagctgcagcagagcgaggccctgaaggaggaggccgagaagaggcgggaggacctgaagctgaaggcccaggagagcatccggcagtggaagctgaagcacaagaagctggagcgggccctggagaagcagagcgagaccgtggatgagctgaccgggaagaacaaccagatcctgaaggagaaggatgagctgaagacccagctgtatgctgccctgcagcagatcgagaacctgaggaaggagctgaatgatgtgctgaccaagagggccctgcaggaggaggagctgcacagcaaggaggagaagctgcgggacatcaagagccaccaggccgacctggagctggaggtgaagaacagcctggacaccatccaccggctggagagcgagctgaagaagcagagcaagatccagagccagatgaaggtggagaaggcccacctggaggaggagattgctgagctgaagaagagccaggcccaggacaaggccaagctgctggagatgcaggagagcatcaaggacctgagcgccatccgggctgacctggccaacaagctggccgaggaggagcgggccaagaaggctgtgctgaaggacctgagtgacctgacagcccaggccaagagcagagatgaggagacagccaccatcatcacccagctgaagctggagagagatgtgcaccagcgggagctgaaggacctgaccagcagcctgcagagcgtgaagaccaagcatgagcagaacatccaggagctgatgaagcacttcaagaaggagaagtctgaggccgagaaccacatccgcaccctgaaggccgagagcctggaggagaagaacatggccaagatccaccggggccagctggagaagctgaagagccagtgtgaccggctgacagaggagctgacccagaatgaaaatgaaaacaagaagctgaagctgaagtaccagtgcctgaaggaccagctggaggagcgggagaagcacatcagcattgaggaggagcacctgcggaggatggaggaggcccggctgcagctgaaggaccagctgctgtgcctggagacagagcaggagagcatcctgggcgtgattggcaaggagattgatgctgcctgcaagaccttcagcaaggacagcgtggagaagctgaaggtgttcagcagcggccctgacatccactatgacccccaccgctggctggccgagagcaagaccaagctgcagtggctgtgtgaggagctgaaggagagagaaaatcgggagaagaacctgcggcaccagctgatgctgtgccggcagcagctgaggaacctgacagagaacaaggagagcgagctgcagtgcctcttccagcagatcgagcggcaggagcagctgctggatgagatccaccgggagaagagggacctgctggaggagacccagaggaaggatgaggagatgggcagcctgcaggacagagtcatcgccctggagaccagcacccaggtggccctggaccacctggagagcgtgcctgagaagctgagcctgctggaggacttcaaggacttccgggacagctgcagcagcagcgagaggacagatggccgctacagcaagtacagagtgagaagaaacagcctgcagcaccaccaggatgacaccaagtaccgcaccaagagcttcaagggggacaggaccttcctggagggcagccacacccggggcctggaccacagcagctcctggcaggaccacagccgcttcctgagcagcccccgcttctcctatgtgaacagcttcaccaagaggacagtggccccagattctgccagcaacaaggaggatgccaccatgaatggcaccagcagccagcccaagaaggaggagtatggcagctag

SEQ ID NO: 18610 - DNA, 1011 bp, synthetic construct
  source 1..1011: mol_type = other DNA; note = Synthetic coding sequence
atgaagaaggagcacgtgctgcactgccagttcagcgcctggtaccccttcttccggggcgtgaccatcaagagcgtcatcctgcccctgccccagaatgtgaaggactacctgctggatgatggcaccctggtggtgtctggaagagatgacccccccacccacagccagcctgacagtgatgatgaggccgaggagatccagtggagcgatgatgaaaatacagccaccctgacagcccctgagttccctgagtttgccaccaaggtgcaggaggccatcaacagcctgggcggcagcgtcttccccaagctgaactggagcgcccccagagatgcctactggatcgccatgaacagcagcctgaagtgcaagaccctgagtgacatcttcctgctcttcaagagcagtgacttcatcacccgggacttcacccagcccttcatccactgcacagatgacagcccagacccctgcatcgagtatgagctggtgctgaggaagtggtgtgagctgatccctggagctgagttccgctgctttgtgaaggagaacaagctgattggcatcagccagagggactacacccagtactatgaccacatcagcaagcagaaggaggagatccgccgctgcatccaggacttcttcaagaagcacatccagtacaagttcctggatgaggactttgtgtttgacatctacagagacagccggggcaaggtgtggctgattgacttcaacccctttggagaggtgacagacagcctgctcttcacctgggaggagctgatcagcgagaacaacctgaatggagacttcagcgaggtggatgcccaggagcaggacagccctgccttccgctgcaccaacagcgaggtgacagtgcagcccagcccctacctgagctaccgcctgcccaaggactttgtggacctgagcactggagaagatgcccacaagctgattgacttcctgaagctgaagaggaaccagcaggaggatgactag

SEQ ID NO: 18611 - DNA, 1248 bp, synthetic construct
  source 1..1248: mol_type = other DNA; note = Synthetic coding sequence
atgaagctgagcctgaccaaggtggtgaatggctgccgcctgggcaagatcaagaacctgggcaagacaggagaccacaccatggacatccctggctgcctgctgtacaccaagacaggcagcgccccccacctgacccaccacaccctgcacaacatccacggcgtgcctgccatggcccagctgaccctgagcagcctggccgagcaccacgaggtgctgacagagtacaaggagggcgtgggcaagttcatcggcatgcctgagagcctgctgtactgcagcctgcatgaccctgtgagcccctgcccagctggctacgtgaccaacaagtctgtgtctgtgtggagcgtggccggccgggtggagatgacagtgtccaagttcatggccatccagaaggccctgcagcctgactggttccagtgcctgagtgatggagaggtgtcctgcaaggaggccaccagcatcaagagggtgaggaagtctgtggacaggagcctgctcttcctggacaactgcctgcggctgcaggaggagagcgaggtgctgcagaagagcgtcatcatcggcgtgattgaaggaggagatgtgatggaggagcggctgcggagcgcccgggagacagccaagaggcctgtgggcggcttcctgctggatggcttccagggcaaccccaccaccctggaggcccggctgcggctgctgagctctgtgacagctgagctgcctgaggacaagcccaggctcatcagcggcgtgtccaggccagatgaggtgctggagtgcatcgagcggggcgtggacctgtttgagagcttcttcccctaccaggtgacagagcggggctgtgccctgaccttctcctttgactaccagcccaaccctgaggagaccctgctgcagcagaatggcacccaggaggagatcaagtgcatggaccagatcaagaagattgagaccaccggctgcaaccaggagatcaccagctttgagatcaacctgaaggagaagaagtaccaggaggacttcaaccccctggtgcggggctgcagctgctactgctgcaagaaccacacccgggcctacatccaccacctgctggtgaccaatgagctgctggccggcgtgctgctgatgatgcacaactttgagcactacttcggcttcttccactacatccgggaggccctgaagagtgacaagctggcccagctgaaggagctgatccaccggcaggccagctag

SEQ ID NO: 18612 - DNA, 1770 bp, synthetic construct
  source 1..1770: mol_type = other DNA; note = Synthetic coding sequence
atgcccaccgtgtctgtgaagagggacctgctcttccaggccctgggccgcacctacacagatgaggagtttgatgagctgtgctttgaatttggcctggagctggatgagatcaccagcgagaaggagatcatcagcaaggagcagggcaatgtgaaggctgctggggccagtgatgtggtgctgtacaagattgatgtgcctgccaacagatatgacctgctgtgcctggagggcctggtgcggggcctgcaggtgttcaaggagcgcatcaaggcccctgtgtacaagagggtgatgccagatggcaagatccagaagctgatcatcacagaggagacagccaagatccggccctttgctgtggccgctgtgctgaggaacatcaagttcaccaaggacagatatgacagcttcatcgagctgcaggagaagctgcaccagaacatctgcaggaagagggccctggtggccatcggcacccatgacctggacaccctgagcggccccttcacctacacagccaagaggcccagcgacatcaagttcaagcccctgaacaagaccaaggagtacacagcctgtgagctgatgaacatctacaagacagacaaccacctgaagcactacctgcacatcatcgagaacaagcccctgtaccctgtgatctatgacagcaatggagtggtgctgtccatgccacccatcatcaacggggaccacagccgcatcaccgtgaacaccaggaacatcttcatcgagtgcaccggcacagacttcaccaaggccaagatcgtgctggacatcatcgtgaccatgttttctgagtactgtgagaaccagttcaccgtggaggccgctgaggtggtgttccccaacgggaagagccacaccttccctgagctggcctacaggaaggagatggtgcgggctgacctgatcaacaagaaggtgggcatccgggagaccccagagaacctggccaagctgctgaccaggatgtacctgaagtctgaggtgattggagatggcaaccagattgaaattgagatcccccccaccagggctgacatcatccacgcctgtgacatcgtggaggatgctgccatcgcctacggctacaacaacatccagatgaccctgcccaagacctacaccatcgccaaccagttccccctgaacaagctgacagagctgctgcggcatgacatggctgctgctggcttcacagaggccctgacctttgccctgtgcagccaggaggacattgctgacaagctgggcgtggacatcagcgccaccaaggctgtgcacatcagcaaccccaagacagctgagttccaggtggcccggaccaccctgctgcccggcctgctgaagaccatcgccgccaacaggaagatgcccctgcccctgaagctgtttgagatcagtgacatcgtcatcaaggacagcaacacagatgtgggcgccaagaactaccgccacctgtgtgctgtgtactacaacaagaaccctggctttgagatcatccacggcctgctggaccgcatcatgcagctgctggatgtgcccccaggagaggacaagggcggctacgtgatcaaggccagcgagggccctgccttcttccctggccgctgtgccgagatctttgcccggggccagagcgtgggcaagctgggcgtgctgcacccagatgtgatcaccaagtttgagctgaccatgccctgcagcagcctggagatcaacgtgggccccttcctgtag

SEQ ID NO: 18613 - DNA, 477 bp, synthetic construct
  source 1..477: mol_type = other DNA; note = Synthetic coding sequence
atggccgcccagggcgtgggccctggccctggcagcgctgcccctcctggcctggaggccgcccggcagaagctggccctgcggaggaagaaggtgctgagcacagaggagatggagctgtatgagctggcccaggccgccggcggggccattgatcctgatgtgttcaagatcctggtggacctgctgaagctgaatgtggcccccctggccgtgttccagatgctgaagtccatgtgtgccggccagaggctggccagcgagccccaggaccctgctgctgtgtccctgcccaccagctctgtgcctgagacccggggcaggaacaagggcagcgctgccctgggcggggccctggccctggccgagaggagcagccgggagggcagcagccagaggatgccccggcagcccagcgccacccggctgcccaagggcggcggccctgggaagagccccacccggggcagcacctag

SEQ ID NO: 18614 - DNA, 675 bp, synthetic construct
  source 1..675: mol_type = other DNA; note = Synthetic coding sequence
atggtggaggatgagctggccctgtttgacaagagcatcaatgagttctggaacaagttcaagagcacagacaccagctgccagatggccggcctgcgggacacctacaaggacagcatcaaggcctttgctgagaagctgtctgtgaagctgaaggaggaggagaggatggtggagatgttcctggagtaccagaaccagatcagccggcagaacaagctgatccaggagaagaaggacaacctgctgaagctgattgctgaggtgaagggcaagaagcaggagctggaggtgctgacagccaacatccaggacctgaaggaggagtacagcaggaagaaggagaccatcagcacagccaacaaggccaatgctgagcggctgaagaggctgcagaagtctgctgacctgtacaaggaccggctgggcctggagatcaggaagatctacggggagaagctgcagttcatcttcaccaacatcgaccccaagaaccctgagagccccttcatgttcagcctgcacctgaatgaggcccgggactatgaggtgtctgattctgccccccacctggagggcctggccgagttccaggagaatgtgaggaagaccaacaacttcagcgccttcctggccaacgtgaggaaggccttcaccgccaccgtgtacaactag

SEQ ID NO: 18615 - DNA, 1728 bp, synthetic construct
  source 1..1728: mol_type = other DNA; note = Synthetic coding sequence
atgaagctgacagacagcaccaagggctggatcgtgtgggccgccctggacagctccatgaggggcatgagcctgtctgctggcagcagccccctgcacagccccaagatcaccccccacaccagccctgcccccaggagaagaagccacacccccaacccagccagctacatggtgcccagcagcgccagcacctctgtgaacaaccctgtgtcccagacccccagcagcggccaggtgatccagaaggagaccgtgggcggcaccacctacttctacacagacaccaccccagcccccctgaccggcatggtgttccccaactaccacatctacccacccacagccccccacgtggcctacatgcagcccaaggccaatgcccccagcttcttcatggctgatgagctgcggcaggagctgatcaacagacacctgatcaccatggcccagattgaccaggccgacatgcctgctgtgcccacagaggtggacagctaccacagcctcttccccctggagcccctgcccccacccaaccgcatccagaagagcagcaactttggctacatcaccagctgctacaaggctgtgaacagcaaggatgacctgccctactgcctgcggcgcatccacggcttccggctggtgaacaccaagtgcatggtgctggtggacatgtggaagaagatccagcacagcaacatcgtgaccctgcgggaggtgttcaccaccaaggcctttgctgagcccagcctggtgtttgcctatgacttccacgccggcggggagaccatgatgagccgccacttcaatgaccccaatgctgatgcctacttcaccaagaggaagtggggccagcacgagggccccctgccccggcagcacgccggcctgctgcctgagagcctcatctgggcctacatcgtgcagctgagcagcgccctgcggaccatccacacagctggcctggcctgccgggtgatggaccccaccaagatcctgatcaccgggaagacccggctgcgggtgaactgtgtgggcgtgtttgatgtgctgacctttgacaacagccagaacaacaaccccctggccctgatggcccagtaccagcaggccgacctgatcagcctgggcaaggtggtgctggccctggcctgcaacagcctggccggcatccagcgggagaacctgcagaaggccatggagctggtgaccatcaactacagcagtgacctgaagaacctgatcctgtacctgctgacagaccagaacaggatgaggtctgtgaatgacatcatgcccatgattggagcccgcttctacacccagctggatgctgcccagatgagaaatgatgtgattgaggaggacctggccaaggaggtgcagaatggccgcctcttccggctgctggccaagctgggcaccatcaatgaaagacctgagttccagaaggaccccacctggagcgagactggagaccgctacctgctgaagctgttccgggaccacctgttccaccaggtgacagaagctggggccccctggattgacctgagccacatcatcagctgcctgaacaagctggatgctggggtgcctgagaagatcagcctcatcagcagagatgagaagtctgtgctggtggtgacctacagcgacctgaagcgctgctttgagaacaccttccaggagctgattgctgctgccaacggccagctgtag

SEQ ID NO: 18616 - DNA, 1785 bp, synthetic construct
  source 1..1785: mol_type = other DNA; note = Synthetic coding sequence
atggagagcaaccacaagtctggagatggcctgagcggcacccagaaggaggccgccctgcgggccctggtgcagaggacaggctacagcctggtgcaggagaatggccagaggaaatatggaggccccccacctggctgggatgctgcccctcctgagcggggctgtgagatcttcatcggcaagctgccccgggacctgtttgaagatgagctgatccccctgtgtgagaagattggcaagatctatgagatgaggatgatgatggacttcaacggcaacaacagaggctacgcctttgtgaccttcagcaacaaggtggaggccaagaatgccatcaagcagctgaacaactatgagatcagaaatggccgcctgctgggcgtgtgtgcctctgtggacaactgccgcctgtttgtgggcggcatccccaagaccaagaagcgggaggagatcctgtctgagatgaagaaggtgacagagggcgtggtggatgtgattgtgtaccccagcgctgctgacaagaccaagaacagaggatttgcctttgtggagtatgagagccacagagctgctgccatggcccggaggaagctgctgcccggccgcatccagctgtggggccatggaattgctgtggactgggccgagcctgaggtggaggtggatgaggacaccatgagctctgtgaagatcctgtatgtgaggaacctgatgctgagcaccagcgaggagatgattgagaaggagttcaacaacatcaagccaggagctgtggagcgggtgaagaagatccgggactatgcctttgtgcacttcagcaacagagaagatgctgtggaggccatgaaggccctgaatggcaaggtgctggatggcagccccatcgaggtgaccctggccaagcctgtggacaaggacagctatgtgcgctacacccggggcaccggcggccggggcaccatgctgcagggcgagtacacctacagcctgggccaggtgtatgaccccaccaccacctacctgggcgcccctgtgttctacgccccccagacctacgccgccatccccagcctgcacttccctgccaccaagggccacctgagcaacagagccatcatccgggcccccagcgtgcgggagatctacatgaatgtgcctgtgggcgctgctggggtgcggggcctgggcggccggggctacctggcctacacaggcctgggccggggctaccaggtgaagggggacaagcgggaggacaagctgtatgacatcctgcccggcatggagctgacccccatgaaccctgtgaccctgaagccccagggcatcaagctggccccccagatcctggaggagatctgccagaagaacaactggggccagcctgtgtaccagctgcacagcgccatcggccaggaccagaggcagctgttcctgtacaagatcaccatcccagccctggccagccagaacccagccatccaccccttcaccccacccaagctgagcgcctttgtggatgaggccaagacctacgccgctgagtacaccctgcagaccctgggcatccccacagatggaggagatggcaccatggccacagctgctgctgctgccacagccttccctggctatgctgtgcccaatgccacagcccctgtgtctgctgcccagctgaagcaggccgtgaccctgggccaggacctggccgcctacaccacctatgaggtgtaccccacctttgctgtgacagcccggggagatggctacggcaccttctag

SEQ ID NO: 18617 - DNA, 1167 bp, synthetic construct
  source 1..1167: mol_type = other DNA; note = Synthetic coding sequence
atgctggagggctcctggatcaacagaagagaggacaagctgggcgtgtacagcctggtgcacttcagccccaagatgctgggctctgtggccaccaccctgcccctgagcagcagcaacagcagcggcatgcccctgggctactacctgagcagcccccagatcagccgggtgaccatcagcaccaccggccagctgaccagcaaggccaccgtgggcagctgcagccgggtggagaacagcctggatgccagccccttctctgtgcccaagaagcaggatgagagccccatgattggagatggagaggactacttcctgagcctgtttggagacagcaagaagctgacagcccacagcaactacacccagaagaccctgaagtacttctccatgatcctggaggaggtgggccagttcaccagcagcagcctgggagatgtggagattgctgaggtgaatgtgaagggcctgtttgtgaagctgatcaacagcagcctggacaaggagatggccatcggggaccacatcctgcagcagaatgtgaatggccagaccatcagcctgtaccgcttcctgcccaacatcgtgatgcaggccaacagcacagtgacagtgtgggccgccgccagcgaggccaagcaccagcccccaagtgacttcctgtggaaggagcaggacaagttccgggccagcccagactgcatcaccatcctgtgcaagcccaacggccaggccatcgcctggtacacccccatccactggaagcaggcctgggagaagctggatgctgatgtggagttcaaccgctgcagcgtggtgagccccaccttcaggaagagggtcttccagtggacagccagcacagccaccatcaccaaggagaagcaggaccagcccaagaaggacatcagcaactaccaggtggagcaggcccaggtgctgctgaagcgggagaaggagatccccccaacagtgttccccaacagaagcccctggtgccagaacccctacgtgtctgcccacccctactgccccctcatcgagccccacaacaccagcacagctgggggccgcctggaccggcagcccaggaccaggagcacccggcccaacagagccagcggcagcaagaagaagaagaccagcgagagccagaagcagtag

SEQ ID NO: 18618 - DNA, 744 bp, synthetic construct
  source 1..744: mol_type = other DNA; note = Synthetic coding sequence
atggaggagcagccccagatgcaggatgctgatgagcctgctgacagcggcggggagggccgggccggcggccccccccaggtggccggggcccaggccgcctgcagcgaggacaggatgaccctgctgctgcggctgcgggcccagaccaagcagcagctgctggagtacaagtccatggtggatgccagcgaggagaagaccccagagcagatcatgcaggagaagcagatcgaggccaagattgaggacctggagaatgaaattgaggaggtgaaggtggcctttgagatcaagaagctggccctggacaggatgaggctgagcacagccctgaagaagaacctggagaagatcagccggcagagctctgtgctgatggacaacatgaagcacctgctggagctgaacaagctgatcatgaagagccagcaggagagctgggacctggaggagaagctgctggacatcaggaagaagaggctgcagctgaagcaggccagcgagagcaagctgctggagatccagacagagaagaacaagcagaagattgacctggacagcatggagaacagcgagcgcatcaagatcatccggcagaacctgcagatggagatcaagatcaccaccgtcatccagcacgtgttccagaacctgatcctgggcagcaaggtgaactgggccgaggaccctgccctgaaggagatcgtgctgcagctggagaagaatgtggacatgatgtag

SEQ ID NO: 18619 - DNA, 1458 bp, synthetic construct
  source 1..1458: mol_type = other DNA; note = Synthetic coding sequence
atggagttcctgggcaccacccagacagccagctactgcggccccaagaagtgctgcggcctgaccagcctgcctgctgtgcaggcccctgtgatccaggagtgctaccagccctactacctgcccggctaccgctacctgaacagctggaggcccagcctcttctacaagatcgccaacgtgcagacctgcccagatgagagcaccagcaccctgcggccccccaccatcctgcccaccctgcggagcgccctcttcagccgctacagcccccatgactgggaccagagcaaccagctgcaggtgagaggagctgaggccagccggctgtgggccagccggctgacagatgacagcatgaggctgctgcaggacaaggaccagctgacccaccagatgcaggagggcacctgcaggaacctgggccagaggctgagtgacatcggcttctggaagtctgagctgtcctatgagctggaccggctgctgacagagaaccagaacctggagaccgtgaagaggcggctggagtgtgccgccaatgaggtgaactgccccctgcaggtggccctggagtgcctgtaccaccgggagaagagaattggaattgacctggtgcatgacaacgtggagaagaacctgatccgggaggtggacctgctgaagtgctgccaggagcagatgaggaagctggcccagagaattgacatccagatgagggacaacagagatgcccagcacgtgctggagcgggacctggaggacaagagcagcgcccagtgcattgatgagaagtgcttcaacctgaggaacaccagtgactgcatctccttcttccacggcatggagaagattgatggcaccatctctgtgcctgagacctgggccaagttcagcaatgacaacatcaagcacagccagaacatgagggccaacagcatccagctgcgggaggaggccgagcacctgtttgagaccctgagtgaccagatgtggaggcagttcacagacaccaacctggccttcaatgcccgcatcagcgaggtgacagatgtgaagaacaagctgcagacccagctggccaagaccctgcaggagatcttccaggccgagaacaccatcatgctgctggagaggagcatcatggccaaggagggccccctgaaggtggcccagacccggctggagtgcaggacccggcggcccaacatggagctgtgccgggacatcccccagctgaagctggtgaatgaggtgttcaccattgatgacaccctgcagaccctgaagctgcggctgcgggagacccaggacaccctgcagctgctggtgatgaccaagtgccgcctggagcacgagctggccatcaaggccaacaccctgtgcatcgacaaggagaagtgcatgggcatgaggaagaccttcccctgcaccccccggctggtgggccacacctag

SEQ ID NO: 18620 - DNA, 837 bp, synthetic construct
  source 1..837: mol_type = other DNA; note = Synthetic coding sequence
atgggcaagagcagcgagtggtgtgaaagaattgctggcatccagaagtttgtgctggagaagtggaccaagaaggccaagccagaggacaccctgaacctgtgccagctgctgaacaatgacctggccagcacagtggtgtcctaccccaggagatttgtgggcctgggcaccctgcccatgcaggcccctgagctggccgtgaaggagatggagcgctgtgtgaaggagctgggcttccctggggtgcagatcggcacccacgtgaatgagtgggacctgaatgcccaggagctgtttcctgtgtatgctgctgctgagcggctgaagtgcagcctgtttgtgcacccctgggacatgcagatggatggccgcatggccaagtactggctgccctggctggtgggcatgcctgctgagaccaccatcgccatctgcagcatgatcatgggcggcgtgtttgagaagttccccaagctgaaggtgtgctttgcccacggcggcggggccttccccttcaccgtgggccgcatcagccacggcttctccatgaggccagacctgtgtgcccaggacaaccccatgaaccccaagaagtacctgggcagcttctacacagatgccctggtgcatgaccccctgagcctgaagctgctgacagatgtgattggcaaggacaaggtgatcctgggcacagactaccccttccccctgggggagctggagcccgggaagctgattgaatccatggaggagtttgatgaggagaccaagaacaagctgaaggctggaaatgccctggccttcctgggcctggagaggaagcagtttgaatag

SEQ ID NO: 18621 - DNA, 2478 bp, synthetic construct
  source 1..2478: mol_type = other DNA; note = Synthetic coding sequence
atgagcagcagccctgtgaatgtgaagaagctgaaggtgtctgagctgaaggaggagctgaagaagaggcggctgagtgacaagggcctgaaggccgagctgatggagcggctgcaggccgccctggatgatgaggaggccggcggccgcccagccatggagcctggaaatggcagcctggacctgggcggggacagcgctggccgcagcggggccggcctggagcaggaggccgctgctggaggagatgaggaggaggaggaggaggaggaggaggaggagggcatcagcgccctggatggagaccagatggagctgggggaggagaatggagctgctggagctgctgacagcggccccatggaggaggaggaggccgcctctgaagatgaaaatggagatgaccagggcttccaggagggggaggatgagctgggagatgaggaggagggcgctggagatgaaaatggccacggggagcagcagccccagcccccagccacccagcagcagcagccccagcagcagagaggagctgccaaggaggccgccggcaagagcagcggccccaccagcctgtttgctgtgacagtggcccctcctggggcccggcagggccagcagcaggccggcggcaagaagaaggccgagggcggcggcggcggcggccggcctggggccccagctgctggagatggcaagacagagcagaagggcggggacaagaagaggggcgtgaagaggcccagagaagatcatggccggggctactttgagtacatcgaggagaacaagtacagccgggccaagagcccccagccccctgtggaggaggaggatgagcactttgatgacacagtggtgtgcctggacacctacaactgtgacctgcacttcaagatcagccgggaccggctgagcgccagcagcctgaccatggagagctttgccttcctgtgggccggcggccgggccagctatggagtgtccaagggcaaggtgtgctttgagatgaaggtgacagagaagatccctgtgcgccacctgtacaccaaggacatcgacatccacgaggtgagaattggctggagcctgaccaccagcggcatgctgctgggggaggaggagttctcctatggctacagcctgaagggcatcaagacctgcaactgtgaaacagaggactatggagagaagtttgatgaaaatgatgtgatcacctgctttgccaactttgaaagtgatgaggtggagctgtcctatgccaagaatggccaggacctgggcgtggccttcaagatcagcaaggaggtgctggccggccggcccctcttcccccacgtgctgtgccacaactgtgctgtggagttcaactttggccagaaggagaagccctacttccccatccctgaggagtacaccttcatccagaatgtgcccctggaggacagagtgcggggccccaagggccctgaggagaagaaggactgtgaggtggtgatgatgattggcctgcccggggccggcaagaccacctgggtgaccaagcacgccgctgagaaccctgggaagtacaacatcctgggcaccaacaccatcatggacaagatgatggtggccggcttcaagaagcagatggctgacaccgggaagctgaacaccctgctgcagagggccccccagtgcctgggcaagttcattgaaattgctgccaggaagaagaggaacttcatcctggaccagaccaacgtgtctgctgctgcccagaggaggaagatgtgcctgtttgctggcttccagaggaaggctgtggtggtgtgccccaaggatgaggactacaagcagaggacccagaagaaggccgaggtggagggcaaggacctgcctgagcacgctgtgctgaagatgaagggcaacttcaccctgcctgaggtggctgaatgttttgatgagatcacctacgtggagctgcagaaggaggaggcccagaagctgctggagcagtacaaggaggagagcaagaaggccctgcccccagagaagaagcagaacacaggcagcaagaagagcaacaagaacaagagcggcaagaaccagttcaacagaggaggcggccaccggggccggggcggcttcaacatgaggggcggcaacttccggggcggggcccctggcaacagaggaggctacaacagaagaggcaacatgccccagaggggcggcggcggcggcggcagcggcggcatcggctacccctacccccgggcccctgtgtttcctggccggggcagctacagcaacagaggcaactacaacagaggaggcatgcccaacagaggcaactacaaccagaacttccggggccggggcaacaacagaggctacaagaaccagagccagggctacaaccagtggcagcagggccagttctggggccagaagccctggagccagcactaccaccagggctactactag

SEQ ID NO: 18622 - DNA, 945 bp, synthetic construct
  source 1..945: mol_type = other DNA; note = Synthetic coding sequence
atgcagaatgtcatcaacacagtgaagggcaaggccctggaggtggccgagtacctgacccctgtgctgaaggagagcaagttcaaggagactggagtcatcaccccagaggagtttgtggccgccggggaccacctggtgcaccactgccccacctggcagtgggccactggagaggagctgaaggtgaaggcctacctgcccaccgggaagcagttcctggtgaccaagaatgtgccctgctacaagcgctgcaagcagatggagtacagtgatgagctggaggccatcatcgaggaggatgatggagatggcggctgggtggacacctaccacaacacaggcatcaccggcatcacagaggccgtgaaggagatcaccctggagaacaaggacaacatccggctgcaggactgcagcgccctgtgtgaggaggaggaggatgaagatgaaggagaggccgctgacatggaggagtatgaggagagcggcctgctggagacagatgaggccaccctggacaccaggaagatcgtggaggcctgcaaggccaagacagatgctggaggagaagatgccatcctgcagaccaggacctatgacctgtacatcacctatgacaagtactaccagaccccccggctgtggctgtttggctatgatgagcagaggcagcccctgactgtggagcacatgtatgaggacatcagccaggaccacgtgaagaagacagtgaccatcgagaaccacccccacctgcccccaccacccatgtgcagcgtgcacccctgcagacatgctgaggtgatgaagaagatcatcgagaccgtggccgagggcggcggggagctgggcgtgcacatgtacctgctgatcttcctgaagtttgtgcaggccgtcatccccaccatcgagtatgactacaccaggcacttcaccatgtag

SEQ ID NO: 18623 - DNA, 900 bp, synthetic construct
  source 1..900: mol_type = other DNA; note = Synthetic coding sequence
atggtggacaagaagctggtggtggtgtttggaggcactggagcccagggcggctctgtggcccggaccctgctggaggatggcaccttcaaggtgcgggtggtgaccaggaaccccaggaagaaggccgccaaggagctgcggctgcagggcgctgaggtggtgcagggcgaccaggatgaccaggtgatcatggagctggccctgaatggagcctatgccaccttcatcgtgaccaactactgggagagctgcagccaggagcaggaggtgaagcagggcaagctgctggccgacctggcccggcggctgggcctgcactacgtggtgtacagcggcctggagaacatcaagaagctgacagctggccgcctggccgccgcccactttgatggaaaaggagaggtggaggagtacttccgggacattggagtgcccatgacctctgtgcggctgccctgctactttgagaacctgctgagccacttcctgccccagaaggccccagatggcaagagctacctgctgagcctgcccactggagatgtgcccatggatggcatgtctgtgtctgacctgggccctgtggtgctgagcctgctgaagatgcctgagaagtatgtgggccagaacatcggcctgagcacctgccgccacacagctgaggagtatgctgccctgctgaccaagcacaccaggaaggtggtgcatgatgccaagatgaccccagaggactatgagaagctgggcttccctggggcccgggacctggccaacatgttccgcttctacgccctgcggccagaccgggacatcgagctgaccctgcggctgaaccccaaggccctgaccctggaccagtggctggagcagcacaagggggacttcaacctgctgtag

SEQ ID NO: 18624 - DNA, 2571 bp, synthetic construct
  source 1..2571: mol_type = other DNA; note = Synthetic coding sequence
atggacatcagcaagggcctgcccggcatgcagggcggcctgcacatctggatcagcgagaacaggaagatggtgcctgtgcctgagggcgcctacggcaacttctttgaggagcactgctacgtgatcctgcacgtgccccagagccccaaggccacccagggcgccagcagtgacctgcactactgggtgggcaagcaggccggggctgaggcccagggcgctgctgaggccttccagcagaggctgcaggatgagctgggcggccagacagtgctgcaccgggaggcccagggccacgagagtgactgcttctgcagctacttccggcccggcatcatctacagaaaaggaggcctggccagtgacctgaagcacgtggagaccaacctcttcaacatccagaggctgctgcacatcaagggcaggaagcacgtgtctgccacagaggtggagctgtcctggaacagcttcaacaagggggacatcttcctgctggacctgggcaagatgatgatccagtggaatggccccaagaccagcatcagcgagaaggcccggggcctggccctgacctacagcctgcgggaccgggagcggggcggcggccgggcccagattggagtggtggatgatgaggccaaggccccagacctgatgcagatcatggaggccgtgctgggcagaagagtgggcagcctgcgggccgccacccccagcaaggacatcaaccagctgcagaaggccaacgtgcggctgtaccacgtgtatgagaagggcaaggacctggtggtgctggagctggccaccccacccctgacccaggacctgctgcaggaggaggacttctacatcctggaccagggcggcttcaagatctacgtgtggcagggccgcatgagcagcctgcaggagaggaaggccgccttcagcagagctgtgggcttcatccaggccaagggctaccccacctacaccaacgtggaggtggtgaatgatggagctgagagcgctgccttcaagcagctgttccgcacctggagcgagaagagaagaagaaaccagaagctgggcggccgggacaagagcatccacgtgaagctggatgtgggcaagctgcacacccagcccaagctggccgcccagctgaggatggtggatgatggcagcggcaaggtggaggtgtggtgcatccaggacctgcaccggcagcctgtggaccccaagagacatggccagctgtgtgccggcaactgctacctggtgctgtacacctaccagaggctgggccgggtgcagtacatcctgtacctgtggcagggccaccaggccacagcagatgaaattgaggccctgaacagcaatgctgaggagctggatgtgatgtatggaggagtgctggtgcaggagcacgtgaccatgggcagcgagcccccccacttcctggccatcttccagggccagctggtgatcttccaggagcgggccggccaccacggcaagggccagagcgccagcaccaccaggctcttccaggtgcagggcacagacagccacaacaccaggaccatggaggtgcctgcccgggccagcagcctgaacagcagtgacatcttcctgctggtgacagcctctgtgtgctacctgtggtttgggaagggctgcaatggagaccagcgggagatggcccgggtggtggtgaccgtcatcagcaggaagaatgaggagaccgtgctggagggccaggagcccccccacttctgggaggccctgggcggccgggccccctaccccagcaacaagaggctgcctgaggaggtgcccagcttccagccccggctgtttgagtgcagcagccacatgggctgcctggtgctggccgaggtgggcttcttcagccaggaggacctggacaagtatgacatcatgctgctggacacctggcaggagatcttcctgtggctgggggaggccgccagcgagtggaaggaggccgtggcctggggccaggagtacctgaagacccaccctgctggccgcagccctgccacccccatcgtgctggtgaagcagggccacgagccccccaccttcatcggctggttcttcacctgggacccctacaagtggaccagccaccccagccacaaggaggtggtggatggcagccctgctgctgccagcaccatcagcgagatcacagctgaggtgaacaacctgcggctgagccgctggccaggaaatggccgggccggggctgtggccctgcaggccctgaagggcagccaggacagcagtgaaaatgacctggtgcgcagccccaagtctgctggcagcaggaccagcagctctgtgagcagcaccagcgccaccatcaatggaggcctgcggcgggagcagctgatgcaccaggccgtggaggacctgcctgagggcgtggaccctgcccggcgggagttctacctgagtgacagcgacttccaggacatctttgggaagagcaaggaggagttctacagcatggccacctggaggcagaggcaggagaagaagcagctgggcttcttctag

SEQ ID NO: 18625 - DNA, 987 bp, synthetic construct
  source 1..987: mol_type = other DNA; note = Synthetic coding sequence
atggaggccaacggcagccagggcaccagcggcagcgccaatgacagccagcacgaccccgggaagatgtttattggaggcctgtcctggcagaccagcccagacagcctgcgggactacttcagcaagtttggagagatccgggagtgcatggtgatgagggaccccaccaccaagaggagccggggcttcggctttgtgacctttgctgaccctgcctctgtggacaaggtgctgggccagccccaccacgagctggacagcaagaccatcgaccccaaggtggccttcccccggcgggcccagcccaagatggtgaccaggaccaagaagatctttgtgggcggcctgagcgccaacacagtggtggaggatgtgaagcagtactttgagcagtttgggaaggtggaggatgccatgctgatgtttgacaagaccaccaacagacaccggggctttggatttgtgacctttgaaaatgaagatgtggtggagaaggtgtgtgagatccacttccacgagatcaacaacaagatggtggagtgcaagaaggcccagcccaaggaggtgatgtttcctcctggcacccggggccgggcccggggcctgccctacaccatggatgccttcatgctgggcatgggcatgctgggctaccccaactttgtggccacctacggccggggctacccaggctttgcccccagctatggctaccagtttcctggcttccctgctgctgcctacggccctgtggccgctgctgctgtggccgccgcccggggcagcggcagcaacccagcccggcctgggggcttccctggggccaacagccctggccctgtggccgacctgtatggccctgccagccaggacagcggcgtgggcaactacatctctgctgccagcccccagcccggcagcggcttcggccacggcattgctggccccctgattgccacagccttcaccaacggctaccactag

SEQ ID NO: 18626 - DNA, 654 bp, synthetic construct
  source 1..654: mol_type = other DNA; note = Synthetic coding sequence
atggagagcgtggccctgtacagcttccaggccacagaaagtgatgagctggccttcaacaagggggacaccctgaagatcctgaacatggaggatgaccagaactggtacaaggccgagctgcggggcgtggagggcttcatccccaagaactacatccgggtgaagccccacccctggtacagcggccgcatcagccggcagctggccgaggagatcctgatgaagaggaaccacctgggcgccttcctgatccgggagagcgagagcagccctggagagttctctgtgtctgtgaactatggagaccaggtgcagcacttcaaggtgctgcgggaggccagcggcaagtacttcctgtgggaggagaagttcaacagcctgaatgagctggtggacttctaccgcaccaccaccatcgccaagaagaggcagatcttcctgagagatgaggagcccctgctgaagagccctggggcctgctttgcccaggcccagtttgacttcagcgcccaggaccccagccagctgtccttccggcggggggacatcatcgaggtgctggagaggccagacccccactggtggaggggccgcagctgtggccgggtgggcttcttccccaggagctatgtgcagcctgtgcacctgtag

SEQ ID NO: 18627 - DNA, 231 bp, synthetic construct
  source 1..231: mol_type = other DNA; note = Synthetic coding sequence
atgggcctgaagatgagctgcctgaagggcttccagatgtgtgtgagcagcagcagcagcagccatgatgaggcccctgtgctgaatgacaagcacctggatgtgcctgacatcatcatcaccccacccacccccaccggcatgatgctgccccgggacctgggcagcacagtgtggctggatgaaacaggcagctgcccagatgatggagaaattgatcctgaggcctag

SEQ ID NO: 18628 - DNA, 19863 bp, synthetic construct
  source 1..19863: mol_type = other DNA; note = Synthetic coding sequence
atggaccagccccagttcagcggggccccccgcttcctgacccggcccaaggcctttgtggtgtctgtgggcaaggatgccaccctgagctgccagatcgtgggcaaccccaccccccaggtgtcctgggagaaggaccagcagcctgtggccgccggggcccgcttccggctggcccaggatggagacctgtaccgcctgaccatcctggacctggccctgggggacagcggccagtatgtgtgccgggccagaaatgccatcggggaggcctttgctgctgtgggcctgcaggtggatgctgaggccgcctgtgccgagcaggccccccacttcctgctgcggcccaccagcatccgggtgcgggagggcagcgaggccaccttccgctgccgggtgggcggcagccccaggcctgctgtgtcctggagcaaggatggccggcggctgggggagccagatggcccccgggtgcgggtggaggagctgggggaggccagcgccctgcgcatccgggccgcccggcccagagatggcggcacctatgaggtgcgggcagagaaccccctgggcgccgccagcgctgctgctgccctggtggtggacagtgatgctgctgacacagccagccggcccggcaccagcacagctgccctgctggcccacctgcagaggcggcgggaggccatgagagctgagggcgccccagccagcccccccagcacaggcaccaggacctgcaccgtgacagagggcaagcacgcccggctgagctgctacgtgactggagagcccaagccagagaccgtgtggaagaaggatggccagctggtgacagagggccgccgccacgtggtgtatgaagatgcccaggagaactttgtgctgaagatcctcttctgcaagcagagcgaccggggcctgtacacctgcacagccagcaacctggtgggccagacctacagctctgtgctggtggtggtgcgggagcctgctgtgcccttcaagaagaggctgcaggacctggaggtgcgggagaaggagagcgccaccttcctgtgtgaggtgccccagcccagcacagaagctgcctggttcaaggaggagacccggctgtgggccagcgccaagtatggcatcgaggaggagggcacagaaagaaggctgactgtgagaaatgtgtctgcagatgatgatgctgtgtacatctgtgagaccccagagggcagcaggacagtggccgagctggccgtgcagggcaacctgctgaggaagctgcccaggaagacagctgtgcgggtgggggacacagccatgttctgtgtggagctggccgtgcctgtgggccctgtgcactggctgaggaaccaggaggaggtggtggccggcggccgggtggccatctctgctgagggcaccaggcacaccctgaccatcagccagtgctgcctggaggatgtgggccaggtggccttcatggccggggactgccagaccagcacccagttctgtgtgtctgcccccaggaagccacccctgcagccccctgtggaccctgtggtgaaggccaggatggagagcagcgtcatcctgtcctggagccccccaccccacggggagaggcctgtgaccattgatggctacctggtggagaagaagaagctgggcacctacacctggatccgctgccacgaggccgagtgggtggccaccccagagctgactgtggctgatgtggccgaggagggcaacttccagttccgggtgtctgccctgaacagctttggccagagcccctacctggagttccctggcaccgtgcacctggcccccaagctggccgtgaggacccccctgaaggctgtgcaggccgtggagggcggggaggtgaccttctctgtggacctgactgtggccagcgctggggagtggttcctggatggccaggccctgaaggccagctctgtgtatgagatccactgtgacaggaccaggcacaccctgaccatccgggaggtgcctgccagcctgcacggggcccagctgaagtttgtggccaatggaattgagagcagcatccgcatggaggtgcgggccgcccctggcctgacagccaacaagcccccagctgctgctgcccgggaggtgctggcccggctgcacgaggaggcccagctgctggccgagctgagtgaccaggccgctgctgtgacctggctgaaggatggccgcaccctgagccctggccccaagtatgaggtgcaggccagcgctggccggcgggtgctgctggtgagagatgtggccagagatgatgctggcctgtatgaatgtgtgtcccggggcggcagaattgcctaccagctgtctgtgcagggcctggcccgcttcctgcacaaggacatggccggcagctgtgtggatgctgtggccggcggccctgcccagtttgaatgtgagaccagcgaggcccacgtgcacgtgcactggtacaaggatggcatggagctgggccacagcggggagcgcttcctgcaggaggatgtgggcaccaggcaccggctggtggccgccaccgtgacccggcaggatgagggcacctacagctgccgggtgggggaggacagcgtggacttccggctgcgggtgtctgagcccaaggtggtgtttgccaaggagcagctggcccggaggaagctgcaggccgaggccggggccagcgccaccctgagctgtgaggtggcccaggcccagacagaggtgacctggtacaaggatggcaagaagctgagcagcagcagcaaggtgtgcatggaggccaccggctgcacccggcggctggtggtgcagcaggccggccaggctgatgctggggagtacagctgtgaggccggcggccagaggctgtccttccacctggatgtgaaggagcccaaggtggtgtttgccaaggaccaggtggcccacagcgaggtgcaggccgaggccggggccagcgccaccctgagctgtgaggtggcccaggcccagacagaggtgatgtggtacaaggatggcaagaagctgagcagcagcctgaaggtgcacgtggaggccaagggctgcagaagaaggctggtggtgcagcaggccggcaagacagatgctggggactacagctgtgaggcccggggccagagggtgtccttccggctgcacatcacagagcccaagatgatgtttgccaaggagcagagcgtgcacaatgaggtgcaggccgaggccggggccagcgccatgctgagctgtgaggtggcccaggcccagacagaggtgacctggtacaaggatggcaagaagctgagcagcagcagcaaggtgggcatggaggtgaagggctgcacccggcggctggtgctgccccaggccggcaaggcagatgctggggagtacagctgtgaggccggcggccagagggtgtccttccacctgcacatcacagagcccaagggcgtgtttgccaaggagcagagcgtgcacaatgaggtgcaggccgaggccggcaccacagccatgctgagctgtgaggtggcccagccccagacagaggtgacctggtacaaggatggcaagaagctgagcagcagcagcaaggtgaggatggaggtgaagggctgcacccggcggctggtggtgcagcaggtgggcaaggcagatgctggggagtacagctgtgaggccggcggccagagggtgtccttccagctgcacatcacagagcccaaggctgtgtttgccaaggagcagctggtgcacaatgaggtgaggacagaggccggggccagcgccaccctgagctgtgaggtggcccaggcccagacagaggtgacctggtacaaggatggcaagaagctgagcagcagcagcaaggtgcgcatcgaggccgccggctgcatgaggcagctggtggtgcagcaggccggccaggctgatgctggggagtacacctgtgaggccggcggccagaggctgtccttccacctggatgtgtctgagcccaaggctgtgtttgccaaggagcagctggcccacaggaaggtgcaggccgaggccggggccatcgccaccctgagctgtgaggtggcccaggcccagacagaggtgacctggtacaaggatggcaagaagctgagcagcagcagcaaggtgaggatggaggccgtgggctgcacccggcggctggtggtgcagcaggcctgccaggccgacacaggagagtacagctgtgaggccggcggccagaggctgtccttcagcctggatgtggccgagcccaaggtggtgtttgccaaggagcagcctgtgcaccgggaggtgcaggcccaggccggggccagcaccaccctgagctgtgaggtggcccaggcccagacagaggtgatgtggtacaaggatggcaagaagctgtccttcagcagcaaggtgaggatggaggccgtgggctgcacccggcggctggtggtgcagcaggccggccaggccgtggccggggagtacagctgtgaggccggcagccagaggctgtccttccacctgcacgtggccgagcccaaggctgtgtttgccaaggagcagcctgccagccgggaggtgcaggccgaggccggcaccagcgccaccctgagctgtgaggtggcccaggcccagacagaggtgacctggtacaaggatggcaagaagctgagcagcagcagcaaggtgaggatggaggccgtgggctgcacccggcggctggtggtgcaggaggccggccaggctgatgctggggagtacagctgcaaggccggggaccagaggctgtccttccacctgcacgtggccgagcccaaggtggtgtttgccaaggagcagcctgcccaccgggaggtgcaggccgaggccggggccagcgccaccctgagctgtgaggtggcccaggcccagacagaggtgacctggtacaaggatggcaagaagctgagcagcagcagcaaggtgcgggtggaggccgtgggctgcacccggcggctggtggtgcagcaggccggccaggccgaggccggggagtacagctgtgaggccggcggccagcagctgtccttccggctgcaggtggccgagctggagccccagatcagcgagcggccctgccggcgggagcccctggtggtgaaggagcacgaggacatcatcctgacagccaccctggccacccccagcgctgccaccgtgacctggctgaaggatggagtggagatccgccgcagcaagagacatgaaacagccagccagggcgacacccacaccctgactgtgcatggagcccaggtgctggacagcgccatctacagctgccgggtgggcgctgagggccaggacttccctgtgcaggtggaggaggtggccgccaagttctgccgcctgctggagcctgtgtgtggggagctgggcggcaccgtgaccctggcctgtgagctgagccctgcctgtgccgaggtggtgtggaggtgtggcaacacccagctgcgggtgggcaagcgcttccagatggtggccgagggccctgtgcgcagcctgactgtgctgggcctgcgggcagaagatgctggggagtatgtgtgtgagagcagagatgaccacaccagcgcccagctgactgtgtctgtgccccgggtggtgaagttcatgagcggcctgagcacagtggtggccgaggagggcggggaggccaccttccagtgtgtggtgagccccagtgatgtggccgtggtgtggttcagagatggagccctgctgcagcccagcgagaagtttgccatcagccagagcggggccagccacagcctgaccatcagtgacctggtgctggaggatgctggccagatcaccgtggaggccgagggcgccagcagcagcgctgccctgcgggtgcgggaggcccctgtgctcttcaagaagaagctggagccccagacagtggaggagaggagctctgtgaccctggaggtggagctgacccggccctggccagagctgcgctggaccagaaatgccacagccctggcccctgggaagaatgtggagatccatgctgagggcgcccggcaccggctggtgctgcacaacgtgggctttgctgaccggggcttcttcggctgtgagaccccagatgacaagacccaggccaagctgactgtggagatgaggcaggtgcggctggtgcggggcctgcaggccgtggaggcccgggagcagggcacagccaccatggaggtgcagctgagccatgctgatgtggatggctcctggaccagagatggcctgcgcttccagcagggccccacctgccacctggccgtgcggggccccatgcacaccctgaccctgagcggcctgcggccagaagattctggcctgatggtgttcaaggccgagggcgtgcacaccagcgcccggctggtggtgacagagctgcctgtgtccttcagccggcccctgcaggatgtggtgaccacagagaaggagaaggtgaccctggagtgtgagctgagccggcccaacgtggatgtgcgctggctgaaggatggagtggagctgcgggccggcaagaccatggccatcgccgcccagggcgcctgccgcagcctgaccatctaccgctgtgaatttgctgaccagggcgtgtatgtgtgtgatgcccatgatgcccagagcagcgcctctgtgaaggtgcagggccgcacctacaccctcatctaccgccgggtgctggctgaagatgctggggagatccagtttgtggctgaaaatgctgagagccgggcccagctgcgggtgaaggagctgcctgtgaccctggtgcggcccctgcgggacaagatcgccatggagaagcacagaggagtgctggagtgccaggtgtcccgggccagcgcccaggtgcgctggttcaagggcagccaggagctgcagcccggccccaagtatgagctggtgtctgatggcctgtacaggaagctgatcatcagtgatgtgcatgctgaagatgaggacacctacacctgtgatgctggagatgtgaagaccagcgcccagttctttgtggaggagcagagcatcaccatcgtgcggggcctgcaggatgtgacagtgatggagcccgccccagcctggtttgaatgtgagaccagcatccccagcgtgcggccccccaagtggctgctgggcaagacagtgctgcaggccggcggcaatgtgggcctggagcaggagggcaccgtgcaccggctgatgctgcggaggacctgcagcaccatgacaggccctgtgcacttcaccgtgggcaagagccgcagcagcgcccggctggtggtgtctgacatccctgtggtgctgacccggcccctggagcccaagacaggccgggagctgcagagcgtggtgctgagctgtgacttccggcctgcccccaaggctgtgcagtggtacaaggatgacacccccctgagccccagcgagaagttcaagatgagcctggagggccagatggccgagctgcgcatcctgcggctgatgccagcagatgctggggtgtaccgctgccaggccggcagcgcccacagcagcacagaggtgacagtggaggcccgggaggtgacagtgacaggccccctgcaggatgctgaggccacagaggagggctgggccagcttcagctgtgagctgagccatgaagatgaggaggtggagtggagcctgaatggcatgcccctgtacaatgacagcttccacgagatcagccacaagggccgccgccacaccctggtgctgaagagcatccagagagcagatgctggcatcgtgcgggccagcagcctgaaggtgtccaccagcgcccggctggaggtgcgggtgaagcctgtggtgttcctgaaggccctggatgacctgtctgctgaggagcggggcaccctggccctgcagtgtgaggtgtctgaccctgaggcccacgtggtgtggaggaaggatggagtgcagctgggccccagcgacaagtatgacttcctgcacacagctggcacccggggcctggtggtgcatgatgtgtccccagaagatgctggcctgtacacctgccacgtgggcagcgaggagacccgggcccgggtgcgggtgcatgacctgcacgtgggcatcaccaagaggctgaagaccatggaggtgctggagggggagagctgcagctttgaatgtgtgctgagccatgaaagtgccagtgaccctgccatgtggacagtgggcggcaagacagtgggcagcagcagccgcttccaggccacccggcagggcaggaagtacatcctggtggtgcgggaggccgcccccagtgatgctggggaggtggtgttttctgtgcggggcctgaccagcaaggccagcctgattgtgcgggagaggcctgctgccatcatcaagcccctggaggaccagtgggtggcccctggagaagatgtggagctgcgctgtgagctgagcagagctggcacccctgtgcactggctgaaggacaggaaggccatcaggaagagccagaagtatgatgtggtgtgtgagggcaccatggccatgctggtgatccggggggccagcctgaaggatgctggggagtacacctgtgaggtggaggccagcaagagcacagccagcctgcacgtggaggagaaggccaactgcttcacagaggagctgaccaacctgcaggtggaggagaagggcacagctgtgttcacctgcaagacagagcaccctgctgccaccgtgacctggaggaagggcctgctggagctgcgggccagcggcaagcaccagcccagccaggagggcctgaccctgcggctgaccatcagcgccctggagaaggctgacagcgacacctacacctgtgacatcggccaggcccagagccgggcccagctgctggtgcagggcagaagagtgcacatcatcgaggacctggaggatgtggatgtgcaggagggcagcagcgccaccttccgctgccgcatcagccctgccaactatgagcctgtgcactggttcctggacaagacccccctgcacgccaatgagctgaatgaaattgatgcccagcccggcggctaccacgtgctgaccctgcggcagctggccctgaaggacagcggcaccatctactttgaggccggggaccagagggccagcgctgccctgcgggtgacagagaagcccagcgtcttcagccgggagctgacagatgccaccatcacagaaggagaggacctgaccctggtgtgtgagaccagcacctgtgacatccctgtgtgctggaccaaggatggcaagaccctgcggggcagcgcccgctgccagctgagccatgagggccaccgggcccagctgctgatcactggagccaccctgcaggacagcggccgctacaagtgtgaggccggcggggcctgcagcagcagcatcgtgcgggtgcacgcccggcctgtgcgcttccaggaggccctgaaggacctggaggtgctggagggcggggccgccaccctgcgctgtgtgctgagctctgtggccgcccctgtgaagtggtgctacggcaacaacgtgctgcggcctggggacaagtacagcctgcggcaggagggcgccatgctggagctggtggtgaggaacctgcggccccaggacagcggccgctacagctgcagctttggagaccagaccaccagcgccaccctgactgtgacagccctgcctgcccagttcatcggcaagctgaggaacaaggaggccacagagggcgccacagccaccctgcgctgtgagctgagcaaggccgcccctgtggagtggaggaaaggaagtgagaccctgagagatggagaccgctactgcctgcggcaggatggagccatgtgtgagctgcagatccggggcctggccatggtggatgctgctgagtacagctgtgtgtgtggggaggagaggaccagcgccagcctgaccatccggcccatgcctgcccacttcatcggccgcctgcggcaccaggagagcattgagggcgccacagccaccctgcgctgtgagctgagcaaggccgcccctgtggagtggaggaagggccgggagagcctgagagatggagacagacacagcctgcggcaggatggagctgtgtgtgagctgcagatctgtggcctggccgtggctgatgctggggagtacagctgtgtgtgtggggaggagaggaccagcgccaccctgactgtgaaggccctgcctgccaagttcacagagggcctgagaaatgaggaggccgtggagggcgccacagccatgctgtggtgtgagctgagcaaggtggcccctgtggagtggaggaaaggacctgagaacctgagagatggagaccgctacatcctgcggcaggagggcacccgctgtgagctgcagatctgtggcctggccatggctgatgctggggagtacctgtgtgtgtgtggccaggagaggaccagcgccaccctgaccatccgggccctgcctgcccgcttcattgaagatgtgaagaaccaggaggcccgggagggcgccacagctgtgctgcagtgtgagctgaacagcgctgcccctgtggagtggaggaaaggaagtgagaccctgagagatggagaccgctacagcctgcggcaggacggcaccaagtgtgagctgcagatccggggcctggccatggctgacacaggagagtacagctgtgtgtgtggccaggagaggaccagcgccatgctgactgtgcgggccctgcccatcaagttcacagagggcctgagaaatgaggaggccacagagggcgccacagctgtgctgcgctgtgagctgagcaagatggcccctgtggagtggtggaagggccacgagaccctgagagatggagacagacacagcctgcggcaggatggagcccgctgtgagctgcagatccggggcctggtggctgaagatgctggggagtacctgtgcatgtgtgggaaggagaggaccagcgccatgctgactgtgcgggccatgcccagcaagttcatcgagggcctgagaaatgaggaggccacagaaggagacacagccaccctgtggtgtgagctgagcaaggccgcccctgtggagtggaggaaaggacatgagaccctgagagatggagacagacacagcctgcggcaggacggcagccgctgtgagctgcagatccggggcctggccgtggtggatgctggggagtacagctgtgtgtgtggccaggagaggaccagcgccaccctgactgtgcgggccctgcctgcccgcttcattgaagatgtgaagaaccaggaggcccgggagggcgccacagctgtgctgcagtgtgagctgagcaaggccgcccctgtggagtggaggaaaggaagtgagaccctgcggggcggggaccgctacagcctgcggcaggacggcacccgctgtgagctgcagatccacggcctgtctgtggccgacacaggagagtacagctgtgtgtgtggccaggagaggaccagcgccaccctgactgtgcgggccccccagcccgtcttccgggagcccctgcagagcctgcaggccgaggagggcagcacagccaccctgcagtgtgagctgtctgagcccacagccaccgtggtgtggagcaagggcggcctgcagctgcaggccaacggccggcgggagccccggctgcagggctgcacagctgagctggtgctgcaggacctgcagcgggaggacaccggggagtacacctgcacctgtggcagccaggccaccagcgccaccctgactgtgacagctgcccctgtgcgcttcctgcgggagctgcagcaccaggaggtggatgaaggaggaacagcccacctgtgctgtgagctgagcagagctggggcctctgtggagtggaggaagggcagcctgcagctgttcccctgtgccaagtaccagatggtgcaggatggagctgctgctgagctgctggtgcggggcgtggagcaggaggatgctggggactacacctgtgacaccggccacacccagagcatggccagcctgtctgtgcgggtgccccggcccaagttcaagacccggctgcagagcctggagcaggagactggagacatcgcccggctgtgctgccagctgagtgatgctgagagcggggctgtggtgcagtggctgaaggagggcgtggagctgcatgctggccccaagtatgagatgaggagccagggcgccacccgggagctgctgatccaccagctggaggccaaggacaccggggagtatgcctgtgtgactggaggccagaagacagctgccagcctgcgggtgacagagcctgaggtgaccatcgtgcggggcctggtggatgctgaggtgacagcagatgaagatgtggagttcagctgtgaggtgtccagagctggggccaccggggtgcagtggtgcctgcagggcctgcccctgcagagcaatgaggtgacagaggtggccgtgagagatggccgcatccacaccctgcggctgaagggcgtgaccccagaagatgctggcaccgtgtccttccacctgggcaaccacgccagcagcgcccagctgactgtgcgggcccctgaggtgaccatcctggagcccctgcaggatgtgcagctgtctgagggccaggatgccagcttccagtgccgcctgagccgggccagcggccaggaggcccgctgggccctgggcggcgtgcccctgcaggccaatgagatgaatgacatcaccgtggagcagggcaccctgcacctgctgaccctgcacaaggtgaccctggaggatgctggcaccgtgtccttccacgtgggcacctgcagcagcgaggcccagctgaaggtgacagccaagaacacagtggtgcggggcctggagaatgtggaggccctggagggcggggaggccctgtttgagtgccagctgagccagcctgaggtggccgcccacacctggctgctggatgatgagcctgtgcacaccagtgaaaatgctgaggtggtgttctttgaaaatggcctgcggcacctgctgctgctgaagaacctgcggccccaggacagctgccgggtgaccttcctggccggggacatggtgaccagcgccttcctgactgtgcggggctggaggctggagatcctggagcccctgaagaatgctgctgtgcgggccggggcccaggcctgcttcacctgcaccctgtctgaggccgtgcctgtgggggaggcctcctggtacatcaatggagctgctgtgcagccagatgacagcgactggacagtgacagcagatggcagccaccacgccctgctgctgcggagcgcccagccccaccacgccggggaggtgacctttgcctgcagagatgctgtggccagcgcccggctgactgtgctgggcctgcctgaccccccagaagatgctgaggtggtggcccggagcagccacacagtgaccctgtcctgggccgcccccatgtctgatggcggcggcggcctgtgtggctacagagtggaggtgaaggagggcgccaccggccagtggaggctgtgccacgagctggtgcccggcccagaatgtgtggtggatggcctggcccctggagagacctaccgcttccgggtggccgctgtgggccctgtgggcgctggggagcctgtgcacctgccccagacagtgcggctggccgagccccccaagcctgtgcccccccagcccagcgcccctgagagccggcaggtggccgctggagaagatgtgtccctggagctggaggtggtggccgaggccggggaggtgatctggcacaagggcatggagcgcatccagcccggcggccgctttgaggtggtgtcccagggccggcagcagatgctggtgatcaagggcttcaccgctgaggaccagggcgagtaccactgcggcctggcccagggcagcatctgcccagctgctgccaccttccaggtggccctgagccctgcctctgtggatgaggccccccagcccagcctgcccccagaggccgcccaggagggggacctgcacctgctgtgggaggccctggccaggaagaggaggatgagccgggagcccaccctggacagcatcagcgagctgcctgaggaggatggccgcagccagaggctgccccaggaggccgaggaggtggccccagacctgtctgagggctacagcacagcagatgagctggccaggactggagatgctgacctgagccacaccagcagtgatgatgagagcagagctggcacccccagcctggtgacctacctgaagaaggccggccggcccggcaccagccccctggccagcaaggtgggcgccccagctgcccccagcgtgaagccccagcagcagcaggagcccctggccgctgtgcggccccccctgggggacctgagcaccaaggacctgggggaccccagcatggacaaggctgctgtgaagatccaggccgccttcaagggctacaaggtgaggaaggagatgaagcagcaggagggccccatgttcagccacaccttcggggacacagaggcccaggtgggagatgccctgcggctggagtgtgtggtggccagcaaggcagatgtgcgggcccgctggctgaaggatggagtggagctgacagatggccgccaccaccacatcgaccagctgggagatggcacctgcagcctgctgatcaccggcctggacagagcagatgctggctgctacacctgccaggtgagcaacaagtttggccaggtgacccacagcgcctgtgtggtggtgtctggcagcgagagcgaggccgagagcagcagtggaggagagctggatgatgccttccggcgggccgcccggcggctgcacaggctcttccgcaccaagagccctgctgaggtgtctgatgaggagctgttcctgtctgcagatgagggccctgctgagcctgaggagcctgctgactggcagacctacagagaagatgagcacttcatctgcatccgctttgaggccctgacagaggcccggcaggccgtgacccgcttccaggagatgtttgccaccctgggcatcggcgtggagatcaagctggtggagcagggcccccggcgggtggagatgtgcatcagcaaggagaccccagcccctgtggtgcccccagagcccctgcccagcctgctgaccagtgatgctgcccctgtgttcctgacagagctgcagaaccaggaggtgcaggacggctaccctgtgtcctttgactgtgtggtgacaggccagcccatgcccagcgtgcgctggttcaaggatggcaagctgctggaggaggatgaccactacatgatcaatgaagaccagcagggcggccaccagctgatcatcacagctgtggtgcctgctgacatgggcgtgtaccgctgcctggccgagaacagcatgggcgtgagcagcaccaaggccgagctgcgggtggacctgaccagcacagattatgacacagctgctgatgccacagagagcagcagctacttcagcgcccagggctacctgagcagccgggagcaggagggcacagagagcaccacagatgagggccagctgccccaggtggtggaggagctgcgggacctgcaggtggcccctggcacccggctggccaagttccagctgaaggtgaagggctacccagccccccggctgtactggttcaaggatggccagcccctgacagccagcgcccacatccgcatgacagacaagaagatcctgcacaccctggagatcatctctgtgacccgggaggacagcggccagtatgctgcctacatcagcaatgccatgggcgccgcctacagcagcgcccggctgctggtgcggggcccagatgagcctgaggagaagccagccagtgatgtgcatgagcagctggtgccccccaggatgctggagcgcttcacccccaagaaggtgaagaagggcagcagcatcaccttctctgtgaaggtggagggccggcctgtgcccaccgtgcactggctgcgggaggaggccgagcggggcgtgctgtggattggccctgacaccccaggctacacagtggccagcagcgcccagcagcacagcctggtgctgctggatgtgggccggcagcaccagggcacctacacctgcatcgccagcaatgctgctggccaggccctgtgcagcgccagcctgcacgtgtctggcctgcccaaggtggaggagcaggagaaggtgaaggaggccctgatcagcaccttcctgcagggcaccacccaggccatcagcgcccagggcctggagacagccagctttgctgacctgggcggccagaggaaggaggagcccctggccgccaaggaggccctgggccacctgagcctggccgaggtgggcacagaggagttcctgcagaagctgaccagccagatcacagagatggtgtctgccaagatcacccaggccaagctgcaggtgcctggaggagacagtgatgaggacagcaagaccccatctgccagccccaggcatggccgcagccggcccagcagcagcatccaggagagcagcagcgagagtgaagatggagatgcccggggggagatctttgacatctacgtggtgacagctgactacctgcccctgggcgctgagcaggatgccatcaccctgcgggagggccagtatgtggaggtgctggatgctgcccaccccctgcgctggctggtgaggaccaagcccaccaagagcagccccagccggcagggctgggtgtccccagcctacctggaccggcggctgaagctgagccctgagtggggcgctgctgaggcccctgagttccctggagaggccgtgtctgaagatgagtacaaggcccggctgagcagcgtcatccaggagctgctgagcagcgagcaggcctttgtggaggagctgcagttcctgcagagccaccacctgcagcacctggagcgctgcccccacgtgcccatcgctgtggccggccagaaggccgtcatcttcagaaatgtgcgggacatcggccgcttccacagcagcttcctgcaggagctgcagcagtgtgacacagatgatgatgtggccatgtgcttcatcaagaaccaggccgcctttgagcagtacctggagttcctggtgggccgggtgcaggccgagagcgtggtggtgtccacagccatccaggagttctacaagaagtatgcagaggaggccctgctggccggggaccccagccagcccccacctccacccctgcagcactacctggagcagcctgtggagcgggtgcagcgctaccaggccctgctgaaggagctgatccggaacaaggccaggaaccggcagaactgtgccctgctggagcaggcctatgctgtggtgtctgccctgccccagagagctgagaacaagctgcacgtgtccctgatggagaactacccaggcaccctgcaggccctgggggagcccatccggcagggccacttcatcgtgtgggagggcgcccctggggccaggatgccctggaagggccacaacagacatgtgttcctgttcaggaaccacctggtgatctgcaagccccggcgggacagcaggacagacacagtgtcctatgtgttcaggaacatgatgaagctgagcagcattgacctgaatgaccaggtggagggagatgaccgggcctttgaggtgtggcaggagcgggaggacagcgtgaggaagtacctgctgcaggccaggacagccatcatcaagagctcctgggtgaaggagatctgtggcatccagcagaggctggccctgcctgtgtggaggcccccagactttgaggaggagctggccgactgcacagctgagctgggggagaccgtgaagctggcctgccgggtgacaggcacccccaagcctgtgatctcctggtacaaggatggcaaggctgtgcaggtggacccccaccacatcctgattgaggaccctgatggcagctgtgccctgatcctggacagcctgactggagtggacagcggccagtacatgtgctttgctgccagcgctgctggcaactgcagcaccctgggcaagatcctggtgcaggtgcccccaagatttgtgaacaaggtgcgggccagcccctttgtggagggagaagatgcccagttcacctgcaccattgaaggagccccctacccccagatccgctggtacaaggatggagccctgctgaccaccggcaacaagttccagaccctgtctgagcccaggagcggcctgctggtgctggtgatccgggccgccagcaaagaagacctgggcctgtatgaatgtgagctggtgaaccggctgggcagcgcccgggccagcgctgagctgcgcatccagagccccatgctgcaggcccaggagcagtgccaccgggagcagctggtggccgctgtggaggtgacagagcaggagaccaaggtgcccaagaagacagtcatcatcgaggagaccatcaccaccgtggtgaagagcccccggggccagaggaggagccccagcaagagccccagccgcagccccagccgctgcagcgccagccccctgcggcccggcctgctggccccagacctgctgtacctgcccggggccggccagccccggcggcctgaggccgagcccggccagaagcctgtggtgcccaccctgtatgtgacagaggccgaggcccacagccctgccctgcccggcctgagcggcccccagcccaagtgggtggaggtggaggagaccatcgaggtgcgggtgaagaagatgggcccccagggcgtgagccccaccacagaggtgcccaggagcagcagcggccacctgttcaccctgcccggggccaccccaggaggagaccccaacagcaacaacagcaacaacaagctgctggcccaggaggcctgggcccagggcacagccatggtgggcgtgcgggagcccctggtgttccgggtggatgcccggggctctgtggactgggccgccagcggcatgggcagcctggaggaggagggcaccatggaggaggccggggaggaggagggagaagatggagatgcctttgtgacagaggagagccaggacacccacagcctgggggaccgggaccccaagatcctgacccacaacggccgcatgctgaccctggccgacctggaggactatgtgcctggagagggggagaccttccactgcggcggccctggccctggggccccagatgatcctccctgtgaggtgtctgtcatccagcgggagatcggggagcccaccgtgggccagcctgtgctgctgtctgtgggccacgccctgggcccccggggccccctgggcctcttccggcctgagcccaggggggccagccccccaggcccccaggtgcgcagcctggagggcaccagcttcctgctgcgggaggccccagcccggcctgtgggcagcgccccctggacccagagcttctgcacccgcatccgccgctctgctgacagcggccagagcagcttcaccacagagctgagcacccagacagtgaactttggaacagtgggggagaccgtgaccctgcacatctgcccagacagagatggagatgaagctgcccagccctag

SEQ ID NO: 18629 - DNA, 1407 bp, synthetic construct
  source 1..1407: mol_type = other DNA; note = Synthetic coding sequence
atggccgccccagacctgagcaccaacctgcaggaggaggccacctgtgccatctgcctggactacttcacagatcctgtgatgacagactgtggccacaacttctgccgggagtgcatccgccgctgctggggccagcctgagggcccctatgcctgcccagaatgtcgggagctgagcccccagaggaacctgcggcccaaccggcccctggccaagatggccgagatggcccggcggctgcacccccccagccctgtgccccagggcgtgtgcccagcccaccgggagcccctggccgccttctgtggagatgagctgcggctgctgtgtgccgcctgtgagaggtctggagagcactgggcccaccgggtgcggcccctgcaggatgctgctgaggacctgaaggccaagctggagaagagcctggagcacctgaggaagcagatgcaggatgccctgctcttccaggcccaggctgatgagacctgtgtgctgtggcagaagatggtggagagccagaggcagaatgtgctgggggagtttgagcggctgcggcggctgctggccgaggaggagcagcagctgctgcagaggctggaggaggaggagctggaggtgctgccccggctgcgggagggcgccgcccacctgggccagcagagcgcccacctggccgagctgattgctgagctggagggccgctgccagctgcctgccctgggcctgctgcaggacatcaaggatgccctgcggcgggtgcaggatgtgaagctgcagcccccagaggtggtgcccatggagctgaggacagtgtgccgggtgcccggcctggtggagaccctgcggcgcttcagaggagatgtgaccctggaccctgacacagccaaccctgagctgatcctgtctgaggaccggcgctctgtgcagagaggagacctgcggcaggccctgcctgacagccctgagagatttgatcctggcccctgtgtgctgggccaggagcgcttcaccagcggccgccactactgggaggtggaggtgggggacaggacctcctgggccctgggcgtgtgcagagaaaatgtgaacaggaaggagaagggggagctgtctgctggaaatggcttctggatcctggtgttcctgggcagctactacaacagcagcgagcgggccctggcccccctgcgggaccccccccggcgggtgggcatcttcctggactatgaggccggccacctgtccttctacagcgccacagatggcagcctgctcttcatcttccctgagatccccttcagcggcaccctgcggcccctcttcagccccctgagcagcagccccacccccatgaccatctgccggcccaagggcggcagcggggacaccctggccccccagtag

SEQ ID NO: 18630 - DNA, 813 bp, synthetic construct
  source 1..813: mol_type = other DNA; note = Synthetic coding sequence
atgagccctggcagcggcgtgaagtctgagtacatgaagcgctaccaggagccccgctgggaggagtatggcccctgctaccgggagctgctgcactaccgcctgggccgccgcctgctggagcaggcccacgccccctggctgtgggatgactggggccctgctggcagcagtgaagattctgccagcagcgagagcagtggagctgggggccctgccccccgctgtgccccacccagccccccacctcctgtggagcccgccacccaggaggaggccgagcggcgggcccggggggcccctgaggagcaggatgctgaggccggagatgctgaggccgaggatgctgaagatgctgccctgcctgccctgcctgtgaaggatgtggaggacaagccagagcagcagaccaggacccgggagacagacaagagccccaccagcacagagccccggcagcagcccagcgccctgtttgcccggggcaacaggaaggctgtgaagagcccccagaggagcagcagcaagatcaaggagaacaagcacccctttgccctgtatggctggggcgagaagcagacagacaccggcagccagaagacccacaacgtgtgtgccagcgcccctgtgcatgagatccacgagagcgccctgcgggccaagaacagacggcaggtggagaagaggaagctggtggcccagaggcagagggcccacagcgtggatgtggagaagaacaggaagatgaaggccagcagcagcgagaacccctggatgacagagtacatgcgctgctacagcgcccgggcctag

SEQ ID NO: 18631 - DNA, 2667 bp, synthetic construct
  source 1..2667: mol_type = other DNA; note = Synthetic coding sequence
atggatgagagcgccctgctggacctgctggagtgccctgtgtgcctggagcggctggatgccagcgccaaggtgctgccctgccagcacaccttctgcaagcgctgcctgctgggcatcgtgggcagcagaaatgagctgcgctgcccagaatgtaggaccctggtgggcagcggcgtggaggagctgcccagcaacatcctgctggtgcggctgctggatggcatcaagcagaggccctggaagccaggccctgggggcggcagcggcaccaactgcaccaatgccctgcggagccagagcagcacagtggccaactgcagcagcaaggacctgcagagcagccagggcggccagcagccccgggtgcagagctggagcccccctgtgcggggcatcccccagctgccctgtgccaaggccctgtacaactatgagggcaaggagcccggggacctgaagttcagcaaaggagacatcatcatcctgcggcggcaggtggatgagaactggtaccatggagaggtgaatggcatccacggcttcttccccaccaactttgtgcagatcatcaagcccctgccccagcccccaccccagtgcaaggccctgtatgactttgaggtgaaggacaaggaggccgacaaggactgcctgccctttgccaaggatgatgtgctgaccgtcatcagaagagtggatgagaactgggccgagggcatgctggccgacaagattggcatcttccccatctcctatgtggagttcaacagcgctgccaagcagctgattgagtgggacaagccccctgtgcctggggtggatgctggggagtgcagcagcgctgctgcccagagcagcacagcccccaagcacagcgacaccaagaagaacaccaagaagaggcacagcttcaccagcctgaccatggccaacaagagcagccaggccagccagaacagacacagcatggagatcagcccccctgtgctgatcagcagcagcaaccccacagctgctgcccgcatcagcgagctgagcggcctgagctgcagcgcccccagccaggtgcacatcagcaccaccggcctgattgtgaccccaccacccagcagccctgtgaccaccggccccagcttcaccttccccagtgatgtgccctaccaggccgccctgggcaccctgaacccccccctgcccccaccacccctgctggccgccaccgtgctggccagcaccccacctggggccacagctgctgctgctgctgctggcatgggcccccggcccatggccggcagcacagaccagatcgcccacctgcggccccagacccggcccagcgtgtatgtggccatctacccctacacccccaggaaagaagatgagctggagctgaggaagggggagatgttcctggtgtttgagcgctgccaggacggctggttcaagggcacctccatgcacaccagcaagattggagtcttccctggcaactacgtggcccctgtgaccagggctgtgaccaatgccagccaggccaaggtgcccatgagcacagctggccagaccagcagaggagtgaccatggtgagccccagcacagctgggggccctgcccagaagctgcagggcaatggagtggccggcagccccagcgtggtgcctgctgctgtggtgtctgctgcccacatccagaccagcccccaggccaaggtgctgctgcacatgacaggccagatgacagtgaaccaggccagaaatgctgtgaggacagtggccgcccacaaccaggagcggcccacagctgctgtgacccccatccaggtgcagaatgctgctggcctgagccctgcctctgtgggcctgagccaccacagcctggccagcccccagcctgcccccctgatgcctggcagcgccacccacacagctgccatcagcatcagccgggccagcgcccccctggcctgtgccgctgctgcccccctgaccagccccagcatcaccagcgccagcctggaggccgagcccagcggccgcatcgtgacagtgctgcccggcctgcccaccagcccagattctgccagcagcgcctgtggcaacagcagcgccaccaagccagacaaggacagcaagaaggagaagaagggcctgctgaagctgctgagcggggccagcaccaagaggaagccccgggtgagccccccagccagccccaccctggaggtggagctgggcagcgctgagctgcccctgcagggcgctgtgggccctgagctgcccccaggcggcggccacggccgggccggcagctgccctgtggatggagatggccctgtgaccacagctgtggccggggccgccctggcccaggatgccttccacaggaaggccagcagcctggacagcgctgtgcccatcgcccccccaccccggcaggcctgcagcagcctgggccctgtgctgaatgaaagcaggcctgtggtgtgtgagcggcaccgggtggtggtgtcctacccaccccagagcgaggccgagctggagctgaaggagggggacatcgtgtttgtgcacaagaagagagaagatggctggttcaagggcaccctgcagagaaatggcaagacaggcctcttccctggcagctttgtggagaacatctag

SEQ ID NO: 18632 - DNA, 570 bp, synthetic construct
  source 1..570: mol_type = other DNA; note = Synthetic coding sequence
atgccccagaccgtcatcctgcccggccctgccccctggggcttccggctgagcggcggcatcgacttcaaccagcccctggtgatcacccgcatcaccccaggcagcaaggctgctgctgccaacctgtgccctggagatgtgatcctggccattgatggctttggaacagagagcatgacccatgctgatgcccaggaccgcatcaaggccgccgcccaccagctgtgcctgaagattgacagaggagagacccacctgtggagcccccaggtgtctgaagatggcaaggcccaccccttcaagatcaacctggagagcgagccccaggagttcaagcccatcggcacagcccacaacagaagagcccagccctttgtggccgccgccaacattgatgacaagaggcaggtggtgtctgccagctacaacagccccatcggcctgtacagcaccagcaacatccaggatgccctgcacggccagctgcggggcctcatccccagcagcccccagaagacaggcaccaccctgaacaccagcatcatcttcggccccaacctgtcctag

SEQ ID NO: 18633 - DNA, 1095 bp, synthetic construct
  source 1..1095: mol_type = other DNA; note = Synthetic coding sequence
atgccccagaccgtcatcctgcccggccctgccccctggggcttccggctgagcggcggcatcgacttcaaccagcccctggtgatcacccgcatcaccccaggcagcaaggctgctgctgccaacctgtgccctggagatgtgatcctggccattgatggctttggaacagagagcatgacccatgctgatgcccaggaccgcatcaaggccgccgcccaccagctgtgcctgaagattgacagaggagagacccacctgtggagcccccaggtgtctgaagatggcaaggcccaccccttcaagatcaacctggagagcgagccccaggacggcaactactttgagcacaagcacaacatccggcccaagcccttcgtcatccctggccgcagcagcggctgcagcaccccatctggaattgactgtggcagcggccgcagcacccccagctctgtgtccacagtgtccaccatctgccctggggacctgaaggtggccgccaagctggcccccaacatccccctggagatggagctgcccggggtgaagatcgtgcacgcccagttcaacacccccatgcagctgtacagtgatgacaacatcatggagaccctgcagggccaggtgtccacagccctgggggagacccccctgatgtctgagcccacagcctctgtgcccccagagagtgatgtgtacaggatgctgcatgacaacagaaatgagcccacccagccccggcagagcggcagcttccgggtgctgcagggcatggtggatgatggcagtgatgacaggcctgctggcaccaggtctgtgcgggcccctgtgaccaaggtgcacggcggcagcggcggggcccagaggatgcccctgtgtgacaagtgtggcagcggcatcgtgggcgctgtggtgaaggcccgggacaagtaccgccaccctgagtgctttgtgtgtgccgactgcaacctgaacctgaagcagaagggctacttcttcattgaaggagagctgtactgtgagacccacgcccgggcccggaccaagcccccagagggctatgacacagtgaccctgtaccccaaggcctag

SEQ ID NO: 18634 - DNA, 951 bp, synthetic construct
  source 1..951: mol_type = other DNA; note = Synthetic coding sequence
atgccccagaccgtcatcctgcccggccctgccccctggggcttccggctgagcggcggcatcgacttcaaccagcccctggtgatcacccgcatcaccccaggcagcaaggctgctgctgccaacctgtgccctggagatgtgatcctggccattgatggctttggaacagagagcatgacccatgctgatgcccaggaccgcatcaaggccgccgcccaccagctgtgcctgaagattgacagaggagagacccacctgtggagcccccaggtgtctgaagatggcaaggcccaccccttcaagatcaacctggagagcgagccccaggagttcaagcccatcggcacagcccacaacagaagagcccagccctttgtggccgccgccaacattgatgacaagaggcaggtggtgtctgccagctacaacagccccatcggcctgtacagcaccagcaacatccaggatgccctgcacggccagctgcggggcctcatccccagcagcccccagaatgagcccacagcctctgtgcccccagagagtgatgtgtacaggatgctgcatgacaacagaaatgagcccacccagccccggcagagcggcagcttccgggtgctgcagggcatggtggatgatggcagtgatgacaggcctgctggcaccaggtctgtgcgggcccctgtgaccaaggtgcacggcggcagcggcggggcccagaggatgcccctgtgtgacaagtgtggcagcggcatcgtgggcgctgtggtgaaggcccgggacaagtaccgccaccctgagtgctttgtgtgtgccgactgcaacctgaacctgaagcagaagggctacttcttcattgaaggagagctgtactgtgagacccacgcccgggcccggaccaagcccccagagggctatgacacagtgaccctgtaccccaaggcctag

SEQ ID NO: 18635 - DNA, 3303 bp, synthetic construct
  source 1..3303: mol_type = other DNA; note = Synthetic coding sequence
atgagctactaccagaggcccttcagccccagcgcctacagcctgcctgccagcctgaacagcagcatcgtgatgcagcacggcaccagcctggacagcacagacacctacccccagcacgcccagagcctggatggcaccaccagcagcagcatccccctgtaccgcagcagcgaggaggagaagagggtgaccgtcatcaaggccccccactacccaggcatcggccctgtggatgaaagtggcatccccacagccatccgcaccaccgtggaccggcccaaggactggtacaagaccatgttcaagcagatccacatggtgcacaagccagatgatgacacagacatgtacaacaccccctacacctacaatgccggcctgtacaaccccccctacagcgcccagagccaccctgctgccaagacccagacctaccggcccctgagcaagagccacagcgacaacagccccaatgccttcaaggatgccagcagccctgtgcccccaccccacgtgcccccacctgtgccccccctgcggccccgggacaggagcagcacagagaagcatgactgggaccccccagacaggaaggtggacaccaggaagttccgctctgagcccaggagcatctttgaatatgagcccgggaagagcagcatcctgcagcacgagaggcctgccagcctgtaccagagcagcattgacaggagcctggagcggcccatgagcagcgcctccatggccagtgacttcaggaagaggaggaagtctgagcctgctgtgggccccccccggggcctgggggaccagagcgccagcaggaccagccctggccgggtggacctgcccggcagcagcaccaccctgaccaagagcttcaccagcagcagccccagcagccccagccgggccaagggaggagatgacagcaagatctgccccagcctgtgcagctacagcggcctgaatggaaaccccagcagcgagctggactactgcagcacctaccggcagcacctggatgtgccccgggacagcccccgggccatctccttcaagaatggctggcagatggcccggcagaatgctgagatctggagcagcacagaggagaccgtgagccccaagatcaagagccgcagctgtgatgacctgctgaatgatgactgtgacagcttcccagaccccaaggtgaagtctgagagcatgggcagcctgctgtgtgaggaggacagcaaggagagctgccccatggcctggggcagcccctacgtgcctgaggtgcgcagcaatggccgcagccgcatccgccacaggtctgccagaaatgcccctggcttcctgaagatgtacaagaagatgcaccgcatcaacaggaaggacctgatgaacagcgaggtgatctgcagcgtgaagagccgcatcctgcagtatgagagcgagcagcagcacaaggacctgctgcgggcctggagccagtgcagcacagaggaggtgccccgggacatggtgcccacccgcatcagcgagtttgagaagctgatccagaagagcaagtccatgcccaacctgggagatgacatgctgagccctgtgaccctggagcccccccagaatggcctgtgccccaagaggcgcttcagcattgagtacctgctggaggaggagaaccagagcggccccccagcccggggccggcggggctgccagagcaatgccctggtgcccatccacatcgaggtgaccagtgatgagcagccccgggcccacgtggagttcagtgacagcgaccaggatggagtggtgtctgaccacagcgactacatccacctggagggcagcagcttctgcagcgagagtgactttgaccacttctccttcaccagcagcgagagcttctacggcagcagccaccaccaccaccaccaccaccaccaccaccaccgccacctgatcagcagctgcaagggccgctgcccagccagctacacccgcttcaccaccatgctgaagcatgagcgggcccggcatgagaacacagaggagccccggcggcaggagatggaccccggcctgagcaagctggccttcctggtgtcccctgtgcccttccggaggaagaagaacagcgcccccaagaagcagacagagaaggccaagtgcaaggcctctgtgtttgaggccctggacagcgccctgaaggacatctgtgaccagatcaaggccgagaagaagaggggcagcctgcctgacaacagcatcctgcacaggctcatcagcgagctgctgcctgatgtgcctgagaggaacagcagcctgcgggccctgcggcgcagccccctgcaccagcccctgcaccccctgcccccagatggagccatccactgccccccctaccagaatgactgtggccgcatgcccaggtctgccagcttccaggatgtggacacagccaacagcagctgccaccaccaggaccggggcggggccctgcaggaccgggagagccccaggagctacagcagcaccctgacagacatgggccgcagcgccccccgggagcggcggggcaccccagagaaggagaagctgcctgccaaggctgtgtatgacttcaaggcccagaccagcaaggagctgtccttcaagaagggggacacagtgtacatcctgaggaagattgaccagaactggtatgaaggagagcaccacggccgggtgggcatcttccccatctcctatgtggagaagctgaccccacctgagaaggcccagcctgcccggcccccacctccagcccagcctggagagatcggggaggccatcgccaagtacaacttcaatgctgacaccaacgtggagctgagcctgaggaaaggagacagagtcatcctgctgaagagggtggaccagaactggtatgagggcaagatccctggcaccaaccggcagggcatcttccctgtgtcctatgtggaggtggtgaagaagaacaccaagggagctgaggactacccagacccccccatcccccacagctacagcagtgaccgcatccacagcctgagcagcaacaagccccagaggcctgtgttcacccatgagaacatccagggcggcggggagcccttccaggccctgtacaactacaccccaagaaatgaagatgagctggagctgcgggagagtgatgtgattgatgtgatggagaagtgtgatgatggctggtttgtgggcaccagcaggaggaccaagttcttcggcaccttccctggcaactacgtgaagaggctgtag

SEQ ID NO: 18636 - DNA, 4389 bp, synthetic construct
  source 1..4389: mol_type = other DNA; note = Synthetic coding sequence
atgttccggggccccaagccacccatcgcccccaagccccggctgacagccccaaatgagtggagggcctctgtgtacctgaatgacagcctgaacaagtgcagcaatggccgcctgccctgtgtggaccggggcctggatgagggccccaggagcatccccaagtgcagcgagagcgagacagatgaggactacatcgtggtgccccgggtgcccctgagagaagatgagcccaaggatgagggctctgtgggcaacaaggccctggtgtccccagagagcagcgctgaggaggaggaggagcgggaggagggcggggaggcctgtggcctggagggcaccggggccggggaggacagcgtggccccagctgcccctggggccggggccctgagccgggagggggaggagggcacagacctggccctggaggatgaaggagagggctgtgctgatgagcccggcaccctggagcaggtgagccgctctgaggaggaggagaagctggtgcagccccacagagaatgttccctggaggacagcggcccctgggccggggagggcgtcttccagagcgacctgctgctgccccacatccacggggaggaccaggagcccccagacaccccaggagaggccgaggaggatgatgaggagggctgtgccagcacagatcctgctggagcagatgagggcagcggccctgaccggcccacagaggacatgggccaggatgctgaggacaccagcgaggagcccccagagaaggaggagctggccggcgtgcaggaggccgagacagccacagactgcccagaggtgctggaggagggctgtgaggaggccactggagtgactggaggagagcaggtggacctgtctgagcccccagaccacgagaagaagaccaaccaggaggtggccgccgccaccctggaggaccacgcccaggatgagagcgctgaggagagctgccagatcgtgccctttgaaaatgactgcatggaggactttgtgaccagcctgaccggcagcccctatgagttcttccccacagagagcaccagcttctgcagcgagagctgcagccccctgtctgagagcgccaagggcctggagagcgagcaggcccccaagctgggcctgcgggcagaggagaaccccatggtgggcgccctgtgtggccagtgtggcagcctgcagggcggcgctgctgagggccctgctgccccagatgtggtggtggtgctggaggaggaggccctggatgatgccctggccaacccctacgtgatgggcgtgggcctgcccggccaggccgcccctggagagggcggccaggccgccagtgatgccctgggcggctacggcagcaaggaggagctgaactgtgaggccgagggcggcctggtgcctgctgacaggaagaacaccagcaccagggtgcggccccacagcggcaaggtggccggctacgtgcctgagaccgtgcctgaggagactggacctgaggccggcagcagcgcccctggcatcggcggcgctgctgaggaggtgggcaagaccctgctgagcctggagggcaagcccctggaggccagccgggccctgcctgccaagccccgggccttcaccctgtaccccaggagcttctctgtggagggccgggagatccctgtgtctgtgtaccaggagcctgagggcagcggcctggatgaccaccgcatcaagaggaaggaggacaacctgagcctgagctgtgtgattggcagcagcggcagcttcagccagaggaaccacctgcccagcagcggcaccagcacccccagctccatggtggacatccccccaccatttgacctggcctgcatcaccaagaagcccatcaccaagagcagccccagcctgctgattgaaagtgacagcccagacaagtacaagaagaagaagagcagcttcaagcgcttcctggccctgaccttcaagaagaagacagagaacaagctgcacgtggatgtgaatgtgagcagcagccgcagcagcagcgagagcagctaccacggccccagccgcatcctggaggtggacagaagaagcctgagcaacagcccccagctgaagagcaggacaggcaagctgcgggccagcgagagccccagcagcctcatcttctacagagatggcaagaggaaaggagtgcccttcagcaggacagtgtcccgggtggagagctttgaggacaggagcaggcctcccttcctgcccctgcccctgaccaagcccaggagcatctccttccccagcgctgacaccagtgactatgagaacatcccagccatgaacagcgactatgagaacatccagatccccccccggcggcctgcccgggccggggccttcaccaagctgtttgaggaccagagccgggccctgagcacagccaatgaaaatgatggctacgtggacatgagcagcttcaatgcctttgagagcaagcagcagagcgctgaccaggatgctgagagcgcctacacagagccctacaaggtgtgccccatcagcagcgctgcccccaaggaggacctgaccagtgatgaggagcagaggagcagcgaggaggaggacagcgccagccgggaccccagcgtgacccacaaggtggagggccagagccgggccctggtgattgcccaggagctgctgagcagcgagaaggcctacgtggagatgctgcagcacctgaacctggacttccatggagctgtgatgagggccctggatgacatggaccacgagggccgggacaccctggcccgggaggagctgcggcagggcctgtctgagctgcctgccatccatgacctgcaccagggcatcctggaggagctggaggagcggctgagcaactgggagagccagcagaaggtggctgatgtgttcctggcccgggagcagggctttgaccaccacgccacccacatcctgcagtttgaccgctacctgggcctgctgtctgagaactgcctgcacagcccccggctggccgctgctgtgcgggagtttgagcagagcgtgcagggcggcagccagacagccaagcaccggctgctgcgggtggtgcagaggctcttccagtaccaggtgctgctgacagactacctgaacaacctgtgcccagattctgcagaatatgacaacacccagggcgccctgagcctcatcagcaaggtgacagaccgggccaatgacagcatggagcagggcgagaacctgcagaagctggtgcacatcgagcacagcgtgcggggccagggcgacctgctgcagcccggccgggagttcctgaaggagggcaccctgatgaaggtgacaggcaagaacagaagacccaggcacctgttcctgatgaatgatgtgctgctgtacacctacccccagaaggatggcaagtaccgcctgaagaacaccctggccgtggccaacatgaaggtgtccaggcctgtgatggagaaggtgccctatgccctgaagattgagaccagcgagagctgcctgatgctgagcgccagcagctgtgccgagagagatgagtggtacggctgcctgagccgggccctgcctgaggactacaaggcccaggccctggccgccttccaccacagcgtggagatccgggagcggctgggcgtgtccctgggggagcggccccccaccctggtgcctgtgacccacgtgatgatgtgcatgaactgtggctgtgacttcagcctgaccctgcggcggcaccactgccacgcctgtgggaagatcgtgtgcaggaactgcagcaggaacaagtaccccctgaagtacctgaaggacaggatggccaaggtgtgtgatggctgctttggagagctgaagaagaggggccgggctgtgcccggcctgatgagggagaggcctgtgtccatgtccttccccctgagcagcccccgcttcagcggcagcgccttcagcagcgtcttccagagcatcaaccccagcaccttcaagaagcagaagaaggtgcccagcgccctgacagaggtggccgccagcggggagggcagcgccatcagcggctacctgagccgctgcaagaggggcaagaggcactggaagaagctgtggtttgtgatcaagggcaaggtgctgtacacctacatggccagcgaggacaaggtggccctggagagcatgcccctgctgggcttcaccatcgcccctgagaaggaggagggcagcagcgaggtgggccccatcttccacctgtaccacaagaagaccctcttctacagcttcaaggccgaggacaccaacagcgcccagcgctggattgaggccatggaggatgcctctgtgctgtag

SEQ ID NO: 18637 - DNA, 768 bp, synthetic construct
  source 1..768: mol_type = other DNA; note = Synthetic coding sequence
atggccagcagtgacctggagcagctgtgcagccacgtgaatgagaagattggcaacatcaagaagaccctgagcctgaggaactgtggccaggagcccaccctgaagacagtgctgaacaagattggagatgagatcatcgtcatcaatgagctgctgaacaagctggagctggagatccagtaccaggagcagaccaacaacagcctgaaggagctgtgtgagagcctggaggaggactacaaggacatcgagcacctgaaggaaaatgtgcccagccacctgccccaggtgacagtgacccagagctgtgtgaagggcagtgacctggaccctgaggagcccatcaaggtggaggagcctgagcctgtgaagaagccacccaaggagcagaggagcatcaaggagatgcccttcatcacctgtgatgagttcaacggggtgcccagctacatgaagagccggctgacctacaaccagatcaatgatgtgatcaaggagatcaacaaggctgtgatcagcaagtacaagatcctgcaccagcccaagaagtccatgaacagcgtgaccaggaacctgtaccaccgcttcattgatgaggagaccaaggacaccaagggccgctacttcatcgtggaggccgacatcaaggagttcaccaccctgaaggctgacaagaagttccacgtgctgctgaacatcctgcggcactgccggcggctgtctgaggtgcggggcggcggcctgacccgctacgtgatcacctag

SEQ ID NO: 18638 - DNA, 627 bp, synthetic construct
  source 1..627: mol_type = other DNA; note = Synthetic coding sequence
atgtctgctggaggagactttggaaaccccctgaggaagttcaagctggtgttcctgggggagcagagcgtgggcaagaccagcctcatcacccgcttcatgtatgacagctttgacaacacctaccaggccaccatcggcatcgacttcctgagcaagaccatgtacctggaggacagaacagtgcggctgcagctgtgggacacagctggccaggagcgcttccgcagcctcatccccagctacatccgggacagcacagtggccgtggtggtgtatgacatcaccaacctgaacagcttccagcagaccagcaagtggattgatgatgtgaggacagagcggggcagtgatgtgatcatcatgctggtgggcaacaagacagacctggccgacaagaggcagatcaccatcgaggagggggagcagagggccaaggagctgtctgtgatgtttattgagaccagcgccaagacaggctacaacgtgaagcagctgttccggcgggtggccagcgccctgcccggcatggagaatgtgcaggagaagagcaaggagggcatgattgacatcaagctggacaagccccaggagcccccagccagcgagggcggctgcagctgctag

SEQ ID NO: 18639 - DNA, 3168 bp, synthetic construct
  source 1..3168: mol_type = other DNA; note = Synthetic coding sequence
atgacagtggagcagaatgtgctgcagcagagcgctgcccagaagcaccagcagaccttcctgaaccagctgcgggagatcaccggcatcaatgacacccagatcctgcagcaggccctgaaggacagcaatggaaacctggagctggccgtggccttcctgacagccaagaatgccaagaccccccagcaggaggagaccacctactaccagacagccctgcctggaaatgaccgctacatctctgtgggcagccaggccgacaccaacgtcatcgacctgactggagatgacaaggatgacctgcagagggccatcgccctgagcctggccgagagcaacagagccttccgggagaccggcatcacagatgaggagcaggccatcagccgggtgctggaggccagcattgctgagaacaaggcctgcctgaagaggacccccacagaggtgtggagggacagcaggaacccctatgacaggaagaggcaggacaaggcccctgtgggcctgaagaatgtgggcaacacctgctggttctctgctgtgatccagagcctcttcaacctgctggagttccggcggctggtgctgaactacaagccacccagcaatgcccaggacctgcccaggaaccagaaggagcacaggaacctgcccttcatgagggagctgcgctacctgtttgccctgctggtgggcaccaagaggaaatatgtggaccccagcagagctgtggagatcctgaaggatgccttcaagagcaatgacagccagcagcaggatgtgtctgagttcacccacaagctgctggactggctggaggatgccttccagatgaaggccgaggaggagacagatgaggagaagcccaagaaccccatggtggagctgttctacggccgcttcctggccgtgggcgtgctggagggcaagaagtttgaaaatacagagatgtttggccagtaccccctgcaggtgaatggcttcaaggacctgcatgaatgtctggaggccgccatgattgaaggagaaattgagagcctgcacagcgagaacagcggcaagagcggccaggagcactggttcacagagctgccccctgtgctgacctttgagctgagcagatttgagttcaaccaggccctgggccggcctgagaagatccacaacaagctggagttcccccaggtgctgtacctggaccgctacatgcacaggaaccgggagatcacccgcatcaagcgggaggagatcaagaggctgaaggactacctgactgtgctgcagcagaggctggagcgctacctgtcctatggcagcggccccaagcgcttccccctggtggatgtgctgcagtatgccctggagtttgccagcagcaagcctgtgtgcaccagccctgtggatgacattgatgccagcagccccccatctggcagcatccccagccagaccctgcccagcaccacagagcagcagggcgccctgagcagcgagctgcccagcaccagccccagctctgtggccgccatcagcagccgcagcgtcatccacaagcccttcacccagagccgcatccccccagacctgcccatgcacccagcccccaggcacatcacagaggaggagctgtctgtgctggagagctgcctgcaccgctggaggacagaaattgaaaatgacacccgggacctgcaggagagcatcagccgcatccacaggaccatcgagctgatgtacagcgacaagtccatgatccaggtgccctaccgcctgcatgctgtgctggtgcatgagggccaggccaatgccggccactactgggcctacatctttgaccaccgggagagccgctggatgaagtacaatgacattgctgtgaccaagagctcctgggaggagctggtgcgggacagctttggaggctacagaaatgccagcgcctactgcctgatgtacatcaatgacaaggcccagttcctgatccaggaggagttcaacaaggagaccggccagcccctggtgggcatcgagaccctgcccccagacctgcgggactttgtggaggaggacaaccagagatttgagaaggagctggaggagtgggatgcccagctggcccagaaggccctgcaggagaagctgctggccagccagaagctgcgggagagcgagacctctgtgaccacagcccaggccgccggggaccctgagtacctggagcagcccagcagaagtgacttcagcaagcacctgaaggaggagaccatccagatcatcaccaaggccagccatgaacatgaggacaagagccctgagaccgtgctgcagagcgccatcaagctggagtatgcccggctggtgaagctggcccaggaggacaccccacctgagacagactaccgcctgcaccacgtggtggtgtacttcatccagaaccaggcccccaagaagatcatcgagaagaccctgctggagcagtttggagacaggaacctgagctttgatgagcgctgccacaacatcatgaaggtggcccaggccaagctggagatgatcaagccagaggaggtgaacctggaggagtatgaggagtggcaccaggactacaggaagttccgggagaccaccatgtacctgatcatcggcctggagaacttccagcgggagagctacatcgacagcctgctcttcctgatctgtgcctaccagaacaacaaggagctgctgagcaagggcctgtaccggggccatgatgaggagctgatcagccactaccgccgggagtgcctgctgaagctgaatgagcaggccgctgagctgtttgaaagtggagaagatcgggaggtgaacaacggcctcatcatcatgaatgagttcatcgtgcccttcctgcccctgctgctggtggatgagatggaggagaaggacatcctggccgtggaggacatgaggaaccgctggtgcagctacctgggccaggagatggagccccacctgcaggagaagctgacagacttcctgcccaagctgctggactgcagcatggagatcaagagcttccacgagccccccaagctgcccagctacagcacccatgagctgtgtgaaagatttgcccgcatcatgctgagcctgagcaggaccccagcagatggaagatag

SEQ ID NO: 18640 - DNA, 3264 bp, synthetic construct
  source 1..3264: mol_type = other DNA; note = Synthetic coding sequence
atgacagtggagcagaatgtgctgcagcagagcgctgcccagaagcaccagcagaccttcctgaaccagctgcgggagatcaccggcatcaatgacacccagatcctgcagcaggccctgaaggacagcaatggaaacctggagctggccgtggccttcctgacagccaagaatgccaagaccccccagcaggaggagaccacctactaccagacagccctgcctggaaatgaccgctacatctctgtgggcagccaggccgacaccaacgtcatcgacctgactggagatgacaaggatgacctgcagagggccatcgccctgagcctggccgagagcaacagagccttccgggagaccggcatcacagatgaggagcaggccatcagccgggtgctggaggccagcattgctgagaacaaggcctgcctgaagaggacccccacagaggtgtggagggacagcaggaacccctatgacaggaagaggcaggacaaggcccctgtgggcctgaagaatgtgggcaacacctgctggttctctgctgtgatccagagcctcttcaacctgctggagttccggcggctggtgctgaactacaagccacccagcaatgcccaggacctgcccaggaaccagaaggagcacaggaacctgcccttcatgagggagctgcgctacctgtttgccctgctggtgggcaccaagaggaaatatgtggaccccagcagagctgtggagatcctgaaggatgccttcaagagcaatgacagccagcagcaggatgtgtctgagttcacccacaagctgctggactggctggaggatgccttccagatgaaggccgaggaggagacagatgaggagaagcccaagaaccccatggtggagctgttctacggccgcttcctggccgtgggcgtgctggagggcaagaagtttgaaaatacagagatgtttggccagtaccccctgcaggtgaatggcttcaaggacctgcatgaatgtctggaggccgccatgattgaaggagaaattgagagcctgcacagcgagaacagcggcaagagcggccaggagcactggttcacagagctgccccctgtgctgacctttgagctgagcagatttgagttcaaccaggccctgggccggcctgagaagatccacaacaagctggagttcccccaggtgctgtacctggaccgctacatgcacaggaaccgggagatcacccgcatcaagcgggaggagatcaagaggctgaaggactacctgactgtgctgcagcagaggctggagcgctacctgtcctatggcagcggccccaagcgcttccccctggtggatgtgctgcagtatgccctggagtttgccagcagcaagcctgtgtgcaccagccctgtggatgacattgatgccagcagccccccatctggcagcatccccagccagaccctgcccagcaccacagagcagcagggcgccctgagcagcgagctgcccagcaccagccccagctctgtggccgccatcagcagccgcagcgtcatccacaagcccttcacccagagccgcatccccccagacctgcccatgcacccagcccccaggcacatcacagaggaggagctgtctgtgctggagagctgcctgcaccgctggaggacagaaattgaaaatgacacccgggacctgcaggagagcatcagccgcatccacaggaccatcgagctgatgtacagcgacaagtccatgatccaggtgccctaccgcctgcatgctgtgctggtgcatgagggccaggccaatgccggccactactgggcctacatctttgaccaccgggagagccgctggatgaagtacaatgacattgctgtgaccaagagctcctgggaggagctggtgcgggacagctttggaggctacagaaatgccagcgcctactgcctgatgtacatcaatgacaaggcccagttcctgatccaggaggagttcaacaaggagaccggccagcccctggtgggcatcgagaccctgcccccagacctgcgggactttgtggaggaggacaaccagagatttgagaaggagctggaggagtgggatgcccagctggcccagaaggccctgcaggagaagctgctggccagccagaagctgcgggagagcgagacctctgtgaccacagcccaggccgccggggaccctgagtacctggagcagcccagcagaagtgacttcagcaagcacctgaaggaggagaccatccagatcatcaccaaggccagccatgaacatgaggacaagagccctgagaccgtgctgcagagcatcatgatgacccccaacatgcagggcatcatcatggccatcggcaagagccgctctgtgtatgacagatgtggccctgaggccggcttcttcaaggccatcaagctggagtatgcccggctggtgaagctggcccaggaggacaccccacctgagacagactaccgcctgcaccacgtggtggtgtacttcatccagaaccaggcccccaagaagatcatcgagaagaccctgctggagcagtttggagacaggaacctgagctttgatgagcgctgccacaacatcatgaaggtggcccaggccaagctggagatgatcaagccagaggaggtgaacctggaggagtatgaggagtggcaccaggactacaggaagttccgggagaccaccatgtacctgatcatcggcctggagaacttccagcgggagagctacatcgacagcctgctcttcctgatctgtgcctaccagaacaacaaggagctgctgagcaagggcctgtaccggggccatgatgaggagctgatcagccactaccgccgggagtgcctgctgaagctgaatgagcaggccgctgagctgtttgaaagtggagaagatcgggaggtgaacaacggcctcatcatcatgaatgagttcatcgtgcccttcctgcccctgctgctggtggatgagatggaggagaaggacatcctggccgtggaggacatgaggaaccgctggtgcagctacctgggccaggagatggagccccacctgcaggagaagctgacagacttcctgcccaagctgctggactgcagcatggagatcaagagcttccacgagccccccaagctgcccagctacagcacccatgagctgtgtgaaagatttgcccgcatcatgctgagcctgagcaggaccccagcagatggaagatag

SEQ ID NO: 18641 - DNA, 2559 bp, synthetic construct
  source 1..2559: mol_type = other DNA; note = Synthetic coding sequence
atgagctctgtgagccccatccagatccccagccggctgcccctgctgctgacccatgaaggagtgctgctgcccggcagcaccatgaggacctctgtggacagcgccaggaacctgcagctggtgcgcagccggctgctgaagggcaccagcctgcagagcaccatcctgggcgtcatccccaacaccccagaccctgccagtgatgcccaggacctgccccccctgcacagaattggaacagctgccctggccgtgcaggtggtgggcagcaactggcccaagccccactacaccctgctgatcaccggcctgtgccgcttccagatcgtgcaggtgctgaaggagaagccctaccccatcgccgaggtggagcagctggaccggctggaggagttccccaacacctgcaagatgagggaggagctgggggagctgtctgagcagttctacaagtatgctgtgcagctggtggagatgctggacatgtctgtgcctgctgtggccaagctgcggcggctgctggacagcctgccccgggaggccctgcctgacatcctgaccagcatcatccgcaccagcaacaaggagaagctgcagatcctggatgctgtgtccctggaggagcgcttcaagatgaccatccccctgctggtgcggcagatcgagggcctgaagctgctgcagaagaccaggaagcccaagcaggatgatgacaagagggtgattgccatccggcccatccgccgcatcacccacatcagcggcaccctggaggatgaagatgaagatgaagataatgatgacatcgtgatgctggagaagaagatccgcaccagctccatgcctgagcaggcccacaaggtgtgtgtgaaggagatcaagaggctgaagaagatgccccagagcatgccagaatatgccctgaccaggaactacctggagctgatggtggagctgccctggaacaagagcaccacagaccggctggacatccgggccgcccgcatcctgctggacaatgaccactacgccatggagaagctgaagaagagggtgctggagtacctggccgtgcggcagctgaagaacaacctgaagggccccatcctgtgctttgtgggccccccaggagtgggcaagacctctgtgggccgctctgtggccaagaccctgggccgggagttccacagaattgccctgggcggcgtgtgtgaccagagcgacatccggggccacaggaggacctacgtgggctccatgcctggccgcatcatcaatggcctgaagacagtgggcgtgaacaaccctgtgttcctgctggatgaggtggacaagctgggcaagagcctgcagggcgaccctgctgctgccctgctggaggtgctggaccctgagcagaaccacaacttcacagaccactacctgaatgtggcctttgacctgagccaggtgctcttcatcgccacagccaacaccacagccaccatcccagctgccctgctggacaggatggagatcatccaggtgcccggctacacccaggaggagaagattgaaattgcccaccgccacctgatccccaagcagctggagcagcacggcctgaccccccagcagatccagatcccccaggtgaccaccctggacatcatcacccgctacacccgggaggccggcgtgcgcagcctggacaggaagctgggcgccatctgcagagctgtggccgtgaaggtggccgagggccagcacaaggaggccaagctggacagaagtgatgtgacagagcgggagggctgccgggagcacatcctggaggatgagaagccagagagcatcagtgacaccacagacctggccctgcccccagagatgcccatcctgattgacttccacgccctgaaggacatcctgggcccccccatgtatgagatggaggtgtcccagaggctgagccagcccggggtggccatcggcctggcctggacccccctgggcggggagatcatgtttgtggaggccagcaggatggatggagagggccagctgaccctgaccggccagctgggagatgtgatgaaggagagcgcccacctggccatctcctggctgcggagcaatgccaagaagtaccagctgaccaatgccttcggcagctttgacctgctggacaacacagacatccacctgcacttccctgctggagctgtgaccaaggatggccccagcgctggggtgaccatcgtgacctgcctggccagcctcttcagcggccgcctggtgcggagtgatgtggccatgaccggggagatcaccctgcggggcctggtgctgcctgtgggcggcatcaaggacaaggtgctggccgcccacagagctggcctgaagcaggtgatcatccccaggagaaatgagaaggacctggagggcatccctggaaatgtgcggcaggacctgagctttgtgacagccagctgcctggatgaggtgctgaatgctgcctttgatggcggcttcaccgtgaagaccaggcctggcctgctgaacagcaagctgtag

SEQ ID NO: 18642 - DNA, 390 bp, synthetic construct
  source 1..390: mol_type = other DNA; note = Synthetic coding sequence
atggctgatggcggcggcggcggcggcaccggggctgtgggcggcggcggcaccagccaggccagcgctggagctgccactggagccaccggggccagcggcggcggcggccccatcaacccagccagcctgcccccaggggacccccagctgattgccctgattgtggagcagctgaagagccggggcctgtttgacagcttcagaagagactgcctggctgatgtggacaccaagccagcctaccagaacctgcggcagaaggtggacaactttgtgtccacccacctggacaagcaggagtggaaccccaccatgaacaagaaccagctgagaaatggcctgcggcagagcgtggtgcagatccggcagaccccatttgagagctag

SEQ ID NO: 18643 - DNA, 1425 bp, synthetic construct
  source 1..1425: mol_type = other DNA; note = Synthetic coding sequence
atggatgaggccggcagcagcgccagcggcggcggcttccggcctggggtggacagcctggatgagccccccaacagccgcatcttcctggtgatcagcaagtacaccccagagagcgtgctgcgggagcgcttcagcccctttggagacatccaggacatctgggtggtgcgggacaagcacaccaaggagagcaagggcatcgcctttgtgaagtttgcccggagcagccaggcctgccgggccatggaggagatgcacggccagtgcctgggccccaatgacaccaagcccatcaaggtgttcatcgcccagagccgcagcagcggcagccacagagatgtggaggatgaggagctgacccgcatctttgtgatgatccccaagagctacacagaggaggacctgcgggagaagttcaaggtgtatggagacatcgagtactgcagcatcatcaagaacaaggtgactggagagagcaagggcctgggctacgtgcgctacctgaagcccagccaggccgcccaggccatcgagaactgtgacaggagcttccgggccatcctggccgagcccaagaacaaggccagcgagagcagcgagcaggactactacagcaacatgaggcaggaggccctgggccacgagccccgggtgaacatgttcccctttgagcagcagagcgagttcagcagctttgacaagaatgacagccggggccaggaggccatcagcaagaggctgtctgtggtgtcccgggtgcccttcacagaggagcagctgttcagcatctttgatattgtgcccggcctggagtactgtgaggtgcagagggacccctacagcaactacggccacggcgtggtgcagtacttcaacgtggccagcgccatctatgccaagtacaagctgcacggcttccagtacccacctggcaacagaattggagtgtccttcattgatgatggcagcaatgccacagacctgctgaggaagatggccacccagatggtggccgcccagctggcctccatggtgtggaacaaccccagccagcagcagttcatgcagtttggaggcagcagcggcagccagctgccccagatccagacagatgtggtgctgcccagctgcaagaagaaggccccagctgagacccctgtgaaggagcggctcttcatcgtgttcaacccccaccccctgcccctggatgtgctggaggacatcttctgccgctttggaaacctgattgaggtgtacctggtgtctgggaagaatgtgggctacgccaagtatgctgaccgcatcagcgccaatgatgccatcgccaccctgcacggcaagatcctgaatggagtgcggctgaaggtgatgctggccgacagcccccgggaggagagcaacaagaggcagaggacctactag

SEQ ID NO: 18644 - DNA, 1938 bp, synthetic construct
  source 1..1938: mol_type = other DNA; note = Synthetic coding sequence
atgaggcccaggaaggccttcctgctgctgctgctgctgggcctggtgcagctgctggccgtggccggggctgagggcccagatgaggacagcagcaacagagaaaatgccattgaagatgaggaggaggaggaggaggaggatgatgatgaggaggaggatgacctggaggtgaaggaggagaatggagtgctggtgctgaatgatgccaactttgacaactttgtggccgacaaggacacagtgctgctggagttctacgccccctggtgtggccactgcaagcagtttgccccagaatatgagaagatcgccaacatcctgaaggacaaggacccccccatccctgtggccaagattgatgccaccagcgcctctgtgctggccagcagatttgatgtgtctggctaccccaccatcaagatcctgaagaagggccaggccgtggactatgagggcagcaggacccaggaggagatcgtggccaaggtgcgggaggtgtcccagcctgactggaccccacctcctgaggtgaccctggtgctgaccaaggaaaattttgatgaggtggtgaatgatgctgacatcatcctggtggagttctacgccccctggtgtggccactgcaagaagctggccccagaatatgagaaggccgccaaggagctgagcaagaggagcccccccatccccctggccaaggtggatgccacagctgagacagacctggccaagagatttgatgtgtctggctaccccaccctgaagatcttcaggaagggccggccctatgactacaacggcccccgggagaagtatggaattgtggactacatgattgagcagagcggcccccccagcaaggagatcctgaccctgaagcaggtgcaggagttcctgaaggatggagatgatgtgatcatcattggagtcttcaagggggagagtgaccctgcctaccagcagtaccaggatgctgccaacaacctgcgggaggactacaagttccaccacaccttcagcacagagatcgccaagttcctgaaggtgtcccagggccagctggtggtgatgcagcctgagaagttccagagcaaatatgagcccaggagccacatgatggatgtgcagggcagcacccaggacagcgccatcaaggactttgtgctgaagtatgccctgcccctggtgggccacaggaaggtgtccaatgatgccaagcgctacacccggcggcccctggtggtggtgtactacagcgtggacttctcctttgactacagagctgccacccagttctggaggagcaaggtgctggaggtggccaaggacttccctgagtacacctttgccatcgcagatgaggaggactatgctggggaggtgaaggacctgggcctgtctgagagcggggaggatgtgaatgctgccatcctggatgagagcggcaagaagtttgccatggagcctgaggagtttgacagcgacaccctgcgggagtttgtgacagccttcaagaagggcaagctgaagcctgtgatcaagagccagcctgtgcccaagaacaacaagggccctgtgaaggtggtggtgggcaagacctttgacagcatcgtgatggaccccaagaaggatgtgctgattgagttctacgccccctggtgtggccactgcaagcagctggagcctgtgtacaacagcctggccaagaagtacaagggccagaagggcctggtgattgccaagatggatgccacagccaatgatgtgcccagcgaccgctacaaggtggagggcttccccaccatctactttgcccccagcggggacaagaagaaccctgtgaagtttgaaggaggagaccgggacctggagcacctgagcaagttcatcgaggagcacgccaccaagctgagcaggaccaaggaggagctgtag

SEQ ID NO: 18645 - DNA, 1338 bp, synthetic construct
  source 1..1338: mol_type = other DNA; note = Synthetic coding sequence
atgtaccccaaccccctcatctactgcacctgctgggacccctggaacctgggccccaggaagctgatcaagaccccccagctgcccaggaagaacagcacaggcagcagcaagctgacccccctggtgcctgcccccaagaaccacaactacctgcagcccaccaagcctgtggtgagccccaagatgaagatccacagcgcccggcaggaggagaccaacaagagcttctatgaggtgatcaacgtgtccccaggctaccagctggtgaggaaccgggagcagatctctgtgaccctgggagatgagatgtttgacaggaagaagcgctgggagagcgagatcccagacaagggccgcttcagcaggaccaacatcatcagtgacctggaggagcagatcagcgagctgacagccatcatcgagcagatgaacagagaccaccagagcgcccagaagctgctgagcagcgagatggacctgcgctgtgccgagatgaagcagaactttgagaacaagaaccgggagctgaaggaggcccatgaagctgagctgtctgagctggagaacaactacaaggccgccctgaaggccgagaagctggccgcccaggagaagctggaggagatgggcaaggagtacaagtacctgaagaacatgttccgcacctaccaggacagcatctatgatgagatggaggagaagtggagcaagcagaaggccaagtggaagaaggatgagaagtttgagcgggagaacatcctgctgcagcagaagaagaagatgaccaagaagtttgagatggagagcggggaggaggacaagaagatcaatgaaagctgcagcgctgtgtttgagaacttcatccaggagaaggaggagctgctgaagcagcaccagagcgacaccctgcagctggaggagctgaggaagaccaaggaggtgccctggaggcgggaccagatcaacagacactggcatgatgtgctgcagcagctgctgctgatgcaggtgatgcaggaggagctgcacgcccaggccctgatcctggagagcctgaacaccaacctgtactacacccagctggagctgcagaaggagaaggccatcgtgggcaacctggagaagatgctgcagaccaagtttgctgagacagaggagaagtacaagcacaccatccagatcctgacagaggagaacatccacctgaagcagaagatcatcagcaagaatgaggagatctgtgagggctgcagcggccgcctggccagcatcaccgtgtccaaggatgacagcgacacagtgcaggacggcagcaagaagggccaggagagctag

SEQ ID NO: 18646 - DNA, 1872 bp, synthetic construct
  source 1..1872: mol_type = other DNA; note = Synthetic coding sequence
atggagcccccccaggagaccaaccggcccttcagcaccctggacaacagaagtggccaggtgcaggtgctgagcgccacccccctgctgcagaggaacccctacagcagcccagacatcatgcacatcaagggcagcgaggccagctctgtgccctatgccctgaaccagggcaccacagccctgcccaagaacaagaaccaggagggcaccggccaccggctgctgaacatgctgaggaagaccctgaaggagagtgacagcgaggagctggagatcacccaggagacccccaacctggtgccctttggagatgtggtgggctgcctgggcatccacatcaagaactgccgccacttcatgcccaagatcagcctgcagcactacgccaacctcttcatccgcatcagcatcaacaaggctgtgaagtgcaccaagatgtgcagcctgctgagcaagaatgatgagaagaacacagtcatcaagtttgatgaggtgaagtacttctctgtgcaggtgcccaggagatatgatgacaagaggaacaacatcctgctggagctgatccagtatgacaaccgggagaagagggccttcctgctgggctctgtgcagatccacctgtatgaagtcatccagaagggctgcttcatcgaggaggtgcaggtgctgcacggcaacatctttgtgtgccgcctggaggtggagttcatgttctcctatggcaactttggctacggcttcagccaccagctgaagcccctgcagaagatcacagagcccagcatgttcatgaacctggcccctcctcctgagaggacagatcctgtgaccaaggtgatcaccccccagacagtggagtacccagccttcctgagcccagacctgaatgtgacagtgggcaccccagctgtgcagagcagcaaccagcccagcgtggtgcggctggagaagctgcagcagcagccccgggagcggctggagaagatgaagaaggagtacagaaacctgaacacctggattgacaaggccaactacctggagagcatcctgatgcccaagctggagcacaaggacagcgaggagaccaacattgatgaggccagcgagaacaccaagagcaaccaccctgaggaggagctggagaacatcgtgggcgtggacatccccctggtgaatgaggaggccgagaccacagccaatgagctgctggacaatgacagcgagaagggcctgaccatccccaccctgaaccagagcgaccaggacaacagcacagcagatgccagcaagaatgatgagagcacccccagccccacagaggtgcacagcctgtgcaccatcagcaaccaggagaccatcaaggccggccgcatcccccccctgggggagcggcagagcgagagcatgccagacaggaagatgaagaatgtgttcttccccctggaggtgaagctgaaggacaactaccccagcatcctgaaggctgacagcagcctgtctgaggtggccttcagccccaaggagtacaacagccccagcttccggcctgagtacatcgagttcaagcccaagttccaggactgcagcgacaagtttgaggacctgcatgacatgaccagcttcacccacctgaagaaggtgaagagccgcagccggctgctgggcaagagcagtgatgacatccacaaccacgcccggcacagcgcccggccctacacagcccctgaggtgaacaagcagcgggagagctacagcggcaagttcaccagcaggaggatggtgagcagcggcctggtgcacatcaatgacaagaccagtgactatgagatgcacaagatgaggcccaagaagatcaagaggggctactag

SEQ ID NO: 18647 - DNA, 3594 bp, synthetic construct
  source 1..3594: mol_type = other DNA; note = Synthetic coding sequence
atgcacatcaagagcatcatcctggagggcttcaagagctatgcccagaggacagaggtgaatggatttgaccccctcttcaatgccatcaccggcctgaatggcagcggcaagagcaacatcctggacagcatctgcttcctgctgggcatcagcaacctgagccaggtgcgggccagcaacctgcaggacctggtgtacaagaatggccaggccggcatcaccaaggcctctgtgtccatcacctttgacaacagcgacaagaagcagagccccctgggctttgaggtgcatgatgagatcaccgtgacccggcaggtggtgattggaggcaggaacaagtacctgatcaacggggtgaatgccaacaacaccagggtgcaggacctcttctgcagcgtgggcctgaatgtgaacaacccccacttcctgatcatgcagggccgcatcaccaaggtgctgaacatgaagcccccagagatcctgtccatgattgaggaggccgccggcaccaggatgtatgagtacaagaagattgctgcccagaagaccatcgagaagaaggaggccaagctgaaggagatcaagaccatcctggaggaggagatcacccccaccatccagaagctgaaggaggagaggagcagctacctggagtaccagaaggtgatgagagaaattgagcacctgagccggctgtacatcgcctaccagttcctgctggccgaggacaccaaggtgcgctctgctgaggagctgaaggagatgcaggacaaggtgatcaagctgcaggaggagctgtctgaaaatgacaagaagatcaaggccctgaaccatgaaattgaggagctggagaagaggaaggacaaggagaccggcggcatcctgcggagcctggaggatgccctggccgaggcccagagggtgaacaccaagagccagagcgcctttgacctgaagaagaagaacctggcctgtgaggagagcaagaggaaggagctggagaagaacatggtggaggacagcaagaccctggccgccaaggagaaggaggtgaagaagatcacagatggcctgcacgccctgcaggaggccagcaacaaggatgctgaggccctggccgccgcccagcagcacttcaatgctgtgtctgctggcctgagcagcaatgaagatggagctgaggccaccctggccggccagatgatggcctgcaagaatgacatcagcaaggcccagacagaggccaagcaggcccagatgaagctgaagcacgcccagcaggagctgaagaacaagcaggccgaggtgaagaagatggacagcggctacaggaaggaccaggaggccctggaggccgtgaagaggctgaaggagaagctggaggccgagatgaagaagctgaactatgaggagaacaaggaggagagcctgctggagaagaggcggcagctgagccgggacatcggccgcctgaaggagacctatgaggccctgctggcccgcttccccaacctgcgctttgcctacaaggaccctgagaagaactggaacagaaactgtgtgaagggcctggtggccagcctcatctctgtgaaggacaccagcgccaccacagccctggagctggtggccggggagcggctgtacaacgtggtggtggacacagaggtgacaggcaagaagctgctggagcggggggagctgaagaggcgctacaccatcatccccctgaacaagatcagcgcccgctgcatcgcccctgagaccctgcgggtggcccagaacctggtgggccctgacaacgtgcacgtggccctgagcctggtggagtacaagccagagctgcagaaggccatggagtttgtgtttggcaccacctttgtgtgtgacaacatggacaatgccaagaaggtggcctttgacaagaggatcatgaccaggacagtgaccctgggcggagatgtgtttgacccccacggcaccctgagcggcggggcccggagccaggccgccagcatcctgaccaagttccaggagctgaaggatgtgcaggatgagctgcgcatcaaggaaaatgagctgcgggccctggaggaggagctggccggcctgaagaacacagctgagaagtaccggcagctgaagcagcagtgggagatgaagacagaggaggccgacctgctgcagaccaagctgcagcagagcagctaccacaagcagcaggaggagctggatgccctgaagaagaccatcgaggagagcgaggagaccctgaagaacaccaaggagatccagaggaaggccgaggagaagtatgaggtgctggagaacaagatgaagaatgctgaggccgagcgggagcgggagctgaaggatgcccagaagaagctggactgtgccaagaccaaggcagatgccagcagcaagaagatgaaggagaagcagcaggaggtggaggccatcaccctggagctggaggagctgaagcgggagcacaccagctacaagcagcagctggaggccgtgaatgaggccatcaagagctatgagagccagatcgaggtgatggctgctgaggtggccaagaacaaggagagcgtgaacaaggcccaggaggaggtgaccaagcagaaggaggtgatcacagcccaggacaccgtcatcaaggccaagtatgcagaggtggccaagcacaaggagcagaacaatgacagccagctgaagatcaaggagctggaccacaacatcagcaagcacaagcgggaggctgaagatggagctgccaaggtgtccaagatgctgaaggactatgactggatcaatgctgagcggcacctgtttggccagcccaacagcgcctatgacttcaagaccaacaaccccaaggaggccggccagaggctgcagaagctgcaggagatgaaggagaagctgggcagaaatgtgaacatgagggccatgaatgtgctgacagaggccgaggagcgctacaatgacctgatgaagaagaagagaattgtggagaatgacaagagcaagatcctgaccaccatcgaggacctggaccagaagaagaaccaggccctgaacatcgcctggcagaaggtgaacaaggactttggcagcatcttcagcaccctgctgcccggggccaatgccatgctggcccctcctgagggccagacagtgctggatggcctggagttcaaggtggccctgggcaacacctggaaggagaacctgacagagctgagcggcggccagaggagcctggtggccctgagcctcatcctgtccatgctgctcttcaagccagcccccatctacatcctggatgaggtggatgctgccctggacctgagccacacccagaacatcggccagatgctgcggacccacttcacccacagccagttcatcgtggtgtccctgaaggagggcatgttcaacaatgccaacgtgctcttcaagaccaagtttgtggatggagtgtccacagtggcccgcttcacccagtgccagaatggcaagatcagcaaggaggccaagagcaaggccaagccacccaagggggcccacgtggaggtgtag

SEQ ID NO: 18648 - DNA, 1080 bp, synthetic construct
  source 1..1080: mol_type = other DNA; note = Synthetic coding sequence
atgaggacagctgaccgggaggcccggcccggcctgcccagcctgctgctgctgctgctggccggggccggcctgtctgctgccagccccccagctgccccccgcttcaacgtgtccctggacagcgtgcctgagctgcgctggctgcctgtgctgcggcactatgacctggacctggtgcgggccgccatggcccaggtgattggagacagagtgcccaagtgggtgcacgtgctgattggcaaggtggtgctggagctggagcgcttcctgccccagcccttcaccggggagatccggggcatgtgtgacttcatgaacctgagcctggccgactgcctgctggtgaacctggcctatgagagctctgtgttctgcaccagcatcgtggcccaggacagccggggccacatctaccacggcaggaacctggactacccctttggaaatgtgctgaggaagctgactgtggatgtgcagttcctgaagaatggccagatcgccttcaccggcaccaccttcatcggctacgtgggcctgtggacaggccagagcccccacaagttcaccgtgtctggagatgagcgggacaagggctggtggtgggagaatgccatcgccgccctcttcagaagacacatccctgtgtcctggctgatccgggccaccctgtctgagagcgagaactttgaggccgctgtgggcaagctggccaagacccccctgattgctgatgtgtactacatcgtgggcggcaccagcccccgggagggcgtggtgatcaccaggaacagagatggccctgctgacatctggcccctggaccccctgaatggagcctggttccgggtggagaccaactatgaccactggaagccagcccccaaggaggatgacaggaggaccagcgccatcaaggccctgaatgccaccggccaggccaacctgagcctggaggccctcttccagatcctgtctgtggtgcctgtgtacaacaacttcaccatctacaccaccgtgatgtctgctggcagcccagacaagtacatgacccgcatccggaaccccagcaggaagtag

SEQ ID NO: 18649 - DNA, 1647 bp, synthetic construct
  source 1..1647: mol_type = other DNA; note = Synthetic coding sequence
atggccctgcacgtgcccaaggcccctggctttgcccagatgctgaaggagggcgccaagcacttcagcggcctggaggaggccgtgtacagaaacatccaggcctgcaaggagctggcccagaccaccaggacagcctacggccccaacggcatgaacaagatggtgatcaaccacctggagaagctgtttgtgaccaatgatgctgccaccatcctgcgggagctggaggtgcagcaccctgctgccaagatgattgtgatggccagccacatgcaggagcaggaggtgggagatggcaccaactttgtgctggtgtttgctggggccctgctggagctggccgaggagctgctgagaattggcctgtctgtgtctgaggtgattgagggctatgagatcgcctgcaggaaggcccacgagatcctgcccaacctggtgtgctgcagcgccaagaacctgcgggacattgatgaggtgagcagcctgctgcggaccagcatcatgagcaagcagtatggaaatgaggtgttcctggccaagctgattgcccaggcctgtgtgtccatcttcccagacagcggccacttcaacgtggacaacatccgggtgtgcaagatcctgggcagcggcatcagcagcagctctgtgctgcacggcatggtgttcaagaaggagacagaaggagatgtgacctctgtgaaggatgccaagattgctgtgtacagctgcccctttgatggcatgatcacagagaccaagggcaccgtgctgatcaagacagctgaggagctgatgaacttcagcaagggggaggagaacctgatggatgcccaggtgaaggccatcgctgacaccggggccaacgtggtggtgactggaggcaaggtggccgacatggccctgcactacgccaacaagtacaacatcatgctggtgcggctgaacagcaagtgggacctgcggcggctgtgcaagacagtgggcgccacagccctgccccggctgaccccacctgtgctggaggagatgggccactgtgacagcgtgtacctgtctgaggtgggggacacccaggtggtggtgttcaagcatgagaaggaggatggagccatcagcaccatcgtgctgcggggcagcacagacaacctgatggatgacatcgagagagctgtggatgatggagtgaacaccttcaaggtgctgacccgggacaagaggctggtgcctgggggcggggccacagaaattgagctggccaagcagatcaccagctatggagagacctgccccggcctggagcagtatgccatcaagaagtttgctgaggcctttgaggccatcccccgggccctggccgagaacagcggcgtgaaggccaatgaagtcatcagcaagctgtatgctgtgcaccaggagggcaacaagaatgtgggcctggacatcgaggccgaggtgcctgctgtgaaggacatgctggaggccggcatcctggacacctacctgggcaagtactgggccatcaagctggccaccaatgctgctgtgacagtgctgcgggtggaccagatcatcatggccaagccagctgggggccccaagcccccatctgggaagaaggactgggatgatgaccagaatgactag

SEQ ID NO: 18650 - DNA, 690 bp, synthetic construct
  source 1..690: mol_type = other DNA; note = Synthetic coding sequence
atgaacatcagaaatgcccagccagatgacctgatgaacatgcagcactgcaacctgctgtgcctgcctgagaactaccagatgaagtactacctgtaccacggcctgtcctggccccagctgagctacatcgccgaggatgaagatggcaagatcgtgggctacgtgctggccaagatggaggaggagccagatgatgtgccccacggccacatcaccagcctggccgtgaagaggagccaccggcggctgggcctggcccagaagctgatggaccaggccagccgggccatgattgagaacttcaatgccaagtatgtgtccctgcacgtgaggaagagcaacagacctgccctgcacctgtacagcaacaccctgaacttccagatcagcgaggtggagcccaagtactatgcagatggagaagatgcctatgccatgaagagggacctgagccagatggctgatgagctgcggcggcagatggacctgaagaagggcggctacgtggtgctgggcagccgggagaaccaggagacccagggcagcaccctgagtgacagcgaggaggcctgccagcagaagaacccagccacagaggagagcggcagtgacagcaaggagcccaaggagagcgtggagagcaccaacgtgcaggacagcagcgagagcagtgacagcaccagctag

SEQ ID NO: 18651 - DNA, 1374 bp, synthetic construct
  source 1..1374: mol_type = other DNA; note = Synthetic coding sequence
atgtctgccctgcggcgcagcggctacggccccagtgatggccccagctatggccgctactacggccctggaggaggagatgtgcctgtgcaccccccaccacccctgtaccccctgcggcctgagcccccccagccccccatctcctggagggtgcggggcggcggccctgctgagaccacctggctgggggagggcggcggcggagatggctactaccccagcggcggggcctggccagagcccggccgggccggcggcagccaccaggagcagcccccctaccccagctacaacagcaactactggaacagcacagcccggagccgggccccctaccccagcacctaccctgtgcggcctgagctgcagggccagagcctgaacagctacaccaatggagcctacggccccacctacccacctggccctggggccaacacagccagctacagcggggcctactatgcccctggctacacccagaccagctacagcacagaggtgcccagcacctaccgcagcagcggcaacagccccacccctgtgagccgctggatctacccccagcaggactgccagacagaggccccacccctgcggggccaggtgcccggctacccacccagccagaaccctggcatgaccctgccccactacccctatggagatggcaacagatctgtgccccagagcggccccaccgtgcggccccaggaggatgcctgggccagccctggggcctacggcatgggcggccgctacccctggcccagcagcgcccccagcgcccctcctggcaacctgtacatgacagagagcaccagcccctggcccagcagcggcagcccccagagcccccccagcccccctgtgcagcagcccaaggacagcagctacccctacagccagagcgaccagagcatgaacagacacaacttcccctgcagcgtgcaccagtatgagagcagcggcaccgtgaacaatgatgacagcgacctgctggacagccaggtgcagtacagcgctgagccccagctgtatggaaatgccaccagtgaccaccccaacaaccaggaccagagcagcagcctgcctgaggagtgtgtgcccagtgatgagagcaccccacccagcatcaagaagatcatccacgtgctggagaaggtgcagtacctggagcaggaggtggaggagtttgtgggcaagaagacagacaaggcctactggctgctggaggagatgctgaccaaggagctgctggagctggacagcgtggagaccggcggccaggacagcgtgcggcaggccaggaaggaggccgtgtgcaagatccaggccatcctggagaagctggagaagaagggcctgtag

SEQ ID NO: 18652 - DNA, 3201 bp, synthetic construct
  source 1..3201: mol_type = other DNA; note = Synthetic coding sequence
atgcagagcacagacctgggcaacaaggagagcggcaagatctggcacaggaagcccagccctgccaccagagatggcatcatcgtgaacatcatccacaacaccagtgactaccaccccaaggtgctgcgcttcctgaatgtggcctttgatggcactggagactgcctgattgctggggaccaccagggcaacatctacgtgtttgacctgcacggcaaccgcttcaacctggtgcagaggacagcccaggcctgcacagccctggccttcaacctgcggaggaagtctgagttcctggtggccctggccgactacagcatcaagtgctttgacacagtgaccaaggagctggtgtcctggatgaggggccacgagagcagcgtcttcagcatctctgtgcacgccagcggcaagtatgccatcaccaccagcagtgacacagcccagctgtgggacctggacaccttccagaggaagaggaagctgaacatccggcagagcgtgggcatccagaaggtgttcttcctgcccctgagcaacaccatcctgagctgcttcaaggacaacagcatctttgcctgggagtgtgacaccctcttctgcaagtaccagctgcctgcccctcctgagagcagcagcatcctgtacaaggtgtttgctgtgaccagagatggccgcatcctggccgccggcggcaagagcaaccacctgcacctgtggtgcctggaggcccggcagctgttccgcatcatccagatgcccaccaaggtgcgggccatccgccacctggagttcctgcctgacagctttgatgctggcagcaaccaggtgctgggcgtgctgagccaggacggcatcatgaggttcatcaacatgcagacctgcaagctgctgtttgagatcggcagcctggatgagggcatcagcagcagcgccatcagcccccacggccgctacatcgccagcatcatggagaatggcagcctgaacatctacagcgtgcaggccctgacccaggagatcaacaagcccccaccacccctggtgaaggtgattgaggacctgcccaagaacaagctgagcagcagtgacctgaagatgaaggtgaccagcggccgggtgcagcagcctgccaagagccgggagagcaagatgcagacccgcatcctgaagcaggacctgaccggggactttgagagcaagaagaatgagctgcctgatggcctgaacaagaagaggctgcagatcctgctgaagggctacggggagtaccccaccaagtacaggatgttcatctggaggagcctgctgcagctgcctgagaaccacacagccttcagcaccctgattgacaagggcacccacgtggccttcctgaacctgcagaagaagtaccccatcaagagcaggaagctgctgcgggtgctgcagaggaccctgagcgccctggcccactggagcgtcatcttcagtgacaccccctacctgcccctgctggccttcccctttgtgaagctgttccagaacaaccagctgatctgctttgaggtgattgccaccctcatcatcaactggtgccagcactggtttgagtacttccccaacccccccatcaacatcctgtccatgattgaaaatgtgctggccttccatgacaaggagctgctgcagcacttcatcgaccatgacatcaccagccagctgtatgcctggcccctgctggagaccgtcttcagcgaggtgctgacccgggaggagtggctgaagctgtttgacaacatcttcagcaaccaccccagcttcctgctgatgacagtggtggcctacaacatctgcagcaggacccccctgctgagctgcaacctgaaggatgactttgagttcttcttccaccacaggaacaacctggacatcaacgtggtgatccggcaggtgtaccacctgatggagaccacccccacagacatccacccagacagcatgctgaatgtgtttgtggccctgaccaagggccagtaccctgtgttcaaccagtaccccaagttcatcgtggactaccagacccaggagcgggagcgcatcagaaatgatgagctggactacctgcgggagcggcagacagtggaggacatgcaggccaaggtggaccagcagagggtggaggatgaggcctggtaccagaagcaggagctgctgaggaaggccgaggagacccggcgggagatgctgctgcaggaggaggagaagatgatccagcagaggcagaggctggccgctgtgaagcgggagctgaaggtgaaggagatgcacctgcaggatgctgcccggcggcgcttcctgaagctgcagcaggaccagcaggagatggagctgcggcggctggatgatgaaattggaaggaaggtgtacatgagggaccgggagattgctgccacagcccgggacctggagatgaggcagctggagctggagagccagaagaggctgtatgagaagaacctgacagagaaccaggaggccctggccaaggagatgagagcagatgctgatgcctacagaaggaaggtggacctggaggagcacatgttccacaagctgattgaggccggggagacccagagccagaagacccagaaggtgatcaaggagaacctggccaaggccgagcaggcctgcctgaacacagactggcagatccagagcctgcacaagcagaagtgtgatgacctgcagaggaacaagtgctaccaggaggtggccaagctgctgcgggagaacagaaggaaggagattgagatcatcaatgccatggtggaggaggaggccaagaagtggaaggaggccgagggcaaggagttccggctgcggagcgccaagaaggccagcgccctgagtgatgccagcaggaagtggttcctgaagcaggagatcaatgctgctgtggagcacgccgagaacccctgccacaaggaggagccccgcttccagaatgagcaggacagcagctgcctgcccaggaccagccagctgaatgacagcagcgagatggaccccagcacccagatcagcctgaacagaagagctgtggagtgggacaccaccggccagaacctgatcaagaaggtgaggaacctgcggcagaggctgacagcccgggcccggcaccgctgccagaccccccacctgctggccgcctag

SEQ ID NO: 18653 - DNA, 618 bp, synthetic construct
  source 1..618: mol_type = other DNA; note = Synthetic coding sequence
atggagggcaatggacctgctgctgtgcactaccagcctgccagccccccaagagatgcctgtgtgtacagcagctgctactgtgaggagaacatctggaagctgtgtgagtacatcaagaaccacgaccagtaccccctggaggagtgctatgctgtgttcatcagcaatgaaaggaagatgatccccatctggaagcagcaggcccggcctggagatggccctgtgatctgggactaccacgtggtgctgctgcacgtgtcctctgggggccagaacttcatctatgacctggacacagtgctgcccttcccctgcctgtttgacacctacgtggaggatgccttcaagagtgatgatgacatccacccccagttccggaggaagttccgggtcatccgggctgacagctacctgaagaactttgccagtgacaggagccacatgaaggacagcagcggcaactggagggagcccccaccaccctacccctgcatcgagaccggggacagcaagatgaacctgaatgacttcatctccatggaccccaaggtgggctggggcgctgtgtacaccctgtctgagttcacccaccgcttcggcagcaagaactgctag

SEQ ID NO: 18654 - DNA, 1974 bp, synthetic construct
  source 1..1974: mol_type = other DNA; note = Synthetic coding sequence
atgagccaggtgctcttccaccagctggtgcccctgcaggtgaagtgcaaggactgtgaggagcggcgggtgtccatccgcatgagcattgagctgcagagcgtgagcaaccctgtgcacaggaaggacctggtgatccggctgacagatgacacagaccccttcttcctgtacaacctggtgatcagcgaggaggacttccagagcctgaagttccagcagggcctgctggtggacttcctggccttcccccagaagttcatcgacctgctgcagcagtgcacccaggagcacgccaaggagatcccccgcttcctgctgcagctggtgtccccagctgccatcctggacaacagccctgccttcctgaatgtggtggagaccaaccccttcaagcacctgacccacctgagcctgaagctgctgcctggaaatgatgtggagatcaagaagttcctggccggctgcctgaagtgcagcaaggaggagaagctgagcctgatgcagagcctggatgatgccaccaagcagctggacttcaccaggaagaccctggccgagaagaagcaggagctggacaagctgagaaatgagtgggccagccacacagctgccctgaccaacaagcacagccaggagctgaccaatgagaaggagaaggccctgcaggcccaggtgcagtaccagcagcagcacgagcagcagaagaaggacctggagatcctgcaccagcagaacatccaccagctgcagaaccggctgtctgagctggaggccgccaacaaggacctgacagagaggaagtacaagggggacagcaccatccgggagctgaaggccaagctgtctggagtggaggaggagctgcagaggaccaagcaggaggtgctgagcctgcggcgggagaacagcaccctggatgtggagtgccacgagaaggagaagcacgtgaaccagctgcagaccaaggtggccgtgctggagcaggagatcaaggacaaggaccagctggtgctgcggaccaaggaggcctttgacaccatccaggagcagaaggtggtgctggaggagaatggagagaagaaccaggtgcagctgggcaagctggaggccaccatcaagagcctgtctgctgagctgctgaaggccaatgagatcatcaagaagctgcagggcgacctgaagaccctgatgggcaagctgaagctgaagaacacagtgaccatccagcaggagaagctgctggccgagaaggaggagaagctgcagaaggagcagaaggagctgcaggatgtgggccagagcctgcgcatcaaggagcaggaggtgtgcaagctgcaggagcagctggaggccaccgtgaagaagctggaggagagcaagcagctgctgaagaacaatgagaagctgatcacctggctgaacaaggagctgaatgaaaaccagctggtgaggaagcaggatgtgctgggccccagcaccaccccaccagcccacagcagcagcaacaccatccgcagcggcatcagccccaacctgaatgtggtggatggccgcctgacctaccccacctgtggcatcggctaccctgtgtcctctgcctttgccttccagaacaccttcccccacagcatcagcgccaagaacaccagccaccctggcagcggcaccaaggtgcagttcaacctgcagttcaccaagcccaatgccagcctgggagatgtgcagagcggggccaccatctccatgccctgcagcacagacaaggaaaatggagaaaatgtgggcctggagagcaagtacctgaagaagcgggaggacagcatccccctgcggggcctgagccagaacctcttcagcaacagcgaccaccagagagatggcaccctgggcgccctgcacaccagcagcaagcccacagccctgcccagcgccagcagcgcctacttccctggccagctgcccaacagctag

SEQ ID NO: 18655 - DNA, 237 bp, synthetic construct
  source 1..237: mol_type = other DNA; note = Synthetic coding sequence
atgaggttcatgatgatgagagctgagaacttcttcatcctgcggaggaagcctgtggagggctatgacatctccttcctgatcaccaacttccacacagagcagatgtacaagcacaagctggtggactttgtgatccacttcatggaggagattgacaaggagatcagcgagatgaagctgtctgtgaatgcccgggccagaattgtggccgaggagttcctgaagaacttctag

SEQ ID NO: 18656 - DNA, 933 bp, synthetic construct
  source 1..933: mol_type = other DNA; note = Synthetic coding sequence
atgcccctgctggtggagggccggcgggtgcggctgccccagagcgctggggacctggtgcgggcccacccccccctggaggagcgggcccggctgctgcggggccagagcgtgcagcaggtgggcccccagggcctgctgtatgtgcagcagcgggagctggccgtgaccagccccaaggatggcagcatcagcatcctgggcagtgatgatgccaccacctgccacatcgtggtgctgcggcacactggaaatggagccacctgcctgacccactgtgatggaacagacaccaaggccgaggtgcccctcatcatgaacagcatcaagagcttcagtgaccacgcccagtgtggccgcctggaggtgcacctggtgggcggcttcagtgatgaccggcagctgagccagaagctgacccaccagctgctgtctgaatttgaccggcaggaggatgacatccacctggtgaccctgtgtgtgacagagctgaatgaccgggaggagaatgaaaaccacttccctgtgatctacggcattgctgtgaacatcaagacagctgagatctaccgggccagcttccaggaccggggccctgaggagcagctgcgggccgcccggaccctggccggcggccccatgatcagcatctatgatgctgagacagagcagctgagaattggcccctacagctggacccccttcccccacgtggacttctggctgcaccaggatgacaagcagatcctggagaacctgagcaccagccccctggccgagcccccccactttgtggagcacatccgcagcaccctgatgttcctgaagaagcaccccagccctgcccacaccctcttcagcggcaacaaggccctgctgtacaagaagaatgaagatggcctgtgggagaagatcagcagccctggcagctag

SEQ ID NO: 18657 - DNA, 924 bp, synthetic construct
  source 1..924: mol_type = other DNA; note = Synthetic coding sequence
atgacagagaccaccaagacccacgtgatcctgctggcctgtggcagcttcaaccccatcaccaagggccacatccagatgtttgagcgggcccgggactacctgcacaagacaggccgcttcatcgtcatcggcggcatcgtgtcccctgtgcatgacagctatggcaagcagggcctggtgagcagccgccacaggctcatcatgtgccagctggccgtgcagaacagcgactggatccgggtggacccctgggagtgctaccaggacacctggcagaccacctgcagcgtgctggagcaccaccgggacctgatgaagagggtgacaggctgcatcctgagcaatgtgaacacccccagcatgacccctgtgattggccagccccagaatgagaccccccagcccatctaccagaacagcaatgtggccaccaagcccacagctgccaagatcctgggcaaggtgggggagagcctgagccgcatctgctgcgtgcggccccctgtggagcgcttcacctttgtggatgaaaatgccaacctgggcaccgtgatgagatatgaggagattgagctgcgcatcctgctgctgtgtggcagtgacctgctggagagcttctgcatccctggcctgtggaatgaggccgacatggaggtgattgtgggggactttggaattgtggtggtgcccagagatgctgctgacacagaccgcatcatgaaccacagcagcatcctgaggaagtacaagaacaacatcatggtggtgaaggatgacatcaaccaccccatgtctgtggtgagcagcaccaagagccggctggccctgcagcacggagatggccacgtggtggactacctgagccagcctgtgattgactacatcctgaagagccagctgtacatcaatgccagcggctag

SEQ ID NO: 18658 - DNA, 1476 bp, synthetic construct
  source 1..1476: mol_type = other DNA; note = Synthetic coding sequence
atggaggagggcaagatggatgaaaatgagtggggctaccacggggagggcaacaagagcctggtggtggcccacgcccagagatgtgtggtgctgcgcttcctgaagttcccccccaacaggaagaagaccagcgaggagatcttccagcacctgcagaacatcgtggactttgggaagaatgtgatgaaggagttcctgggagaaaattatgtgcactacggggaggtggtgcagctgcccctggagtttgtgaagcagctgtgcctgaagatccagagcgagaggcctgagagccgctgtgacaaggacctggacaccctgagcggctacgccatgtgcctgcccaacctgacccggctgcagacctacagatttgctgagcaccggcccatcctgtgtgtggagatcaagcccaagtgtggcttcatccccttcagcagtgatgtgacccatgagatgaagcacaaggtgtgccgctactgcatgcaccagcacctgaaggtggccaccgggaagtggaagcagatcagcaagtactgccccctggacctgtacagcggcaacaagcagaggatgcactttgccctgaagagcctgctgcaggaggcccagaacaacctgaagatcttcaagaatggagagctgatctacggctgcaaggatgcccggagccctgtggccgactggagcgagctggcccaccacctgaagcccttcttcttccccagcaatggcctggccagcggcccccactgcacccgggccgtcatccgggagctggtgcacgtgatcaccagggtgctgctgagcggcagtgacaagggccgggccggcaccctgagccctggcctgggcccccagggcccccgggtgtgtgaggccagccccttcagccgcagcctgcgctgccagggcaagaacaccccagagaggagcggcctgcccaagggctgcctgctgtacaagaccctgcaggtgcagatgctggacctgctggacatcgagggcctgtaccccctgtacaacagagtggagcgctacctggaggagttccctgaggagaggaagaccctgcagattgatggcccctatgatgaggccttctaccagaagctgctggacctgagcacagaagatgatggcaccgtggcctttgccctgaccaaggtgcagcagtacagagtggccatgacagccaaggactgcagcatcatgattgccctgagcccctgcctgcaggatgccagcagtgaccagaggcctgtggtgcccagcagccgcagcagatttgccttctctgtgtctgtgctggacctggacctgaagccctatgagagcatcccccaccagtacaagctggatggcaagatcgtgaactactacagcaagacagtgcgggccaaggacaatgctgtgatgagcacccgcttcaaggagagcgaggactgcaccctggtgctgcacaaggtgtag

SEQ ID NO: 18659 - DNA, 2640 bp, synthetic construct
  source 1..2640: mol_type = other DNA; note = Synthetic coding sequence
atgatgttctaccgcctgctgagcatcgtgggccggcagagggccagccctggctggcagaactggagcagcgccaggaacagcaccagcgctgctgaggcccgctccatggccctgcccacccaggcccaggtggtgatctgtggcggcggcatcaccggcacctctgtggcctaccacctgagcaagatgggctggaaggacatcgtgctgctggagcagggccgcctggccgccggcagcacccgcttctgtgccggcatcctgagcacagcccggcacctgaccatcgagcagaagatggctgactacagcaacaagctgtactaccagctggagcaggagaccggcatccagacaggctacaccaggacaggcagcatcttcctggcccagacccaggacaggctcatcagcctgaagaggatcaatgccggcctgaatgtcatcggcatccccagcgagatcatcagccccaagaaggtggccgagctgcaccacctgctgaatgtgcatgacctggtgggcgccatgcacgtgcctgaagatgctgtggtgagcagcgcagatgtggccctggccctggccagcgctgccagccagaatggagtgcagatctatgacaggacctctgtgctgcacgtgatggtgaagaagggccaggtgactggagtggagacagacaagggccagatcgagtgccagtactttgtgaactgtgccggccagtgggcctatgagctgggcctgagcaatgaggagcctgtgtccatccccctgcacgcctgtgagcacttctacctgctgacccggcccctggagacccccctgcagagcagcacccccaccatcgtggatgctgatggccgcatctacatccggaactggcagggcggcatcctgagcggcggctttgagaagaaccccaagcccatcttcacagagggcaagaaccagctggagatccagaacctgcaggaggactgggaccactttgagcccctgctgagcagcctgctgcggaggatgcctgagctggagaccctggagatcatgaagctggtgaactgcccagagaccttcaccccagacatgcgctgcatcatgggagagagccctgctgtgcagggctactttgtgctggccggcatgaacagcgctggcctgagctttggaggaggagctgggaagtacctggccgagtggatggtgcacggctaccccagtgaaaatgtgtgggagctggacctgaagagatttggagccctgcagagcagcaggaccttcctgcggcaccgggtgatggaggtgatgcccctgatgtatgacctgaaggtgccccgctgggacttccagacaggccggcagctgcggaccagccccctgtatgaccggctggatgcccagggcgcccgctggatggagaagcacggctttgagcggcccaagtactttgtgcccccagacaaggacctgctggccctggagcagagcaagaccttctacaagccagactggtttgatattgtggagagcgaggtgaagtgctgcaaggaggccgtgtgtgtgattgacatgagcagcttcaccaagtttgagatcaccagcactggagaccaggccctggaggtgctgcagtacctgttcagcaatgacctggatgtgcctgtgggccacatcgtgcacacaggcatgctgaatgaaggaggcggctatgaaaatgactgcagcatcgcccggctgaacaagaggagcttcttcatgatcagccccacagaccagcaggtgcactgctgggcctggctgaagaagcacatgcccaaggacagcaacctgctgctggaggatgtgacctggaagtacacagccctgaacctgattggccccagggctgtggatgtgctgtctgagctgtcctatgcccccatgaccccagaccacttccccagcctcttctgcaaggagatgtctgtgggctacgccaacggcatccgggtgatgtccatgacccacactggagagcccggcttcatgctgtacatccccattgaatatgccctgcacgtgtacaatgaggtgatgtctgtgggccagaagtatggcatcagaaatgccggctactatgccctgcggagcctgagaattgagaagttctttgccttctggggccaggacatcaacaacctgaccacccccctggagtgtggccgggagagccgggtgaagctggagaagggcatggacttcatcggcagagatgccctgctgcagcagaagcagaatggagtgtacaagaggctgaccatgttcatcctggatgaccatgacagcgacctggacctgtggccctggtggggcgagcccatctacagaaatggccagtatgtgggcaagaccaccagcagcgcctacagctacagcctggagagacatgtgtgcctgggctttgtgcacaacttcagcgaggacaccggggaggagcaggtggtgacagctgacttcatcaacagaggagaatatgaaattgatattgctggctaccgcttccaggccaaggccaagctgtaccctgtggccagcctcttcacccagaagaggaggaaggatgacatggagctgagtgacctgcacggcaagtag

SEQ ID NO: 18660 - DNA, 1440 bp, synthetic construct
  source 1..1440: mol_type = other DNA; note = Synthetic coding sequence
atggccacagacagctgggccctggccgtggatgagcaggaggccgctgctgagagcctgagcaacctgcacctgaaggaggagaagatcaagccagacaccaatggagctgtggtgaagaccaatgccaatgctgagaagacagatgaggaggagaaggaggacagagctgcccagagcctgctgaacaagctgatccgcagcaacctggtggacaacaccaaccaggtggaggtgctgcagagggaccccaacagccccctgtacagcgtgaagagctttgaggagctgcggctgaagccccagctgctgcagggcgtgtatgccatgggcttcaaccggcccagcaagatccaggagaatgccctgcccctgatgctggccgagcccccccagaacctgattgcccagagccagagcggcaccgggaagacagctgcctttgtgctggccatgctgagccaggtggagcccgccaacaagtacccccagtgcctgtgcctgagccccacctatgagctggccctgcagacaggcaaggtgattgagcagatgggcaagttctacccagagctgaagctggcctatgctgtgcggggcaacaagctggagcggggccagaagatcagcgagcagatcgtgattggcaccccaggcaccgtgctggactggtgcagcaagctgaagttcatcgaccccaagaagatcaaggtgtttgtgctggatgaagcagatgtgatgattgccacccagggccaccaggaccagagcatccgcatccagaggatgctgcccaggaactgccagatgctgctcttcagcgccacctttgaggacagcgtgtggaagtttgcccagaaggtggtgcctgaccccaacgtcatcaagctgaagcgggaggaggagaccctggacaccatcaagcagtactacgtgctgtgcagcagcagagatgagaagttccaggccctgtgcaacctgtatggagccatcaccatcgcccaggccatgatcttctgccacaccaggaagacagcctcctggctggccgctgagctgagcaaggagggccaccaggtggccctgctgagcggggagatgatggtggagcagagagctgctgtgattgagcgcttccgggagggcaaggagaaggtgctggtgaccaccaacgtgtgtgcccggggcattgatgtggagcaggtgtctgtggtgatcaactttgacctgcctgtggacaaggatggcaacccagacaatgagacctacctgcacagaattggaagaacaggccgctttgggaagaggggcctggccgtgaacatggtggacagcaagcacagcatgaacatcctgaaccgcatccaggagcacttcaacaagaagattgagcggctggacacagatgacctggatgaaattgagaagatcgccaactag

SEQ ID NO: 18661 - DNA, 3255 bp, synthetic construct
  source 1..3255: mol_type = other DNA; note = Synthetic coding sequence
atggagcagcccaagggcgtggactggacagtcatcatcctgacctgccagtacaaggacagcgtgcaggtgttccagcgggagctggaggtgcggcagaagcgggagcagatcccagctggcaccctgctgctggccgtggaggaccctgagaagagggtgggcagcggcggggccaccctgaatgccctgctggtggccgctgagcacctgagcgcccgggccggcttcaccgtggtgaccagtgatgtgctgcacagcgcctggatcctgatcctgcacatgggccgggacttcccctttgatgactgtggccgggccttcacctgcctgcctgtggagaaccctgaggcccctgtggaggccctggtgtgcaacctggactgcctgctggacatcatgacctaccgcctgggccctggcagccccccaggagtgtgggtgtgcagcacagacatgctgctgtctgtgcctgccaaccctggcatctcctgggacagcttccggggggcccgggtcatcgccctgcccggcagccctgcctatgcccagaaccacggcgtgtacctgacagacccccagggcctggtgctggacatctactaccagggcacagaagctgagatccagagatgtgtgcggccagatggccgggtgcccctggtgtctggagtggtgttcttctctgtggagacagctgagcggctgctggccacccacgtgtccccacccctggatgcctgcacctacctgggcctggacagcggggcccggcctgtgcagctgagcctcttctttgacatcctgcactgcatggccgagaatgtgacccgggaggacttcctggtgggccggcccccagagctgggccagggagatgctgatgtggccggctacctgcagagcgcccgggcccagctgtggagggagctgcgggaccagcccctgaccatggcctacgtgagcagcggcagctacagctacatgaccagcagcgccagcgagttcctgctgagcctgaccctgcccggggcccctggggcccagatcgtgcacagccaggtggaggagcagcagctgctggccgccggcagctctgtggtgtcctgcctgctggagggccctgtgcagctgggccctggctctgtgctgcagcactgccacctgcagggccccatccacatcggggccggctgcctggtgacaggcctggacacagcccacagcaaggccctgcacggccgggagctgcgggacctggtgctgcagggccaccacacccggctgcacggcagccctggccacgccttcaccctggtgggccgcctggacagctgggagcggcagggcgccggcacctacctgaatgtgccctggagcgagttcttcaagaggactggagtgcgggcctgggacctgtgggaccctgagaccctgcctgctgagtactgcctgcccagcgcccggctcttccctgtgctgcaccccagccgggagctgggcccccaggacctgctgtggatgctggaccaccaggaggatggaggagaggccctgcgggcctggagggcctcctggaggctgtcctgggagcagctgcagccctgcctggaccgggccgccaccctggccagccggcgggacctcttcttccggcaggccctgcacaaggcccggcacgtgctggaggcccggcaggacctgagcctgcggcccctcatctgggccgctgtgcgggagggctgccccggccccctgctggccaccctggaccaggtggccgccggggccggggaccccggggtggccgcccgggccctggcctgtgtggctgatgtgctgggctgcatggccgagggccggggcggcctgcggagcggccctgctgccaaccctgagtggatgaggcccttctcctacctggagtgtggggacctggccgccggcgtggaggccctggcccaggagcgggacaagtggctgagcaggcctgccctgctggtgcgggccgcccggcactatgagggcgccggccagatcctgatccggcaggccgtgatgtctgcccagcactttgtgtccacagagcaggtggagctgcccggccctggccagtgggtggtggccgagtgcccagcccgggtggacttcagcggcggctggagcgacaccccacccctggcctatgagctgggcggcgctgtgctgggcctggccgtgcgggtggatggaagaagacccatcggggcccgggcccggcgcatccctgagcctgagctgtggctggccgtgggcccccggcaggatgagatgacagtgaagatcgtgtgccgctgcctggccgacctgcgggactactgccagccccacgcccctggggccctgctgaaggccgccttcatctgtgccggcatcgtgcacgtgcacagcgagctgcagctgtctgagcagctgctgcggaccttcggcggcggctttgagctgcacacctggagcgagctgccccacggcagcggcctgggcaccagcagcatcctggccggcacagccctggccgccctgcagagagctgctggccgggtggtgggcacagaggccctgattcatgctgtgctgcacctggagcaggtgctgaccaccggcggcggctggcaggaccaggtgggcggcctgatgcctggcatcaaggtgggccgcagccgggcccagctgcccctgaaggtggaggtggaggaggtgacagtgcctgagggctttgtgcagaagctgaatgaccacctgctgctggtgtacaccgggaagacccggctggccaggaacctgctgcaggatgtgctgcgctcctggtacgcccggctgcctgctgtggtgcagaatgcccacagcctggtgcggcagacagaagaatgtgccgagggcttccggcagggcagcctgcccctgctgggccagtgcctgaccagctactgggagcagaagaagctgatggcccctggctgtgagcccctgactgtgcggaggatgatggatgtgctggcccctcatgtgcacggccagagcctggccggggccggcggcggcggcttcctgtacctgctgaccaaggagccccagcagaaggaggccctggaggccgtgctggccaagacagagggcctgggcaactacagcatccacctggtggaggtggacacccagggcctgagcctgaagctgctgggcacagaggccagcacctgctgccccttcccctag

SEQ ID NO: 18662 - DNA, 2139 bp, synthetic construct
  source 1..2139: mol_type = other DNA; note = Synthetic coding sequence
atgcagcccggcagcgcccctcctcctggccgcatggaccccagcgccccccagcccagggctgagaccagcggcaaggacatctggcaccctggagagcgctgcctggcccccagcccagacaacgggaagctgtgtgaggccagcatcaagagcatcaccgtggatgaaaatggcaagagctttgctgtggtgctgtatgctgacttccaggagaggaagatccccctgaagcagctgcaggaggtgaagtttgtgaaggactgccccaggaacctgatctttgatgatgaggacctggagaagccctacttccccaacaggaagttccccagcagctctgtggccttcaagctgagtgacaacggggacagcatcccctacaccatcaaccgctacctgcgggactaccagcgggagggcacccgcttcctgtatggccactacatccatggaggcggctgcatcctgggagatgacatgggcctgggcaagacagtgcaggtgatctccttcctggccgctgtgctgcacaagaagggcacccgggaggacatcgagaacaacatgcctgagttcctgctgcgctccatgaagaaggagcccctgagcagcacagccaagaagatgttcctgattgtggcccccctgtctgtgctgtacaactggaaggatgagctggacacctggggctacttccgggtgacagtgctgcacggcaacaggaaggacaatgaactcatccgggtgaagcagaggaaatgtgaaattgccctgaccacctatgagaccctgcggctgtgcctggatgagctgaacagcctggagtggagcgctgtgattgtggatgaggcccaccgcatcaagaaccccaaggcccgggtgacagaggtgatgaaggccctgaagtgcaatgtgcgcatcggcctgaccggcaccatcctgcagaacaacatgaaggagctgtggtgtgtgatggactgggccgtgcccggcctgctgggcagcggcacctacttcaagaagcagttcagtgaccctgtggagcacggccagaggcacacagccaccaagcgggagctggccactggaaggaaggccatgcagaggctggccaagaagatgagcggctggttcctgcggaggaccaagaccctcatcaaggaccagctgcccaagaaggaggacaggatggtgtactgcagcctgacagacttccagaaggctgtgtaccagacagtgctggagacagaagatgtgaccctcatcctgcagagcagcgagccctgcacctgccgcagcggccagaagagaagaaactgctgctacaagaccaacagccacggggagaccgtgaagaccctgtacctgagctacctgactgtgctgcagaaggtggccaaccacgtggccctgctgcaggccgccagcaccagcaagcagcaggagaccctcatcaagaggatctgtgaccaggtgttcagccgcttcccagactttgtgcagaagagcaaggatgctgcctttgagaccctgagtgaccccaagtacagcggcaagatgaaggtgctgcagcagctgctgaaccactgcaggaagaacagagacaaggtgctgctcttctccttcagcaccaagctgctggatgtgctgcagcagtactgcatggccagcggcctggactacagaaggctggatggcagcaccaagtctgaggagcggctgaagatcgtgaaggagttcaacagcacccaggatgtgaacatctgcctggtgtccaccatggccggcggcctgggcctgaactttgtgggcgccaacgtggtggtgctgtttgaccccacctggaacccagccaatgacctgcaggccatcgaccgggcctacagaattggccagtgcagagatgtgaaggtgctgcggctcatcagcctgggcaccgtggaggagatcatgtacctgcggcagatctacaagcagcagctgcactgtgtggtggtgggctctgaaaatgccaagcgctactttgaggccgtgcagggcagcaaggagcaccagggcgagctgtttggcatccacaacctcttcaagttccgcagccagggcagctgcctgaccaaggacatcctggaggtgtag

SEQ ID NO: 18663 - DNA, 1212 bp, synthetic construct
  source 1..1212: mol_type = other DNA; note = Synthetic coding sequence
atgaagcagaggaagggccagggcagcggcggcagccggggcaggaagaagaggggcctgagtgacatcagccccagcaccagcctgccccccctggtggagggccagctgcgctgcttcctgaagctgactgtgaacagagtcatctggaagatcgccaagccacccacctgtgtgctggtgcgggtgcgctggtggggcgagaccagtgatggcaccctcttctgccccagagatgccctgcagacagagcccaaggctgtgaggaccaccaccaggtatgccatccgctgtggccccaagcagttcaccagctacctgacagacatggctgtgctggtgctggaggtgatcaccaagctggatggcctgcccatcggccgggtgcagatcaatggcctggcccagctgagccccacccaccagatcaatggcttcttcaccatcgtgagcagcaccagcaagaagctgggggagctgcaggtgtccctggccctggagcccctgtctgagacctatgacagctaccaccccctgcccaccacagacatgacagaaaatgtgctgctgagcaagcagggcttcagagaaaatacagagcccagcagcacccagttccaggtgcccagccggccccgggacatccacaccatcaagattgatggcaaggagctggccgccaacagcagccgcagcaccaccccccggggcaaggaccacgtgtgctttgctgaaaatccagacaccatcaaggacagcagctttggcctgcagcacagcctgaacagcggccagagcctggagagcgtgaccctgaagggccgggcccccaggaagcagatgagcctgctgaacagcagcgagttccagccccagatcagaacagtggccaagagccacagcgacagctgcatcctgagcagcaacaacctgcccaccaaggacctgctgagcgccctgctggagcagggcaacaagctgagaaatgccatggtgatcagcgccatgaagagcagccctgagacctccatgctgctggaccaggtgcaccccctgctgatgaagatcctgctggagcaccagcacaggtctgagcccttcctgggcatcggcctgaagaccaccctgaagatcaccagcagcctgcagctgcgcatccactttggagacatgacccagaagctgatccctgagctgtacagctgctactag

SEQ ID NO: 18664 - DNA, 3663 bp, synthetic construct
  source 1..3663: mol_type = other DNA; note = Synthetic coding sequence
atgggcaagaagcagaagaacaagtctgaggacagcaccaaggatgacatcgacctggatgccctggccgctgagattgagggcgctggggccgccaaggagcaggagccccagaagagcaagggcaagaagaagaaggagaagaagaagcaggactttgatgaagatgacatcctgaaggagctggaggagctgagcctggaggcccagggcatcaaggctgaccgggagaccgtggccgtgaagcccacagaaaataatgaggaggagttcaccagcaaggacaagaagaagaagggccagaagggcaagaagcagagctttgatgacaatgattctgaggagctggaggacaaggacagcaagagcaagaagacagccaagcccaaggtggagatgtacagcggcagtgatgatgatgatgacttcaacaagctgcccaagaaggccaagggcaaggcccagaagagcaacaagaagtgggatggcagcgaggaggatgaggacaacagcaagaagatcaaggagaggagccgcatcaacagcagtggagagagcggagatgaaagtgatgagttcctgcagagcaggaagggccagaagaagaaccagaagaacaagccaggccccaacatcgagagcggaaatgaagatgatgatgccagcttcaagatcaagacagtggcccagaagaaggccgagaagaaggagcgggagaggaagaagagagatgaggagaaggccaagctgaggaagctgaaggagaaggaggagctggagaccgggaagaaggaccagagcaagcagaaggagagccagaggaagtttgaggaggagaccgtgaagagcaaggtgacagtggacacaggagtcatcccagccagcgaggagaaggccgagacccccacagctgctgaagatgacaatgaaggagacaagaagaagaaggacaagaagaagaagaagggggagaaggaggagaaggagaaggagaagaagaagggccccagcaaggccaccgtgaaggccatgcaggaggccctggccaagctgaaggaggaggaggagcggcagaagcgggaggaggaggagcgcatcaagaggctggaggagctggaggccaagaggaaggaggaggagcggctggagcaggagaagcgggagaggaagaagcagaaggagaaggagaggaaggagcggctgaagaaggagggcaagctgctgaccaagagccagcgggaggcccgggcccgggcagaggccaccctgaagctgctgcaggcccagggcgtggaggtgcccagcaaggacagcctgcccaagaagaggcccatctatgaggacaagaagaggaagaagatcccccagcagctggagagcaaggaggtgtctgagagcatggagctgtgtgccgctgtggaggtgatggagcagggcgtgcctgagaaggaggagaccccacctcctgtggagcctgaggaggaggaggacacagaagatgctggcctggatgactgggaggccatggccagtgatgaggagacagagaaggtggagggcaacaaggtgcacatcgaggtgaaggaaaatcctgaggaggaggaggaggaggaggaggaggaggaggaggatgaggagagcgaggaggaggaggaggaggagggggagagcgagggctctgaaggagatgaagaagatgagaaggtgtctgatgagaaggacagcggcaagaccctggacaagaagcccagcaaggagatgagcagtgacagtgaatatgacagtgatgatgacaggaccaaggaggagcgggcctatgacaaggccaagagaagaattgagaagaggcggctggagcacagcaagaatgtgaacacagagaagctgcgggcccccatcatctgtgtgctgggccacgtggacaccgggaagaccaagatcctggacaagctgcggcacacccacgtgcaggatggagaggccggcggcatcacccagcagatcggggccaccaacgtgcccctggaggccatcaatgagcagaccaagatgatcaagaactttgacagagaaaatgtgcgcatccctggcatgctgatcatcgacaccccaggccacgagagcttcagcaacctgaggaacagaggcagcagcctgtgtgacatcgccatcctggtggtggacatcatgcacggcctggagccccagaccatcgagagcatcaacctgctgaagagcaagaagtgccccttcatcgtggccctgaacaagattgaccggctgtatgactggaagaagagcccagacagtgatgtggccgccaccctgaagaagcagaagaagaacaccaaggatgaatttgaggagcgggccaaggccatcatcgtggagtttgcccagcagggcctgaatgctgccctcttctatgagaacaaggaccccaggacctttgtgtccctggtgcccaccagcgcccacactggagatggcatgggcagcctcatctacctgctggtggagctgacccagaccatgctgagcaagaggctggcccactgtgaggagctgcgggcccaggtgatggaggtgaaggccctgcccggcatgggcaccaccattgatgtgatcctgatcaatggccgcctgaaggagggggacaccatcatcgtgcctggggtggagggccccatcgtgacccagatccggggcctgctgctgcccccacccatgaaggagctgcgggtgaagaaccagtatgagaagcacaaggaggtggaggccgcccagggcgtgaagatcctgggcaaggacctggagaagaccctggccggcctgcccctgctggtggcctacaaggaggatgagatccctgtgctgaaggatgagctgattcatgagctgaagcagaccctgaatgccatcaagctggaggagaagggcgtgtatgtgcaggccagcaccctgggcagcctggaggccctgctggagttcctgaagaccagcgaggtgccctatgccggcatcaacatcggccctgtgcacaagaaggatgtgatgaaggcctctgtgatgctggagcatgacccccagtatgctgtgatcctggcctttgatgtgagaattgaaagagatgcccaggagatggctgacagcctgggcgtgcgcatcttctctgctgagatcatctaccacctgtttgatgccttcaccaagtaccggcaggactacaagaagcagaagcaggaggagttcaagcacatcgctgtgttcccctgcaagatcaagatcctgccccagtacatcttcaacagccgggaccccatcgtgatgggcgtgacagtggaggccggccaggtgaagcagggcacccccatgtgtgtgcccagcaagaactttgtggacattggaattgtgaccagcattgagatcaaccacaagcaggtggatgtggccaagaagggccaggaggtgtgtgtgaagattgagcccatccctggagagagccccaagatgtttggccgccactttgaggccacagacatcctggtgtccaagatcagccggcagagcattgatgccctgaaggactggttcagagatgagatgcagaagagtgactggcagctgattgtggagctgaagaaggtgtttgagatcatctag

SEQ ID NO: 18665 - DNA, 138 bp, synthetic construct
  source 1..138: mol_type = other DNA; note = Synthetic coding sequence
atgtctgacaagccagacctgtctgaggtggagaagtttgacaggagcaagctgaagaagaccaacacagaggagaagaacaccctgcccagcaaggagaccatccagcaggagaaggaatgtgtgcagaccagctag

SEQ ID NO: 18666 - DNA, 1533 bp, synthetic construct
  source 1..1533: mol_type = other DNA; note = Synthetic coding sequence
atgcctgggggcggggccagcgctgccagcggccgcctgctgacagctgctgagcagaggggcagccgggaggccgccggcagcgccagccgcagcggctttggaggcagcggcggcggccggggcggggccagcggccctggcagcggcagcggcggccctgggggccctgctggccgcatgagcctgacccccaaggagctgagcagcctgctgagcatcatcagcgaggaggccggcggcggcagcacctttgagggcctgagcacagccttccaccactacttcagcaaggctgaccacttccggctgggctctgtgctggtgatgctgctgcagcagcctgacctgctgcccagcgctgcccagaggctgacagccctgtacctgctgtgggagatgtacagaacagagcccctggccgccaacccctttgctgccagctttgcccacctgctgaacccagcccccccagcccggggcggccaggagccagaccggccccccctgagcggcttcctgccccccatcaccccacctgagaagttcttcctgagccagctgatgctggccccaccccgggagctgttcaagaagaccccccggcagatcgccctgatggatgtgggcaacatgggccagagcgtggacatcagcggcctgcagctggccctggccgagcggcagagcgagctgcccacccagagcaaggccagcttccccagcatcctgagtgaccctgaccctgacagcagcaacagcggctttgacagctctgtggccagccagatcacagaggccctggtgtctggccccaagccacccatcgagagccacttccggcctgagttcatccggcccccaccacccctgcacatctgtgaagatgagctggcctggctgaaccccacagagccagaccacgccatccagtgggacaagtccatgtgtgtgaagaacagcactggagtggagatcaagaggatcatggccaaggccttcaagagccccctgagcagcccccagcagacccagctgctgggggagctggagaaggaccccaagctggtgtaccacatcggcctgaccccagccaagctgcctgacctggtggagaacaaccccctggtggccatcgagatgctgctgaagctgatgcagagcagccagatcacagagtacttctctgtgctggtgaacatggacatgagcctgcacagcatggaggtggtgaaccggctgaccacagctgtggacctgcccccagagttcatccacctgtacatcagcaactgcatcagcacctgtgagcagatcaaggacaagtacatgcagaaccggctggtgcggctggtgtgtgtgttcctgcagagcctcatccggaacaagatcatcaacgtgcaggacctcttcatcgaggtgcaggccttctgcatcgagttcagccgcatccgggaggccgccggcctcttccggctgctgaagaccctggacacaggagagacccccagcgagaccaagatgagcaagtag

SEQ ID NO: 18667 - DNA, 2184 bp, synthetic construct
  source 1..2184: mol_type = other DNA; note = Synthetic coding sequence
atgagcggcaggaagaggagcttcaccttcggggcctatggaggagtggacaagagcttcaccagcagaagatctgtgtggaggagtgatggccagaaccagcacttcccccaggccctggacctgagccgggtgaacctggtgcccagctacacccccagcctgtaccccaagaacacagacctgtttgagatgattgagaagatgcagggcagcaggatggatgagcagcgctgcagcttccccccacccctgaagacagaggaggactacatcccctaccccagcgtgcatgaggtgctgggccgggagggccccttccccctcatcctgctgccccagtttggaggctactggattgagggcaccaaccacgagatcaccagcatccctgagacagagcccctgcagagccccaccaccaaggtgaagctggagtgcaaccccacagcccgcatctacaggaagcacttcctgggcaaggagcacttcaactactacagcctggatgctgccctgggccacctggtgttcagcctgaagtatgatgtgattggagaccaggagcacctgcggctgctgctgcggaccaagtgcaggacctaccatgatgtgatccccatcagctgcctgacagagttccccaacgtggtgcagatggccaagctggtgtgtgaagatgtgaatgtggaccgcttctaccctgtgctgtaccccaaggccagccggctgattgtgacctttgatgaacatgtgatcagcaacaacttcaagtttggagtcatctaccagaagctgggccagaccagcgaggaggagctgttcagcaccaatgaggagagccctgcctttgtggagttcctggagttcctgggccagaaggtgaagctgcaggacttcaagggcttccggggcggcctggatgtgacccacggccagacaggaacagagagcgtgtactgcaacttcaggaacaaggagatcatgtttcatgtgtccaccaagctgccctacacagaaggagatgcccagcagctgcagaggaagaggcacatcggaaatgacatcgtggccgtggtgttccaggatgagaacaccccatttgtgcctgacatgattgccagcaacttcctgcacgcctacgtggtggtgcaggccgagggcggcggcccagatggccccctgtacaaggtgtctgtgacagccagagatgatgtgcccttctttggaccacccctgcctgaccctgctgtgttcagaaaaggacctgagttccaggagttcctgctgaccaagctgatcaatgcagaatatgcctgctacaaggccgagaagtttgccaagctggaggagaggaccagggctgccctgctggagaccctgtatgaggagctgcacatccacagccagagcatgatgggcctgggcggagatgaggacaagatggagaatggcagcggcggcggcggcttctttgagagcttcaagagggtcatccgcagccgcagccagagcatggatgccatgggcctgagcaacaagaagcccaacacagtgtccaccagccacagcggcagctttgcccccaacaacccagacctggccaaggccgccggcatcagcctgattgtgcctgggaagagccccaccaggaagaagagcggccccttcggcagccgccgcagcagcgccatcggcatcgagaacatccaggaggtgcaggagaagcgggagagccccccagctggccagaagaccccagattctggccacgtgtcccaggagcccaagtctgagaacagcagcacccagagcagccctgagatgcccaccaccaagaacagagctgagacagctgcccagagagctgaggccctgaaggacttcagccgcagcagcagcagcgccagcagctttgcctctgtggtggaggagacagagggcgtggatggagaggacaccggcctggagagcgtgagcagcagcggcaccccccacaagagggacagcttcatctacagcacctggctggaggacagcgtgtccaccaccagcggcggcagcagccctggccccagccgcagcccccacccagatgctgggaagctgggggaccctgcctgcccagagatcaagatccagctggaggccagcgagcagcacatgccccagctgggctgctag

SEQ ID NO: 18668 - DNA, 873 bp, synthetic construct
  source 1..873: mol_type = other DNA; note = Synthetic coding sequence
atggtgctgctgcacgtgaagagaggagatgagagccagttcctgctgcaggcccctggcagcacagagctggaggagctgactgtgcaggtggcccgggtgtacaacggccgcctgaaggtgcagaggctgtgcagcgagatggaggagctggccgagcacggcatcttcctgccccccaacatgcagggcctgacagatgaccagatcgaggagctgaagctgaaggatgagtggggcgagaagtgtgtgcccagcggcggcgctgtgttcaagaaggatgacatcggcagaagaaatggccaggccccaaatgagaagatgaagcaggtgctgaagaagaccatcgaggaggccaaggccatcatcagcaagaagcaggtggaggccggcgtgtgtgtgaccatggagatggtgaaggatgccctggaccagctgcggggagctgtgatgattgtgtaccccatgggcctgcccccctatgaccccatccgcatggagtttgagaacaaggaggacctgagcggcacccaggccggcctgaatgtcatcaaggaggccgaggcccagctgtggtgggccgccaaggagctgcggaggaccaagaagctgagtgactatgtgggcaagaatgagaagaccaagatcatcgccaagatccagcagaggggccagggcgccccagcccgggagcccatcatcagcagcgaggagcagaagcagctgatgctgtactaccaccggcggcaggaggagctgaagaggctggaggagaatgatgatgatgcctacctgaacagcccctgggccgacaacacagccctgaagaggcacttccacggcgtgaaggacatcaagtggaggcccaggtag

SEQ ID NO: 18669 - DNA, 567 bp, synthetic construct
  source 1..567: mol_type = other DNA; note = Synthetic coding sequence
atggagcccccccggggccccccagccaacggggctgagcccagcagagctgtgggcaccgtgaaggtgtacctgcccaacaagcagaggacagtggtgacagtgagagatggcatgtctgtgtatgacagcctggacaaggccctgaaggtgcggggcctgaaccaggactgctgcgtggtgtaccgcctcatcaagggcaggaagacagtgacagcctgggacacagccatcgcccccctggatggagaggagctgattgtggaggtgctggaggatgtgcccctgaccatgcacaactttgtgaggaagaccttcttcagcctggccttctgtgacttctgcctgaagttcctgttccacggcttccgctgccagacctgtggctacaagttccaccagcactgcagcagcaaggtgcccaccgtgtgtgtggacatgagcaccaaccggcagcagttctaccacagcgtgcaggacctgagcggcggcagccggcagcacgaggcccccagcaaccggcccctgaatgagctgctgaccccccagggccccagctgcaggtag

SEQ ID NO: 18670 - DNA, 2034 bp, synthetic construct
  source 1..2034: mol_type = other DNA; note = Synthetic coding sequence
atggatgatcctgactgtgacagcacctgggaggaggatgaagaagatgctgaagatgctgaagatgaggactgtgaagatggagaggccgccggggccagagatgctgatgctggagatgaagatgaggagagcgaggagccccgggccgcccggcccagcagcttccagagcaggatgacaggcagcaggaactggagggccacccgggacatgtgccgctaccgccacaactacccagacctggtggagcgggactgcaatggagacacccccaacctgtccttctacagaaatgagatccgcttcctgcccaacggctgcttcatcgaggacatcctgcagaactggacagacaactatgacctgctggaggacaaccacagctacatccagtggctgttccccctgcgggagcccggggtgaactggcacgccaagcccctgaccctgcgggaggtggaggtgttcaagagcagccaggagatccaggagcggctggtgcgggcctatgagctgatgctgggcttctacggcatccggctggaggaccggggcactggaacagtgggccgggcccagaactaccagaagcgcttccagaacctgaactggaggagccacaacaacctgcgcatcacccgcatcctgaagagcctgggggagctgggcctggagcacttccaggcccccctggtgcgcttcttcctggaggagaccctggtgagaagagagctgcccggggtgcggcagagcgccctggactacttcatgtttgctgtgcgctgccgccaccagaggcggcagctggtgcactttgcctgggagcacttccggccccgctgcaagtttgtgtggggcccccaggacaagctgcggcgcttcaagcccagcagcctgccccaccccctggagggcagcaggaaggtggaggaggagggcagccctggggaccctgaccacgaggccagcacccagggccgcacctgtggccctgagcacagcaagggcggcggccgggtggatgagggcccccagcccaggtctgtggagccccaggatgctggccccctggagaggagccagggagatgaggccggcggccatggagaagatagacctgagcccctgagccccaaggagagcaagaagaggaagctggagctgagcagaagagagcagcccccaacagagcccggcccccagagcgccagcgaggtggagaagatcgccctgaacctggagggctgtgccctgagccagggcagcctgaggacaggcacccaggaggtgggcggccaggaccccggggaggccgtgcagccctgccggcagcccctgggcgcccgggtggccgacaaggtgaggaagaggaggaaggtggatgagggcgctggggacagcgctgctgtggccagcggcggggcccagaccctggccctggccggcagccctgcccccagcggccaccccaaggccggccacagtgaaaatggagtggaggaggacacagagggccgcacaggccccaaggagggcaccccaggcagccccagcgagaccccaggccccagccctgctggccctgctggagatgagcctgctgagagccccagcgagaccccaggccccaggcctgctggccctgctggagatgagcctgctgagagccccagcgagaccccaggccccaggcctgctggccctgctggagatgagcctgctgagagccccagcgagaccccaggccccagccctgctggccccaccagagatgagcctgctgagagccccagcgagaccccaggccccaggcctgctggccctgctggagatgagcctgctgagagccccagcgagaccccaggccccaggcctgctggccctgctggagatgagcctgctgagagccccagcgagaccccaggccccagccctgctggccccaccagagatgagcccgccaaggccggggaggccgctgagctgcaggatgctgaggtggagagcagcgccaagagcggcaagccctag

SEQ ID NO: 18671 - DNA, 735 bp, synthetic construct
  source 1..735: mol_type = other DNA; note = Synthetic coding sequence
atgggcctggagctgttcctggacctggtgtcccagcccagcagagctgtgtacatctttgccaagaagaatggcatccccctggagctgaggacagtggacctggtgaagggccagcacaagagcaaggagttcctgcagatcaacagcctgggcaagctgcccaccctgaaggatggagacttcatcctgacagagagcagcgccatcctgatctacctgagctgcaagtaccagaccccagaccactggtaccccagcgacctgcaggcccgggcccgggtgcatgagtacctgggctggcatgctgactgcatccggggcaccttcggcatccccctgtgggtgcaggtgctgggccccctgattggagtgcaggtgcctgaggagaaggtggagaggaacagaacagccatggaccaggccctgcagtggctggaggacaagttcctgggggaccggcccttcctggccggccagcaggtgaccctggccgacctgatggccctggaggagctgatgcagcctgtggccctgggctatgagctgtttgagggccggccccggctggccgcctggaggggccgggtggaggccttcctgggcgctgagctgtgccaggaggcccacagcatcatcctgagcatcctggagcaggccgccaagaagaccctgcccacccccagccctgaggcctaccaggccatgctgctgcgcatcgcccgcatcccctag

SEQ ID NO: 18672 - DNA, 531 bp, synthetic construct
  source 1..531: mol_type = other DNA; note = Synthetic coding sequence
atggccgccagcacagacatggccggcctggaggagagcttcaggaagtttgccatccacggggaccccaaggccagcggccaggagatgaatggcaagaactgggccaagctgtgcaaggactgcaaggtggctgatggcaagtctgtgactggaacagatgtggacatcgtgttcagcaaggtgaagggcaagagcgcccgggtcatcaactatgaggagttcaagaaggccctggaggagctggccaccaagcgcttcaagggcaagagcaaggaggaggcctttgatgccatctgccagctggtggccggcaaggagcccgccaacgtgggcgtgaccaaggccaagacaggaggagctgtggaccggctgacagacaccagccgctacacaggcagccacaaggagagatttgatgagagcggcaagggcaagggcattgctggccggcaggacatcctggatgacagcggctacgtgtctgcctacaagaatgccggcacctatgatgccaaggtgaagaagtag

SEQ ID NO: 18673 - DNA, 930 bp, synthetic construct
  source 1..930: mol_type = other DNA; note = Synthetic coding sequence
atgtctgacctgggcagcgaggagctggaggaggagggggagaatgacattggagaatatgagggcggcagaaatgaagctggggagagacatggccggggccgggcccggctgcccaacggggacacctatgagggcagctatgaatttgggaagagacatggccagggcatctacaagttcaagaatggagcccgctacatcggggagtatgtgaggaacaagaagcacggccagggcaccttcatctacccagatggcagccgctatgaaggagagtgggccaatgacctgcggcacggccacggcgtgtactactacatcaacaatgacacctacaccggggagtggtttgcccaccagagacatggccagggcacctacctgtatgcagagaccggcagcaaatatgtgggcacctgggtgaatggccagcaggagggcacagctgagctgatccacctgaaccaccgctaccagggcaagttcctgaacaagaaccctgtgggccctgggaagtatgtgtttgatgtgggctgtgagcagcacggggagtaccgcctgacagacatggagcggggggaggaggaggaggaggaggagctggtgacagtggtgcccaagtggaaggccacccagatcacagagctggccctgtggacccccaccctgcccaagaagcccaccagcacagatggccctggccaggatgcccctggagctgagagcgctggggagcctggagaggaggcccaggccctgctggagggctttgaaggagagatggacatgaggcctggagatgaagatgctgatgtgctgcgggaggagagccgggagtatgaccaggaggagttccgctatgacatggatgagggcaacatcaacagcgaggaggaggagacccggcagagcgacctgcaggactag

SEQ ID NO: 18674 - DNA, 5943 bp, synthetic construct
  source 1..5943: mol_type = other DNA; note = Synthetic coding sequence
atgaaccccaccaaccccttcagcggccagcagcccagcgccttcagcgccagcagcagcaatgtgggcaccctgcccagcaagccacccttccgcttcggccagcccagcctgtttggccagaacagcaccctgagcggcaagagcagcggcttcagccaggtgtcctccttccctgccagcagcggcgtgagccacagcagctctgtgcagaccctgggcttcacccagaccagctctgtgggccccttcagcggcctggagcacaccagcacctttgtggccaccagcggccccagcagcagctctgtgctgggcaacacaggcttctccttcaagagccccacctctgtgggcgccttccccagcaccagcgccttcggccaggaggccggggagatcgtgaacagcggctttgggaagacagagttctccttcaagcccctggagaatgctgtgttcaagcccatcctgggcgctgagagcgagcctgagaagacccagagccagatcgccagcggcttcttcaccttcagccaccccatcagcagcgcccctgggggcctggcccccttctccttcccccaggtgaccagcagcagcgccaccaccagcaacttcaccttcagcaagcctgtgagcagcaacaacagcctgagcgccttcaccccagccctgagcaaccagaatgtggaggaggagaagaggggccccaagagcatcttcggcagcagcaacaacagcttcagcagcttccctgtgagcagcgctgtgctgggggagcccttccaggccagcaaggccggcgtgcggcagggctgtgaggaggccgtgtcccaggtggagcccctgcccagcctgatgaagggcctgaagaggaaagaagaccaggacaggagcccccggcggcacggccacgagcctgctgaggacagcgaccccctgagcagaggagaccaccccccagacaagaggcctgtgcggctgaaccggccccggggcggcaccctgtttggccgcaccatccaggatgtgttcaagagcaacaaggaggtgggccgcctgggcaacaaggaggccaagaaggagaccggctttgtggagagcgctgagagtgaccacatggccatccctgggggcaaccagagcgtgctggcccccagccgcatccctggggtgaacaaggaggaggagacagagagccgggagaagaaggaggacagcctgcggggcaccccagcccggcagagcaacagaagtgagagcacagacagcctgggcggcctgagccccagcgaggtgacagccatccagtgcaagaacatcccagactacctgaatgacaggaccatcctggagaaccactttgggaagatcgccaaggtgcagaggatcttcacccggcgcagcaagaagctggccgtggtgcacttctttgaccacgccagcgctgccctggccaggaagaagggcaagagcctgcacaaggacatggccatcttctggcacaggaagaagatcagccccaacaagaagcccttcagcctgaaggagaagaagccaggagatggagaggtgagccccagcacagaagatgcccccttccagcacagccccctgggcaaggccgccggccgcactggagccagcagcctgctgaacaagagcagccctgtgaagaagcccagcctgctgaaggcccaccagtttgaaggagacagctttgattctgccagcgagggcagcgagggcctgggcccctgtgtgctgagcctgagcaccctcatcggcaccgtggccgagaccagcaaggagaagtaccgcctgctggaccagagggaccgcatcatgaggcaggcccgggtgaagaggacagacctggacaaggcccggacctttgtgggcacctgcctggacatgtgcccagagaaggagcgctacatgagggagaccaggagccagctgtctgtgtttgaggtggtgcccggcacagaccaggtggaccacgccgctgctgtgaaggagtacagccgcagcagcgctgaccaggaggagcccctgccccatgagctgcggcccctgcctgtgctgagcaggaccatggactacctggtgacccagatcatggaccagaaggagggcagcctgcgggactggtatgactttgtgtggaacagaacccggggcatcaggaaggacatcacccagcagcacctgtgtgaccccctgactgtgtccctcatcgagaagtgcacccgcttccacatccactgtgcccacttcatgtgtgaggagcccatgagcagctttgatgccaagatcaacaatgaaaacatgaccaagtgcctgcagagcctgaaggagatgtaccaggacctgaggaacaagggcgtcttctgtgccagcgaggccgagttccagggctacaacgtgctgctgagcctgaacaagggggacatcctgcgggaggtgcagcagttccaccctgctgtgaggaacagcagcgaggtgaagtttgctgtgcaggcctttgctgccctgaacagcaacaactttgtgcgcttcttcaagctggtgcagagcgccagctacctgaatgcctgcctgctgcactgctacttcagccagatcaggaaggatgccctgcgggccctgaactttgcctacacagtgtccacccagaggagcaccatcttccccctggatggagtggtgaggatgctgctcttccgggactgtgaggaggccacagacttcctgacctgccacggcctgactgtgtctgatggctgtgtggagctgaacagaagtgccttcctggagcctgagggcctgagcaagaccaggaagtctgtgttcatcaccaggaagctgactgtgtctgtgggggagatcgtgaatggaggccccctgccccctgtgcccaggcacacccctgtgtgcagcttcaacagccagaacaagtacatcggggagagcctggccgctgagctgcctgtgtccacccagaggcctggcagtgacacagtgggcggcggccgcggggaggagtgtggggtggagccagatgcccccctgagcagcctgccccagagcctgcctgccccagcccccagccctgtgcccctgccccctgtgctggccctgacccccagcgtggcccccagcctcttccagctgtctgtgcagcctgagcccccacctcctgagcctgtgcccatgtacagtgatgaggacctggcccaggtggtggatgagctgatccaggaggccctgcagagggactgtgaggaggtgggcagcgctggggccgcctatgctgctgctgccctgggcgtgtccaatgctgccatggaggacctgctgacagctgccaccaccggcatcctgcggcacatcgctgctgaggaggtgtccaaggagcgggagcggcgggagcaggagcggcagagagctgaggaggagcggctgaagcaggagcgggagctggtgctgtctgagctgagccagggcctggccgtggagctgatggagcgggtgatgatggagtttgtgcgggagacctgcagccaggagctgaagaatgctgtggagacagaccagagggtgcgggtggcccgctgctgtgaagatgtgtgtgcccacctggtggacctcttcctggtggaggagatcttccagacagccaaggagaccctgcaggagctgcagtgcttctgcaagtacctgcagcgctggagggaggccgtgacagccaggaagaagctgcggcggcagatgagggccttccctgctgccccctgctgcgtggatgtgtctgaccggctgcgggccctggcccccagcgctgagtgccccatcgccgaggagaacctggcccggggcctgctggacctgggccacgccggccgcctgggcatcagctgcacccggctgcggcggctgaggaacaagacagcccaccagatgaaggtgcagcacttctaccagcagctgctgagtgatgtggcctgggccagcctggacctgcccagcctggtggccgagcacctgcccggccggcaggagcacgtgttctggaagctggtgctggtgctgcctgatgtggaggagcagagccctgagagctgtggccgcatcctggccaactggctgaaggtgaagttcatgggagatgagggctctgtggatgacaccagcagtgatgctgggggcatccagaccctgagcctcttcaacagcctgagcagcaagggggaccagatgatctctgtgaatgtgtgcatcaaggtggcccatggagccctgagtgatggagccattgatgctgtggagacccagaaggacctgctgggcgccagcggcctgatgctgctgctgccccccaagatgaagtctgaggacatggccgaggaggatgtgtactggctgagcgccctgctgcagctgaagcagctgctgcaggccaagcccttccagcctgccctgcccctggtggtgctggtgcccagccctggaggagatgctgtggagaaggaggtggaggatggcctgatgctgcaggacctggtgtctgccaagctgatcagtgactacacagtgacagagatcccagacaccatcaatgacctgcagggcagcaccaaggtgctgcaggccgtgcagtggctggtgagccactgcccccacagcctggacctgtgctgccagaccctcatccagtatgtggaggatggcatcggccacgagttcagcggccgcttcttccatgaccggcgggagcggcggctgggcggcctggccagccaggagcccggggccatcatcgagctgttcaacagcgtgctgcagttcctggcctctgtggtgtcctctgagcagctgtgtgacctgtcctggcctgtgacagaatttgctgaggccggcggcagccggctgctgccccacctgcactggaatgcccctgagcacctggcctggctgaagcaggccgtgctgggcttccagctgccccagatggacctgccccccctgggcgccccctggctgcctgtgtgcagcatggtggtgcagtatgccagccagatccccagcagccggcagacccagcctgtgctgcagagccaggtggagaacctgctgcacaggacctactgccgctggaagagcaagagccccagccctgtgcacggggccggccccagcgtgatggagatcccctgggatgacctgattgccctgtgcatcaaccacaagctgcgggactggaccccaccccggctgcctgtgaccagcgaggccctgtctgaagatggccagatctgtgtgtacttcttcaagaatgacctgaagaagtatgatgtgcccctgtcctgggagcaggcccggctgcagacccagaaggagctgcagctgcgggagggccgcctggccatcaagcccttccaccccagcgccaacaacttccccatccccctgctgcacatgcacaggaactggaagaggagcacagaatgtgcccaggagggccgcatccccagcacagaggacctgatgagaggagccagcgctgaggagctgctggcccagtgcctgagcagcagcctgctgctggagaaggaggagaacaagagatttgaggaccagctgcagcagtggctgtctgaagattctggggccttcacagacctgaccagcctgcccctgtacctgccccagaccctggtgtccctgagccacaccatcgagcctgtgatgaagacctctgtgaccaccagcccccagagcgacatgatgagggagcagctgcagctgtctgaggccaccggcacctgcctgggggagcggctgaagcacctggagcggctcatccgcagcagccgggaggaggaggtggccagcgagctgcacctgagcgccctgctggacatggtggacatctag

SEQ ID NO: 18675 - DNA, 3147 bp, synthetic construct
  source 1..3147: mol_type = other DNA; note = Synthetic coding sequence
atgtctgatgtgaacccccccagcgacacccccatccccttcagcagcagcagcacccacagcagccacatccccccctggaccttcagctgctacccaggcagcccctgtgaaaatggagtgatgctgtacatgagaaatgtgtcccatgaggagctgcagcgcttcaagcagctgctgctgacagagctgagcacaggcaccatgcccatcacctgggaccaggtggagacagcctcctgggccgaggtggtgcacctgctgattgagcgcttccctggaagaagagcctgggatgtgaccagcaacatctttgccatcatgaactgtgacaagatgtgtgtggtggtgcggcgggagatcaatgccatcctgcccaccctggagcctgaggacctgaatgtgggggagacccaggtgaacctggaggagggggagagcggcaagatccgccgctacaagagcaatgtgatggagaagttcttccccatctgggacatcaccacctggccaggcaaccagagggacttcttctaccagggcgtgcacagacatgaggagtacctgccctgcctgctgctgcccaagaggccccagggccggcagcccaagacagtggccatccagggcgcccctggcatcggcaagaccatcctggccaagaaggtgatgtttgagtgggccaggaacaagttctacgcccacaagcgctggtgtgccttctacttccactgccaggaggtgaaccagaccacagaccagagcttcagcgagctgattgagcagaagtggccaggcagccaggacctggtgtccaagatcatgagcaagccagaccagctgctgctgctgctggatggctttgaggagctgaccagcaccctgattgaccggctggaggacctgtctgaggactggaggcagaagctgcccggctctgtgctgctgagcagcctgctgagcaagaccatgctgcctgaggccaccctgctgatcatgatccgcttcacctcctggcagacctgcaagcccctgctgaagtgccccagcctggtgaccctgcccggcttcaacaccatggagaagatcaagtacttccagatgtacttcggccacacagaggagggggaccaggtgctgagctttgccatggagaacaccatcctcttctccatgtgccgggtgcctgtggtgtgctggatggtgtgcagcggcctgaagcagcagatggagcggggcaacaacctgacccagagctgccccaatgccacctctgtgtttgtgcgctacatcagcagcctcttccccaccagggctgagaacttcagcaggaagatccaccaggcccagctggagggcctgtgccacctggccgctgacagcatgtggcacaggaagtgggtgctgggcaaggaggacctggaggaggccaagctggaccagacaggagtgacagccttcctgggcatgagcatcctgcggagaattgctggggaggaggaccactacgtgttcaccctggtgaccttccaggagttctttgctgccctcttctacgtgctgtgcttcccccagaggctgaagaacttccacgtgctgagccacgtgaacatccagaggctcatcgccagcccccggggcagcaagagctacctgagccacatgggcctcttcctgtttggcttcctgaatgaggcctgtgccagcgctgtggagcagagcttccagtgcaaggtgtcctttggaaacaagaggaagctgctgaaggtgatccccctgctgcacaagtgtgacccccccagccctggcagcggcgtgccccagctgttctactgcctgcacgagatccgggaggaggcctttgtgtcccaggccctgaatgactaccacaaggtggtgctgcgcatcggcaacaacaaggaggtgcaggtgtctgccttctgcctgaagcgctgccagtacctgcacgaggtggagctgactgtgaccctgaacttcatgaatgtgtggaagctgagcagcagcagccaccctggcagcgaggcccctgagagcaatggcctgcaccgctggtggcaggacctgtgcagcgtgtttgccaccaatgacaagctggaggtgctgaccatgaccaacagcgtgctgggcccccccttcctgaaggccctggccgccgccctgcggcacccccagtgcaagctgcagaagctgctgctgcggcgggtgaacagcaccatgctgaaccaggacctgattggagtgctgaccggcaaccagcacctgcgctacctggagatccagcacgtggaggtggagagcaaggctgtgaagctgctgtgccgggtgctgcggagcccccgctgccgcctgcagtgcctgcggctggaggactgcctggccaccccccgcatctggacagacctgggcaacaacctgcagggcaatggccacctgaagaccctcatcctgaggaagaacagcctggagaactgtggggcctactacctgtctgtggcccagctggagcggctgagcattgagaactgcaacctgacccagctgacctgtgagagcctggccagctgcctgcggcagagcaagatgctgacccacctgagcctggccgagaatgccctgaaggatgaaggagccaagcacatctggaatgccctgccccacctgcgctgccccctgcagaggctggtgctgaggaaatgtgacctgaccttcaactgctgccaggacatgatcagcgccctgtgcaagaacaagaccctgaagagcctggacctgtccttcaacagcctgaaggatgatggagtcatcctgctgtgtgaggccctgaagaacccagactgcaccctgcagatcctggagctggagaactgcctcttcaccagcatctgctgccaggccatggcctccatgctgaggaagaaccagcacctgcggcacctggacctgagcaagaatgccatcggcgtgtatggcatcctgaccctgtgtgaggccttcagcagccagaagaagcgggaggaggtgatcttctgcatcccagcctggacccgcatcaccagcttcagccccaccccccaccccccagacttcaccgggaagagtgactgcctgagccagatcaacccctag

SEQ ID NO: 18676 - DNA, 3792 bp, synthetic construct
  source 1..3792: mol_type = other DNA; note = Synthetic coding sequence
atgcctgccagaattggctactatgaaattgacaggaccatcggcaagggcaactttgctgtggtgaagagggccacccacctggtgaccaaggccaaggtggccatcaagatcatcgacaagacccagctggatgaggagaacctgaagaagatcttccgggaggtgcagatcatgaagatgctgtgccacccccacatcatccggctgtaccaggtgatggagacagagaggatgatctacctggtgacagaatatgccagcggcggggagatctttgaccacctggtggcccacggccgcatggccgagaaggaggcccggaggaagttcaagcagatcgtgacagctgtgtacttctgccactgcaggaacatcgtgcaccgggacctgaaggccgagaacctgctgctggatgccaacctgaacatcaagattgctgactttggcttcagcaacctcttcaccccaggccagctgctgaagacctggtgtggcagccccccctatgctgcccctgagctgtttgagggcaaggagtatgatggccccaaggtggacatctggagcctgggcgtggtgctgtatgtgctggtgtgtggggccctgccctttgatggcagcaccctgcagaacctgcgggcccgggtgctgagcggcaagttccgcatccccttcttcatgagcacagaatgtgagcacctgatccgccacatgctggtgctggaccccaacaagaggctgtccatggagcagatctgcaagcacaagtggatgaagctgggagatgctgaccccaactttgaccggctgattgctgagtgccagcagctgaaggaggagcggcaggtggaccccctgaatgaagatgtgctgctggccatggaggacatgggcctggacaaggagcagaccctgcagagcctgcggagtgatgcctatgaccactacagcgccatctacagcctgctgtgtgacagacacaagaggcacaagaccctgcggctgggcgccctgcccagcatgccccgggccctggccttccaggcccctgtgaacatccaggccgagcaggccggcacagccatgaacatctctgtgccccaggtgcagctgatcaaccctgagaaccagatcgtggagccagatggcaccctgaacctggacagtgatgaaggagaggagcccagccctgaggccctggtgcgctacctgtccatgaggaggcacacagtgggcgtggccgaccccaggacagaggtgatggaggacctgcagaagctgctgcccggcttccctggggtgaacccccaggcccccttcctgcaggtggccccaaatgtgaacttcatgcacaacctgctgcccatgcagaacctgcagcccaccggccagctggagtacaaggagcagagcctgctgcagccccccaccctgcagctgctgaatggcatgggccccctgggccggcgggccagtgatggaggagccaacatccagctgcacgcccagcagctgctgaagaggccccggggccccagccccctggtgaccatgaccccagctgtgcctgctgtgacccctgtggatgaggagagcagtgatggagagccagaccaggaggccgtgcagagcagcacctacaaggacagcaacaccctgcacctgcccacagagcgcttcagccctgtgcggcgcttcagtgatggagctgccagcatccaggccttcaaggcccacctggagaagatgggcaacaacagcagcatcaagcagctgcagcaggagtgtgagcagctgcagaagatgtatggaggccagattgatgagaggaccctggagaagacccagcagcagcacatgctgtaccagcaggagcagcaccaccagatcctgcagcagcagatccaggacagcatctgccccccccagcccagcccccccctgcaggccgcctgtgagaaccagcctgccctgctgacccaccagctgcagaggctgcgcatccagcccagcagccccccacccaaccaccccaacaaccacctgttccggcagcccagcaacagccccccacccatgagcagcgccatgatccagccccacggggccgccagcagcagccagttccagggcctgcccagccgcagcgccatcttccagcagcagcctgagaactgcagcagcccccccaacgtggccctgacctgcctgggcatgcagcagcctgcccagagccagcaggtgaccatccaggtgcaggagcctgtggacatgctgagcaacatgcctggaacagctgctggcagcagcggccggggcatcagcatcagccccagcgctggccagatgcagatgcagcacaggaccaacctgatggccaccctgtcctatggccaccggcccctgagcaagcagctgtctgctgacagcgctgaggcccacagcctgaatgtgaaccgcttcagccctgccaactatgaccaggcccacctgcacccccacctgttcagtgaccagagccggggcagccccagcagctacagccccagcactggagtgggcttcagccccacccaggccctgaaggtgccccccctggaccagttccccaccttcccccccagcgcccaccagcagcccccccactacaccaccagcgccctgcagcaggccctgctgagccccaccccaccagactacaccaggcaccagcaggtgccccacatcctgcagggcctgctgagccccaggcacagcctgaccggccacagcgacatccggctgcccccaacagaatttgcccagctgatcaagaggcagcagcagcagaggcagcagcagcagcagcagcagcagcagcaggagtaccaggagctgttccgccacatgaaccagggagatgctggcagcctggcccccagcctgggcggccagagcatgacagagcggcaggccctgagctaccagaatgctgacagctaccaccaccacaccagcccccagcacctgctgcagatccgggcccaggagtgtgtgtcccaggccagcagccccaccccacctcatggctacgcccaccagcctgccctgatgcacagcgagagcatggaggaggactgcagctgtgagggcgccaaggatggcttccaggacagcaagagcagcagcaccctgaccaagggctgccacgacagccccctgctgctgagcactggaggccctggggaccctgagagcctgctgggcaccgtgtcccatgcccaggagctgggcatccacccctacggccaccagcccacagctgccttcagcaagaacaaggtgcccagccgggagcccgtcatcggcaactgcatggacaggagcagccctggccaggccgtggagctgcctgaccacaacggcctgggctacccagcccggcccagcgtgcatgagcaccaccggccccgggccctgcagaggcaccacaccatccagaacagtgatgatgcctacgtgcagctggacaacctgcccggcatgagcctggtggccggcaaggccctgagcagcgccaggatgtctgatgctgtgctgagccagagcagcctgatgggcagccagcagttccaggatggagaaaatgaggagtgtggggccagcctgggcggccacgagcacccagacctgagtgatggcagccagcacctgaacagcagctgctaccccagcacctgcatcacagacatcctgctgagctacaagcaccctgaggtgtccttctccatggagcaggccggcgtgtag

SEQ ID NO: 18677 - DNA, 4395 bp, synthetic construct
  source 1..4395: mol_type = other DNA; note = Synthetic coding sequence
atgtaccagccagaagatgacaacaacagtgatgtgaccagtgatgatgacatgaccaggaacagaagagagagcagccccccccacagcgtgcacagcttcagcggggaccgggactgggaccggcggggccgcagccgggacatggagccccgggaccgctggagccacaccaggaaccccaggagcaggatgccaccccgggacctgagcctgcctgtggtggccaagaccagctttgagatggacagagaagatgaccgggacagccgggcctatgagagccgcagccaggatgctgagagctaccagaatgtggtggacctggccgaggacaggaagccccacaacaccatccaggacaacatggagaactacaggaagctgctgagcctgggcgtgcagctggccgaggatgatggccacagccacatgacccagggccacagcagccgcagcaagaggtctgcctaccccagcaccagccggggcctgaagaccatgcctgaggccaagaagagcacccacagaagaggcatctgtgaagatgagagcagccatggagtcatcatggagaagttcatcaaggatgtgagccgcagcagcaagagcggccgggcccgggagagcagtgacaggagccagcgcttccccaggatgtctgatgacaactggaaggacatcagcctgaacaagcgggagagcgtcatccagcagagggtgtatgagggcaatgccttccggggcggcttccgcttcaacagcaccctggtgtccaggaagagggtgctggagaggaagaggcgctaccactttgacacagatggcaagggcagcatccatgaccagaagggctgccccaggaagaagccctttgaatgtggcagcgagatgaggaaggccatgtctgtgagcagcctgagcagcctgagcagccccagcttcacagagagccagcccatcgactttggagccatgccctacgtgtgtgatgaatgtggccgctccttcagcgtcatcagcgagtttgtggagcaccagatcatgcacacccgggagaacctgtatgaatatggagagagcttcatccacagcgtggccgtgtctgaggtgcagaagagccaggtgggcggcaagagatttgagtgcaaggactgtggggagaccttcaacaagtctgctgccctggccgagcacaggaagatccacgcccggggctacctggtggagtgcaagaaccaggagtgtgaggaggccttcatgcccagccccaccttcagcgagctgcagaagatctacggcaaggacaagttctatgagtgccgggtgtgcaaggagaccttcctgcacagcagcgccctgattgagcaccagaagatccactttggagatgacaaggacaatgaaagagagcacgagcgggagcgggagcgggagcggggggagaccttccggcccagccctgccctgaatgagttccagaagatgtatggcaaggagaagatgtatgagtgcaaggtgtgtggggagaccttcctgcacagcagcagcctgaaggagcaccagaagatccacacccggggcaacccctttgagaacaagggcaaggtgtgtgaggagaccttcatccctggccagagcctgaagaggcggcagaagacctacaacaaggagaagctgtgtgacttcacagatggaagagatgccttcatgcagagcagcgagctgtctgagcaccagaagatccacagcaggaagaacctgtttgagggccggggctatgagaagagcgtcatccacagcggccccttcacagagagccagaagagccacaccatcacccggcccctggagagtgatgaagatgagaaggccttcaccatcagcagcaacccctatgagaaccagaagatccccaccaaggaaaatgtgtatgaggccaagagctatgaaagaagtgtcatccacagcctggcctctgtggaggcccagaagagccacagcgtggccggccccagcaagcccaaggtgatggccgagagcaccatccagagctttgatgccatcaaccaccagagggtgcgggccggcggcaacaccagcgagggccgggagtacagccgcagcgtcatccacagcctggtggccagcaagcccccaagaagccacaatggaaatgagctggtggagagcaatgagaagggggagagcagcatctacatcagtgacctgaatgacaagaggcagaagatcccagcccgggagaacccctgtgagggcggcagcaagaacagaaattatgaggacagcgtcatccagagcgtcttccgggccaagccccagaagtctgtgcctggagagggcagcggggagttcaagaaggatggagagttctctgtgcccagcagcaatgtgcgggagtaccagaaggcccgggccaagaagaagtacatcgagcacaggagcaatgagaccagcgtcatccacagcctgccctttggagagcagaccttccggccccggggcatgctgtatgagtgccaggagtgtggggagtgctttgcccacagcagtgacctgacagagcaccagaagatccatgaccgggagaagcccagcggcagcaggaactatgagtggagcgtcatccgcagcctggcccccacagacccccagaccagctatgcccaggagcagtatgccaaggagcaggccaggaacaagtgcaaggacttccggcagttctttgccaccagcgaggacctgaacaccaaccagaagatctatgaccaggagaagagccatggagaggagagccagggcgagaacacagatggagaggagacccacagcgaggagacccacggccaggagaccattgaagatcctgtgatccagggcagtgacatggaggacccccagaaggatgatcctgatgacaagatctatgaatgtgaggactgtggcctgggctttgtggacctgacagacctgacagaccaccagaaggtgcacagcaggaagtgcctggtggacagccgggagtacacccacagcgtcatccacacccacagcatcagcgagtaccagagggactacaccggggagcagctgtatgagtgccccaagtgtggggagagcttcatccacagcagcttcctgtttgagcaccagagaattcatgagcaggaccagctgtacagcatgaagggctgtgatgatggcttcatcgccctgctgcccatgaagcccaggaggaacagagctgctgagaggaacccagccctggccggcagcgccatccgctgcctgctgtgtggccagggcttcatccacagcagcgccctgaatgagcacatgaggctgcacagagaagatgacctgctggagcagagccagatggccgaggaggccatcatccctggcctggccctgacagagttccagaggagccagacagaggagcggctgtttgaatgtgctgtgtgtggggagagctttgtgaacccagctgagctggccgaccacgtgacagtgcacaagaatgagccctatgaatatggcagcagctacacccacaccagcttcctgacagagcccctgaagggggccatccccttctatgagtgcaaggactgtgggaagagcttcatccacagcacagtgctgaccaagcacaaggagctgcacctggaggaggaggaggaggatgaagctgctgctgctgctgctgctgctgcccaggaggtggaggccaacgtgcacgtgccccaggtggtgctgcgcatccagggcctgaatgtggaggccgctgagcctgaggtggaggccgctgagcctgaggtggaggccgctgagcctgaggtggaggccgctgagcccaatggagaggccgagggcccagatggagaggccgctgagcccatcggggaggccggccagcccaacggggaggccgagcagcccaatggagatgctgatgagccagatggagctggcattgaagatcctgaggagagagctgaggagcctgagggcaaggccgaggagccagaaggagatgctgatgagccagatggagtgggcatcgaggaccctgaggagggggaggaccaggagatccaggtggaggagccctactatgactgccatgaatgtacagagaccttcaccagcagcacagccttcagcgagcacctgaagacccacgcctccatgatcatctttgagcccgccaatgcctttggagaatgttctggctacatcgagcgggccagcaccagcactggaggagccaaccaggctgatgagaagtacttcaagtgtgatgtgtgtggccagctgttcaatgaccggctgagcctggcccggcaccagaacacccacactggatag

SEQ ID NO: 18678 - DNA, 1302 bp, synthetic construct
  source 1..1302: mol_type = other DNA; note = Synthetic coding sequence
atggccgaggcccagagcggcaccggccagctgcaggagcagaagaagggcctgctgattgctgtgtctgtgtctgtggacaagatcatcagccactttggagctgccaggaacctggtgcagaaggcccagctgggggacagccggctgagcccagatgtgggccacctggtgctgaccaccctgtgcccagccctgcacgccctggtggctgatggcctgaagcccttcaggaaggacctgatcaccggccagaggaggagcagcccctggagcgtggtggaggcctctgtgaagccaggcagcagcaccaggagcctgggcaccctgtacagccaggtgtcccggctggcccccctgagcagcagccgcagccgcttccacgccttcatcctgggcctgctgaacaccaagcagctggagctgtggttcagcagcctgcaggaggatgctggcctgctgagcctgctgtacctgcccaccggcttcttcagcctggcccggggcggctgccccagcctgagcacagagctgctgctgctgctgcagcccctgtctgtgctgaccttccacctggacctgctgtttgagcaccaccaccacctgcccctgggccccccccaggccccagcccctcctggccccccaccagccctgcagcagaccatgcaggccatgctgcactttggaggccgcctggcccagagcctgcggggcaccagcaaggaggccgccagtgaccccagcgacagccccaacctgcccaccccaggctcctggtgggagcagctgacccaggccagccgggtgtatgccagcggcggcacagagggcttccccctgagccgctgggcccctggaagacatggaacagctgctgaggagggcgcccaggagcggcccctgcccacagatgagatggcccctggccggggcctgtggctgggccgcctgtttggagtgcctgggggccctgcagaaaatgaaaatggagccctgaagagccggcggcccagctcctggctgcccccaacagtgtctgtgctggccctggtgaagagaggagcccctcctgagatgcccagcccccaggagctggaggccagcgcccccaggatggtgcagacccacagagctgtgcgggccctgtgtgaccacacagctgcccggccagaccagctgtccttcagaagaggagaggtgctgcgggtcatcaccaccgtggatgaggactggctgcgctgtggcagagatggcatggagggcctggtgcctgtgggctacaccagcctggtgctgtag

SEQ ID NO: 18679 - DNA, 1584 bp, synthetic construct
  source 1..1584: mol_type = other DNA; note = Synthetic coding sequence
atggcccagaccctgcagatggagatccccaactttggaaacagcatcctggagtgcctgaatgagcagaggctgcagggcctgtactgtgatgtgtctgtggtggtgaagggccacgccttcaaggcccacagagctgtgctggccgccagcagcagctacttccgggacctcttcaacaacagccgctctgctgtggtggagctgcctgctgctgtgcagccccagagcttccagcagatcctgtccttctgctacacaggccgcctgtccatgaatgtgggggaccagttcctgctgatgtacacagctggcttcctgcagatccaggagatcatggagaagggcacagagttcttcctgaaggtgagcagccccagctgtgacagccagggcctgcatgctgaggaggcccccagcagcgagccccagagccctgtggcccagaccagcggctggccagcctgcagcacccccctgcccctggtgtcccgggtgaagacagagcagcaggagagtgacagcgtgcagtgcatgcctgtggccaagaggctgtgggacagcggccagaaggaggccggcggcggcggcaatggcagcaggaagatggccaagttcagcaccccagacctggccgccaaccggccccaccagcccccaccaccccagcaggcccctgtggtggccgccgcccagcctgctgtggccgccggggccggccagcctgctggaggagtggccgctgctggaggagtggtgtctggccccagcaccagcgagaggaccagccctggcaccagcagcgcctacaccagtgacagccctggcagctaccacaatgaggaggatgaggaggaggatggaggagaggagggcatggatgagcagtaccggcagatctgcaacatgtacaccatgtacagcatgatgaatgtgggccagacagctgagaaggtggaggccctgcctgagcaggtggcccctgagagcaggaaccgcatccgggtgcggcaggacctggccagcctgcctgctgagctgatcaaccagatcggcaaccgctgccaccccaagctgtatgatgaaggagaccccagcgagaagctggagctggtgacaggcaccaacgtgtacatcacccgggcccagctgatgaactgccacgtgtctgctggcaccaggcacaaggtgctgctgcggcggctgctggccagcttctttgacaggaacaccctggccaacagctgtggcaccggcatccgcagcagcaccaatgaccccaggaggaagcccctggacagccgggtgctgcatgctgtgaagtactactgccagaactttgcccccaacttcaaggagagcgagatgaatgccatcgctgctgacatgtgcaccaatgcccggcgggtggtgaggaagtcctggatgcccaaggtgaaggtgctgaaggcagaagatgatgcctacaccaccttcatcagcgagaccgggaagattgaaccagacatgatgggcgtggagcacggctttgaaacagccagccatgaaggagaggccggccccagcgctgaggccctgcagtag

SEQ ID NO: 18680 - DNA, 672 bp, synthetic construct
  source 1..672: mol_type = other DNA; note = Synthetic coding sequence
atggaggtgcagaaggaggcccagaggatcatgaccctgtctgtgtggaagatgtaccacagcaggatgcagaggggcggcctgcggctgcacaggagcctgcagctgagcctggtgatgaggtctgcccgggagctgtacctgagcgccaaggtggaggccctggagcctgaggtgtccctgcctgctgccctgcccagcgacccccggctgcaccccccccgggaggccgagagcacagctgagacagccaccccagatggagagcaccccttccctgagcccatggacacccaggaggcccccacagctgaggagaccagcgcctgctgtgcccccaggcctgccaaggtgtccaggaagaggaggagcagcagcctgagtgatggaggagatgctggcctggtgcccagcaagaaggcccggctggaggagaaggaggaggaggagggcgccagcagcgaggtggccgaccggctgcagcccccaccagcccaggccgagggcgccttccccaacctggcccgggtgctgcagaggcgcttcagcggcctgctgaactgcagccctgctgccccacccacagcccccccagcctgtgaggccaagccagcctgcaggcctgctgacagcatgctgaatgtgctggtgcgggctgtggtggccttctag

SEQ ID NO: 18681 - DNA, 1500 bp, synthetic construct
  source 1..1500: mol_type = other DNA; note = Synthetic coding sequence
atgagggtgctggtgcccccagctgagaggagccaggacaccagggtgggcgccccagcctggagggaggccgcccaggccatggccaggacagcccacatcctgacagacagatgtggccaggaggccgtgaccatgtggcagcccaaggacagcgtgctggaccccaacgtggcccaccacctgggccgggccgcctacatccagccctggaggttccgggtggagatgatcaagggcggcggcaccctggagaagcccccacctggagagggcgtgaccctgtggaagggcaagatgaagcccccagcctggtacgcccggctgcccctgcccctgcacaggaaggcccgggccctgcagaccacagaggtggtgcacgcccacgcccggggggcccggctgacagctgcccggctgggccgggcccagcaccagatcaatggccgggtgcggcagctgctgcggcagcgggaggtgacagaccaccggctgtctgaggtgaggaagggcctgctgatcaaccagcagagcgtgaagctgcggggctaccggcccaagtctgagaaggtgcctgacaaggctgacagcatgctgacctgggagaaggaggagctgaagtccatgaagaggaagatggagcgggacatggagaagtctgaggtgctgctgaagaccctggccagctgccgggacaccctgaacttctgcttcaaggagcggctgcaggccgtggacctgatgaaccagcccctggacaaggtgctggagcaggcccggcggcacagctgggtgaacctgagccgggcccccacccccaggacccagggccagaagaccccacctccagaccctgtgggcacctacaacccagcctgtgccctggccctgaatgaggccaagaggctgctggtggagagcaaggacaccctggtggagatggccaagaatgaggtggatgtgcgggagcagcagctgcagatcagtgacagagtgtgtgccagcctggcccagaaggccagcgagaccctggagctgaaggagcggctgaacatgaccctgggcctgatgaggggcaccatcctgcgctgcaccaagtacaaccaggagctgtacaccacccacggcctcatcaagggccccctgagcaaggtgcacctggagacagctgagaagctggaccggcccctggtgaggatgtaccagagacatgtgggcacccagctgcctgaggccgcccggctggcccagggcacagacaagctgcagtgccacatcacctacctggagaagaacctggatgagctgctggccacccacaagaacctgtcctggggcctgaactgcaagaacatcggccacgaggtggatggaaatgtggtgcggctgcggctgcggcagaggcagccccacgtgtgctatgagcaggcccagaggctggtgaaggactgggaccccaggaccccaccacccaggagcaagagcagcgctgacccctag

SEQ ID NO: 18682 - DNA, 1827 bp, synthetic construct
  source 1..1827: mol_type = other DNA; note = Synthetic coding sequence
atggagatggagagcgctgctgccagcacccgcttccaccagccccacatggagaggaagatgtctgccatggcctgtgagatcttcaatgagctgcggctggagggcaagctgtgtgatgtggtgatcaaggtgaatggatttgagttcagcgcccacaagaacatcctgtgcagctgcagcagctacttccgggccctcttcaccagcggctggaacaacacagagaagaaggtgtacaacatccctggcatcagcccagacatgatgaagctgatcatcgagtatgcctacaccaggacagtgcccatcaccccagacaacgtggagaagctgctggccgctgctgaccagttcaacatcatgggcatcgtgcggggctgctgtgagttcctgaagtctgagctgtgcctggacaactgcatcggcatctgcaagttcacagactactactactgcccagagctgcggcagaaggcctacatgttcatcctgcacaactttgaggagatggtgaaggtgtctgctgagttcctggagctgtctgtgacagagctgaaggacatcatcgagaaggatgagctgaatgtgaagcaggaggatgctgtgtttgaggccatcctgaagtggatcagccatgacccccagaacaggaagcagcacatcagcatcctgctgcccaaggtgcggctggccctgatgcacgccgagtacttcatgaacaacgtgaagatgaatgactatgtgaaggacagcgaggagtgcaagcctgtgatcatcaatgccctgaaggccatgtatgacctgaacatgaatggccccagcaacagcgacttcaccaaccccctgacccggccccggctgccctatgccatcctgtttgccatcggcggctggagcggcggcagccccaccaatgccatcgaggcctatgatgcccgggctgaccgctgggtgaatgtgacctgtgaggaggagagcccccgggcctaccacggggccgcctacctgaagggctacgtgtacatcatcggcggctttgattctgtggactacttcaacagcgtgaagagatttgatcctgtgaagaagacctggcaccaggtggcccccatgcacagccgccgctgctacgtgtctgtgacagtgctgggcaacttcatctatgccatgggcggctttgatggctacgtgcggctgaacacagctgagagatatgagcctgagaccaaccagtggaccctcatcgcccccatgcatgagcagaggagtgatgccagcgccaccaccctgtatggcaaggtgtacatctgtggcggcttcaatggaaatgaatgtctcttcaccgctgaggtgtacaacacagagagcaaccagtggacagtgattgcccccatgaggagcagaagaagtggcattggagtcatcgcctacggggagcacgtgtatgctgtgggcggctttgatggagccaaccggctgcggtctgctgaggcctacagccctgtggccaacacctggaggaccatccccaccatgttcaaccccaggagcaactttggcatcgaggtggtggatgacctgctgtttgtggtgggcggcttcaacggcttcaccaccaccttcaacgtggagtgctatgatgagaagacagatgagtggtatgatgcccatgacatgagcatctacagaagtgccctgagctgctgcgtggtgcccggcctggccaacgtggaggagtatgctgcccggcgggacaacttccctggcctggccctgagagatgaggtgaagtacagcgccagcaccagcaccctgcctgtgtag

SEQ ID NO: 18683 - DNA, 942 bp, synthetic construct
  source 1..942: mol_type = other DNA; note = Synthetic coding sequence
atggccgccctgacagacctgtccttcatgtaccgctggttcaagaactgcaacctggtgggcaacctgtctgagaagtatgtgttcatcaccggctgtgacagcggctttggaaacctgctggccaagcagctggtggaccggggcatgcaggtgctggccgcctgcttcacagaggagggcagccagaagctgcagagggacaccagctaccgcctgcagaccaccctgctggatgtgaccaagtctgagagcatcaaggctgctgcccagtgggtgcgggacaaggtgggggagcagggcctgtgggccctggtgaacaatgccggcgtgggcctgcccagcggccccaatgagtggctgaccaaggatgactttgtgaaggtgatcaacgtgaacctggtgggcctcatcgaggtgaccctgcacatgctgcccatggtgaagagggcccggggccgggtggtgaacatgagcagcagcggcggccgggtggccgtcatcggcggcggctactgtgtgtccaagtttggagtggaggccttcagtgacagcatcagaagagagctgtactactttggagtgaaggtgtgcatcatcgagcccggcaactacagaacagccatcctgggcaaggagaacctggagagcaggatgaggaagctgtgggagcggctgccccaggagacccgggacagctatggagaggactacttccgcatctacacagacaagctgaagaacatcatgcaggtggccgagccccgggtgagagatgtgatcaacagcatggagcacgccatcgtgagccgcagcccccgcatccgctacaaccctggcctggatgccaagctgctgtacatccccctggccaagctgcccacccctgtgacagacttcatcctgagccgctacctgcccaggcctgctgacagcgtgtag

SEQ ID NO: 18684 - DNA, 1461 bp, synthetic construct
  source 1..1461: mol_type = other DNA; note = Synthetic coding sequence
atgacctgtggcagctactgcggcggccgggccttcagctgcatcagcgcctgtggcccccggcccggccgctgctgcatcacagctgccccctaccggggcatcagctgctaccggggcctgaccggcggcttcggcagccacagcgtgtgtggcggcttccgggccggcagctgtggccgcagctttggctacagaagtggaggagtgtgtggccccagccccccctgcatcaccaccgtgtctgtgaatgaaagcctgctgacccccctgaacctggagattgaccccaatgcccagtgtgtgaagcaggaggagaaggagcagatcaagagcctgaacagcagatttgctgccttcatcgacaaggtgcgcttcctggagcagcagaacaagctgctggagaccaagctgcagttctaccagaaccgggagtgctgccagagcaacctggagcccctgtttgagggctacatcgagaccctgcggcgggaggctgaatgtgtggaggccgacagcggccgcctggccagcgagctgaaccacgtgcaggaggtgctggagggctacaagaagaagtatgaggaggaggtgtccctgcgggccacagcagaaaatgaatttgtggccctgaagaaggatgtggactgtgcctacctgaggaagagtgacctggaggccaacgtggaggccctgatccaggagattgacttcctgcggcggctgtatgaggaggagatccgggtgctgcagagccacatcagtgacacctctgtggtggtgaagctggacaacagccgggacctgaacatggactgcatcatcgccgagatcaaggcccagtatgatgacatcgtgaccaggagcagagctgaggccgagagctggtaccgcagcaaatgtgaggagatgaaggccaccgtcatcagacatggagagaccctgcggaggaccaaggaggagatcaatgagctgaacaggatgatccagaggctgacagctgaggtggagaatgccaagtgccagaacagcaagctggaggccgctgtggcccagagcgagcagcagggcgaggccgccctgagtgatgcccgctgcaagctggccgagctggagggcgccctgcagaaggccaagcaggacatggcctgcctgatccgggagtaccaggaggtgatgaacagcaagctgggcctggacattgaaattgccacctacagaaggctgctggagggggaggagcagaggctgtgtgagggcgtgggctctgtgaatgtgtgtgtgagcagcagcagaggaggagtggtgtgtggggacctgtgtgccagcaccacagcccctgtggtgtccaccagggtgtcctctgtgcccagcaacagcaatgtggtggtgggcaccaccaatgcctgtgcccccagcgcccgggtgggcgtgtgtggcggcagctgcaagcgctgctag

SEQ ID NO: 18685 - DNA, 939 bp, synthetic construct
  source 1..939: mol_type = other DNA; note = Synthetic coding sequence
atggccgagctgacagccctggagagcctgattgagatgggcttcccccggggccgggcagagaaggccctggccctgactggaaaccagggcatcgaggccgccatggactggctgatggagcatgaagatgatcctgatgtggatgagcccctggagacccccctgggccacatcctgggccgggagcccaccagcagcgagcagggcggcctggagggcagcggcagcgctgctggggagggcaagccagccctgtctgaggaggagcggcaggagcagaccaagaggatgctggagctggtggcccagaagcagcgggagcgggaggagcgggaggagcgggaggccctggagcgggagcggcagaggcggcggcagggccaggagctgtctgctgcccggcagaggctgcaggaggatgagatgagaagagctgctgaggagaggagaagagagaaggccgaggagctggccgcccggcagagggtgcgggagaagattgaaagagacaaggccgagcgggccaagaagtatggaggctctgtgggcagccagcccccacctgtggcccctgagcccggccctgtgcccagcagccccagccaggagccccccaccaagcgggagtatgaccagtgccgcatccaggtgcggctgcctgatggcaccagcctgacccagaccttccgggcccgggagcagctggccgctgtgcggctgtatgtggagctgcacagaggagaggagctgggcggcggccaggaccctgtgcagctgctgagcggcttcccccggcgggccttcagcgaggccgacatggagcggcccctgcaggagctgggcatggccgcccggctggagaccaggaccaggaactggggcagccgggaggcctgcctgggcaaaggaggcatgcagcgggagggcgccctgtag

SEQ ID NO: 18686 - DNA, 405 bp, synthetic construct
  source 1..405: mol_type = other DNA; note = Synthetic coding sequence
atgcctgctgacctgagcggcacctggaccctgctgagcagtgacaactttgagggctacatgctggccctgggcatcgactttgccaccaggaagatcgccaagctgctgaagccccagaaggtgattgagcagaatggagacagcttcaccatccacaccaacagcagcctgaggaactactttgtgaagttcaaggtgggggaggagtttgatgaggacaacagaggcctggacaacaggaagtgcaagagcctggtgatctgggacaatgaccggctgacctgcatccagaagggggagaagaagaacagaggctggacccactggattgaaggagacaagctgcacctggagatgttctgtgagggccaggtgtgcaagcagaccttccagagggcctag

SEQ ID NO: 18687 - DNA, 1383 bp, synthetic construct
  source 1..1383: mol_type = other DNA; note = Synthetic coding sequence
atggccggctacctgtctgagagtgactttgtgatggtggaggagggcttcagcacccgggacctgctgaaggagctgaccctgggcgccagccaggccaccacagatgaggtggccgccttctttgtggccgacctgggcgccatcgtgaggaagcacttctgcttcctgaagtgcctgccccgggtgcggcccttctatgctgtgaagtgcaacagcagccctggggtgctgaaggtgctggcccagctgggcctgggcttcagctgtgccaacaaggccgagatggagctggtgcagcacatcggcatcccagccagcaagatcatctgtgccaacccctgcaagcagatcgcccagatcaagtatgctgccaagcacggcatccagctgctgagctttgacaatgagatggagctggccaaggtggtgaagagccaccccagcgccaagatggtgctgtgcatcgccacagatgacagccacagcctgagctgcctgagcctgaagtttggagtgtccctgaagagctgccgccacctgctggagaatgccaagaagcaccacgtggaggtggtgggcgtgtccttccacatcggcagcggctgcccagacccccaggcctatgcccagagcattgctgatgcccggctggtgtttgagatgggcacagagctgggccacaagatgcacgtgctggacctgggcggcggcttccctggaacagagggcgccaaggtgcgctttgaggagatcgccagcgtcatcaacagcgccctggacctgtacttccctgagggctgcggcgtggacatctttgctgagctgggccgctactacgtgaccagcgccttcaccgtggccgtgtccatcatcgccaagaaggaggtgctgctggaccagcccggccgggaggaggagaatggcagcaccagcaagaccatcgtgtaccacctggatgagggcgtgtatggcatcttcaacagcgtgctgtttgacaacatctgccccacccccatcctgcagaagaagcccagcacagagcagcccctgtacagcagcagcctgtggggccctgctgtggatggctgtgactgtgtggccgagggcctgtggctgccccagctgcacgtgggggactggctggtgtttgacaacatgggcgcctacacagtgggcatgggcagccccttctggggcacccaggcctgccacatcacctacgccatgagccgggtggcctgggaggccctgcggcggcagctgatggctgctgagcaggaggatgatgtggagggcgtgtgcaagcccctgagctgtggctgggagatcacagacaccctgtgtgtgggccctgtgttcaccccagccagcatcatgtag

SEQ ID NO: 18688 - DNA, 1209 bp, synthetic construct
  source 1..1209: mol_type = other DNA; note = Synthetic coding sequence
gggggcccccggggcagcggcagcgctgctgagaccatgcctgagatccgggtgacccccctgggcgccggccaggatgtgggccgcagctgcatcctggtgtccattgctgggaagaatgtgatgctggactgtggcatgcacatgggcttcaatgatgaccggcgcttcccagacttctcctacatcacccagaatggccgcctgacagacttcctggactgtgtgatcatcagccacttccacctggaccactgtggggccctgccctacttcagcgagatggtgggctatgatggccccatctacatgacccaccccacccaggccatctgccccatcctgctggaggactacaggaagattgctgtggacaagaagggggaggccaacttcttcaccagccagatgatcaaggactgcatgaacctgctggagaccttctgggagaggatgaacctgaaggtgcccatctacttcagcacaggcctgacagagaaggccaaccactactacaagctgttcatcccctggaccaaccagaagatcaggaagacctttgtgcagaggaacatgtttgagttcaagcacatcaaggcctttgaccgggcctttgctgacaaccctggccccatggtggtgtttgccaccccaggcatgctgcatgctggccagagcctgcagatcttcaggaagtgggccggaaatgagaagaacatggtgatcatgcctggctactgtgtgcagggcaccgtgggccacaagatcctgagcggccagaggaagctggagatggagggccggcaggtgctggaggtgaagatgcaggtggagtacatgtccttcagcgcccacgcagatgccaagggcatcatgcagctggtgtcctctgagcaggccctgaaggagctgggcctggccgagcaccagctgcgcttcacctgccgggtgcacctgcatgacaccaggaaggagcaggagacagccctgcgggtgtacagccacctgaagtctgtgctgaaggaccactgtgtgcagcacctgcctgatggctctgtgacagtggagagcgtgctgctgcaggccgccgcccccagtgaagatcctggcaccaaggtgctgctggtgtcctggacctaccaggatgaggagctgggcagcttcctgaccagcctgctgaagaagggcctgccccaggcccccagctag

SEQ ID NO: 18689 - DNA, 1863 bp, synthetic construct
  source 1..1863: mol_type = other DNA; note = Synthetic coding sequence
atggagaaggctgtgaatgatggcagccacagcgaggagctgttctgccacctgaagaccatcagcgagaaggaggacctgccccgctgcaccagcgagagccacctgagctgcctgaagcaggacatcctgaatgagaagacagagctggaggccaccctgaaggaggccgagctggtgacccacagcgtggagctgctgctgcccctcttcaaggacaccatcgagaagatcaactttgaaaatgccaacctgagcgccctgaacctgaagatcagcgagcagaaggagatcctgatcaaggagctggacaccttcaagtctgtgaagctggccctggagcacctgctgaggaagagggactacaagcagacaggagacaacctgagctccatgctgctggagaacctgacagacaatgaaagtgagaacaccaacctgaagaagaaggtgtttgagaaggaggcccacatccaggagctgagctgcctcttccagagcgagaaggccaacaccctgaaggccaaccgcttcagccagagcgtgaaggtggtgcatgagcggctgcagatccagatccacaagcgggaggctgaaaatgacaagctgaaggagtatgtgaagagcctggagaccaagatcgccaagtggaacctgcagagcaggatgaacaagaatgaggccatcgtgatgaaggaggccagccggcagaagacagtggccctgaagaaggccagcaaggtgtacaagcagaggctggaccacttcaccggggccatcgagaagctgaccagccagatccgggaccaggaggccaagctgtctgagaccatcagcgccagcaatgcctggaagagccactatgagaagatcgtgattgagaagacagagctggaggtgcagatcgagaccatgaagaagcagatcatcaacctgctggaggacctgaagaagatggaggaccacggcaagaacagctgtgaggagatcctgaggaaggtgcacagcattgaatatgaaaatgagaccctgaacctggagaacaccaagctgaagaccaccctggccgccctgaaggatgaggtggtgtctgtggagaatgagctgtctgagctgcaggaggtggagaagaagcagaagaccctgattgagatgtacaagacccaggtgcagaagctgcaggaggccgctgagatcgtgaagagccgctgtgagaacctgctgcacaagaacaaccagatcaccaagaccaagaacaagaatgtggagaagatgaggggccagatggagagccacctgaaggagctggagcgggtgtgtgacagcctgacagctgctgagcggcggctgcacgagtgccaggagagcctgcagtgctgcaagggcaaatgtgccgaccaggagcacaccatccgggagctgcagggccagatcctgaagcagtgggaggagtacagcgtgctggcctgggtggatggcaaccacaacctgctgaccaagctgagcctggaggaggagaactgcctgatccagctgaagtgtgagaacctgcagcagaagctggagcagatggatgctgagaacaaggagctggagaagaagctggccaaccaggaggagtgcctgaagcacagcaacctgaagttcaaggagaagtctgctgagtacacagccctggcccggcagctggaggccgccctggaggagggccggcagaaggtggccgaggagattgagaagatgagcagccgggagagcgccctgcagatcaagatcctggacctggagacagagctgaggaagaagaatgaggagcagaaccagctggtgtgcaagatgaacagcgaccctgagaccccctag

SEQ ID NO: 18690 - DNA, 465 bp, synthetic construct
  source 1..465: mol_type = other DNA; note = Synthetic coding sequence
atgagcaagaacacagtgagcagcgcccgcttcaggaaggtggatgtggatgaatatgatgagaacaagtttgtggatgaggaggatggaggagatggccaggccggcccagatgaaggagaggtggacagctgcctgcggcacagcatcactggaaacatgacagctgccctgcaggccgccctgaagaacccccccatcaacaccaagagccaggccgtgaaggaccgggccggcagcatcgtgctgaaggtgctgatctccttcaaggccaatgacatcgagaaggctgtgcagagcctggacaagaatggagtggacctgctgatgaagtacatctacaagggctttgagagccccagcgacaacagcagcgccatgctgctgcagtggcatgagaaggccctggccgccggcggcgtgggcagcatcgtgcgggtgctgacagccaggaagacagtgtag

SEQ ID NO: 18691 - DNA, 2946 bp, synthetic construct
  source 1..2946: mol_type = other DNA; note = Synthetic coding sequence
atgtctgagcaggagcgcatccaggagtgcctgaggaaggagatccgcagcctgctgatcagcaccaaggatggcctgagcccccaggagctggagaaggagtacctgctgatggtgggcaaccacctgcccctgcgcatcctgggctaccgcagcaccatggagctggtgctggacatgccagatgtggtgcgggtgtgccctggggccggcggcaccgtcatcctgaaggccatcccagatgagagcaccaagggcatcgccagcctggtggccaagcagaggagcagccacaagctgagaaattccatgcacaagggccggcccagcatctacagcggccccaggagccacagaagagtgccctaccggggccgggtggcccccatcctgcctgctgtggtgaagtctgagctgaaggacctgctggccctgagccctgtgctgctgagtgactttgagaaggcctttgccaagagatttggccgctccttccagtacatgcagtatggcttcctgtccatgtttgaggtgctgaatgctgccagtgatgtgatctctgtggagcagaccagggctggcagcctgctgatgctgaagaagtctgtgacagaggagaagccccggggctgcccagctgggaagatcttcacccagcccttcaggatgaagcagggcagctacagcacaggcttccctgtggccaagccctgcttcagccagcccaccagcaacatggagccccccaagcagatcatgtccatggagaagaccagcaagctgaatgtggtggagaccagccggctgaaccacacagagaagctgaaccagctggagaacaccttcaagagcgtcatcgcccagatcggccctgggggcaccatcagcagcgagctgaagcacaagatcaagtttgtggtgtccaagtttcctgagggcctcttcatcagcaagctgctgggggagtatgaagtcatcttcaaggagcagctgagccccaagaagctgggcttcctgaatgtgacagagctggtgggcgccctgagtgacatcctgcacgtggagttcaggaagggccaccaggacctgctggtgtttgatgctgacaagaagcccctgccccctgtgcagagcgacaagaagattgaggccaaggcctgtgtgagcagccccccaagaaacagcctgagcacagctgctgtgaaggagaccgtgtggaactgccccagcaagaagcagaaggagccccagcagaagatctgcaagaagcccaacctggtggtgaagcccctgcagctgcaggtggagaccaacaagtctgagctgaacctggccatggccaaccacgacatccccccagatgctgtgcccaacaagaagctgtgccgcctgccccccctggacaccagcagcctgattggagtgtttgtggagtacatcatcagccccagccagttctacatccgcatctacagccgggacagcagcgagctgctggaggacatgatgattgagatgaggcgctgctacagcaaccagctggtgtctgacagatatgtgatgcctgagtgcttcatccagcccggccacctgtgctgcgtgcgcatcagcgaggacaagtggtggtacagagtcatcatccaccgggtgctggagaagcaggaggtggaggtgttctacccagactttggaaacatcggcatcgtgcagaagagcagcctgcgcttcctgaagtgctgctacaccaagctgcctgcccaggccatcccctgcagcctggcctgggtgcggcctgtggaggagcactggaccagcaaggccatcctgcagttccagaagctgtgtggcctgaagcccctggtgggcgtggtggatgaatatgtggatggcatcctgaacatcttcctgtgtgacaccagcagcaatgaagatgtgtacttccaccacgtgctgaggacagagggccacgccatcgtgtgccgggagaacatcagcagcaagggcttcagcgagctgaaccccctggccctgtacaccaccagcagcggcggccctgaggacatcgtgctgacagagctgggctaccccagccagcagcactacttcaatgaagacaggaagatcagcccccagagcaaggagagcgagctgcgcatcctggatgagatccccaccggcatgccctgcctggagagcgtgaccatcggagatgacatctgggatgagaactggctgcccctgcaggccaagatgggcaaaggaggagatgctgccagccacctgttcaccgccagcctgggcggcaagaaccagtacagcagctgcaaggagatgccccagaaggactggtgcttcagcacccccaaggacacctgggatgacagctggcagcccagcggcctggtgaatggcaccaaggtggaggtgcacaagccagaggtgctgggcgcccaggagaagaacacaggcaccaacagaacccagaagcagctggacatcaatggcagcagtgacagcagcaccctgcccaagctggaggagttctgcaccagcctgacccagagcgagcagagcgcagatggcagccagagcgagcccaacaacagccagacccagcccaagcagatccagctgagcacagctgccccctgcagcaccacagctgtggatgacagcgctgagaagcccagcggctctgtggagagcagccctgagatcctgaagaatgaagacttcagcagcagccgggccatcaccctgtacaaggacaagaggcaggagagcgtggaccagctgagcctcatcctgtcctatgagtgccagatcagccagaagctgtacatccccaggagcacagccacagctgccctgggcgccgccgcccggctggccaccagccgcagcctgctgcactggtaccccagcgtgaagaggatggaggcctag

SEQ ID NO: 18692 - DNA, 909 bp, synthetic construct
  source 1..909: mol_type = other DNA; note = Synthetic coding sequence
atggagatccaggagctggaggagatccaggcctgccagggcctgtgggaggtgtttgtgaccctgtctgagcgggcccgggactacctgcacaagacaggccgcttcatcgtgattggaggcatcgtgtcccctgtgcatgacagctatggcaagcagggcctggtgagcagccgccacaggctcatcatgtgccagctggccgtgcagaacagcgactggatccgggtggacccctgggagtgctaccaggacacctggcagaccacctgcagcgtgctggagcaccaccgggacctgatgaagagggtgacaggctgcatcctgagcaatgtgaacacccccagcatgacccctgtgattggccagccccagaatgagaccccccagcccatctaccagaacagcaatgtggccaccaagcccacagctgccaagatcctgggcaaggtgggggagagcctgagccgcatctgctgcgtgcggccccctgtggagcgcttcacctttgtggatgaaaatgccaacctgggcaccgtgatgagatatgaggagattgagctgcgcatcctgctgctgtgtggcagtgacctgctggagagcttctgcatccctggcctgtggaatgaagctgacatggaggtgattgtgggggactttggcatcgtggtggtgcccagagatgctgctgacacagaccgcatcatgaaccacagcagcatcctgaggaagtacaagaacaacatcatggtggtgaaggatgacatcaaccaccccatgtctgtggtgagcagcaccaagagccggctggccctgcagcacggagatggccacgtggtggactacctgagccagcccgtcatcgactacatcctgaagagccagctgtacatcaatgccagcggctag

SEQ ID NO: 18693 - DNA, 861 bp, synthetic construct
  source 1..861: mol_type = other DNA; note = Synthetic coding sequence
atggagcggcggctgggcgtgcgggcctgggtgaaggaaaatagaggcagcttccagccccctgtgtgcaacaagctgatgcaccaggagcagctgaaggtgatgtttattggaggccccaacaccaggaaggactaccacatcgaggagggggaggaggtgttctaccagctggagggggacatggtgctgcgggtgctggagcagggcaagcacagagatgtggtgatccggcagggcgagatcttcctgctgcctgcccgggtgccccacagcccccagagatttgccaacacagtgggcctggtggtggagcggcggcggctggagacagagctggatggcctgcgctactacgtgggggacaccatggatgtgctgtttgagaagtggttctactgcaaggacctgggcacccagctggcccccatcatccaggagttcttcagcagcgagcagtacagaacaggcaagcccatcccagaccagctgctgaaggagccccccttccccctgagcaccaggagcatcatggagcccatgagcctggatgcctggctggacagccaccaccgggagctgcaggccggcacccccctgagcctgtttggagacacctatgagacccaggtgattgcctacggccagggcagcagcgagggcctgcggcagaatgtggatgtgtggctgtggcagctggagggcagctctgtggtgaccatgggcggccggcggctgagcctggccccagatgacagcctgctggtgctggccggcaccagctatgcctgggagaggacccagggctctgtggccctgtctgtgacccaggaccctgcctgcaagaagcccctgggctag

SEQ ID NO: 18694 - DNA, 1545 bp, synthetic construct
  source 1..1545: mol_type = other DNA; note = Synthetic coding sequence
atgcaggagagcggctgccgcctggagcaccccagcgccaccaagttcagaaatcatgtgatggagggggactgggacaaggcagaaaatgacctgaatgagctgaagcccctggtgcacagcccccacgccatcgtggtgcggggggccctggagatcagccagaccctgctgggcatcatcgtgaggatgaagttcctgctgctgcagcagaagtacctggagtacctggaggatggcaaggtgctggaggccctgcaggtgctgcgctgtgagctgacccccctgaagtacaacacagagcgcatccacgtgctgagcggctacctgatgtgcagccatgctgaggacctgcgggccaaggccgagtgggagggcaaaggaacagccagccgcagcaagctgctggacaagctgcagacctacctgccccccagcgtgatgctgcccccccggcggctgcagaccctgctgcggcaggccgtggagctgcagagggaccgctgcctgtaccacaacaccaagctggacaacaacctggacagcgtgtccctgctgattgaccacgtgtgcagccggcggcagttcccctgctacacccagcagatcctgacagagcactgcaatgaggtgtggttctgcaagttcagcaatgatggcaccaagctggccaccggcagcaaggacaccaccgtcatcatctggcaggtggaccctgacacccacctgctgaagctgctgaagaccctggagggccacgcctatggagtgtcctacatcgcctggagcccagatgacaactacctggtggcctgtggcccagatgactgcagcgagctgtggctgtggaatgtgcagacaggagagctgcggaccaagatgagccagagccatgaggacagcctgacctctgtggcctggaacccagatggcaagagatttgtgactggaggccagaggggccagttctaccagtgtgacctggatggcaacctgctggacagctgggagggcgtgcgggtgcagtgcctgtggtgcctgagtgatggcaagacagtgctggccagtgacacccaccagaggatccggggctacaactttgaggacctgacagacagaaatattgtgcaggaggaccaccccatcatgtccttcaccatcagcaagaatggccgcctggccctgctgaatgtggccacccagggcgtgcacctgtgggacctgcaggacagagtgctggtgaggaagtaccagggcgtgacccagggcttctacaccatccacagctgctttggaggccacaatgaagacttcatcgccagcggcagcgaggaccacaaggtgtacatctggcacaagaggtctgagctgcccatcgccgagctgaccggccacaccaggacagtgaactgtgtgtcctggaacccccagatccccagcatgatggccagcgccagtgatgatggcaccgtgcgcatctggggccctgcccccttcatcgaccaccagaacatcgaggaggagtgcagctccatggacagctag

SEQ ID NO: 18695 - DNA, 540 bp, synthetic construct
  source 1..540: mol_type = other DNA; note = Synthetic coding sequence
atgggcatcctcttcacccgcatctggaggctcttcaaccaccaggagcacaaggtgatcatcgtgggcctggacaatgccggcaagaccaccatcctgtaccagttctccatgaatgaggtggtgcacaccagccccaccatcggcagcaatgtggaggagatcgtcatcaacaacacccgcttcctgatgtgggacattggaggccaggagagcctgcggagctcctggaacacctactacaccaacacagaatttgtgattgtggtggtggacagcacagaccgggagcgcatctctgtgacccgggaggagctgtacaagatgctggcccacgaggacctgaggaaggccggcctgctgatctttgccaacaagcaggatgtgaaggagtgcatgacagtggccgagatcagccagttcctgaagctgaccagcatcaaggaccaccagtggcacatccaggcctgctgtgccctgactggagagggcctgtgccagggcctggagtggatgatgagccggctgaagatcagatag

SEQ ID NO: 18696 - DNA, 1428 bp, synthetic construct
  source 1..1428: mol_type = other DNA; note = Synthetic coding sequence
atgcagaagagcaccaacagcgacacctctgtggagaccctgaacagcacccggcagggcactggagctgtgcagatgaggatcaagaatgccaacagccaccacgaccggctgagccagagcaagtccatgatcctgacagatgtgggcaaggtgacagagcccatcagccgccacagaagaaaccacagccagcacatcctgaaggatgtgattcctcccctggagcagctgatggtggagaaggagggctacctgcagaaggccaagattgctgatggcggcaagaagctgaggaagaactggagcacctcctggatcgtgctgagcagccgccgcatcgagttctacaaggagagcaagcagcaggccctgagcaacatgaagacaggccacaagccagagagcgtggacctgtgtggggcccacatcgagtgggccaaggagaagagcagcaggaagaatgtgttccagatcaccaccgtgtctggaaatgagttcctgctgcagagcgacatcgacttcatcatcctggactggttccacgccatcaagaatgccatcgaccggctgcccaaggacagcagctgccccagcaggaacctggagctgttcaagatccagaggagcagcagcacagagctgctgagccactatgacagcgacatcaaggagcagaagccagagcacaggaagagcctgatgttccggctgcaccacagcgccagtgacaccagtgacaagaacagagtgaagagccggctgaagaagttcatcacccggcggcccagcctgaagaccctgcaggagaagggcctcatcaaggaccagatcttcggcagccacctgcacaaggtgtgtgagcgggagaacagcacagtgccctggtttgtgaagcagtgcatcgaggccgtggagaagaggggcctggatgtggatggcatctacagagtgtctggcaacctggccaccatccagaagctgcgcttcatcgtgaaccaggaggagaagctgaacctggatgacagccagtgggaggacatccacgtggtgactggagccctgaagatgttcttccgggagctgcctgagcccctcttcccctacagcttctttgagcagtttgtggaggccatcaagaagcaggacaacaacacccgcatcgaggccgtgaagagcctggtgcagaagctgcccccacccaacagagacaccatgaaggtgctgtttggccacctgaccaagatcgtggccaaggccagcaagaacctgatgagcacccagagcctgggcatcgtgtttggccccaccctgctgcgggcagaaaatgaaacaggcaacatggccatccacatggtgtaccagaaccagattgctgagctgatgctgtctgagtacagcaagatcttcggcagcgaggaggactag

SEQ ID NO: 18697 - DNA, 1308 bp, synthetic construct
  source 1..1308: mol_type = other DNA; note = Synthetic coding sequence
atggcccagacagtgcccccctgtgagctgccctgcaaggagtatgatgtggccagaaatactggagcctacaccagcagcggcctggccacagccagcttccgcaccagcaagtacctgctggaggagtggttccagaactgctacgcccgctaccaccaggcctttgctgaccgggaccagagcgagcggcagagacatgagagccagcagctggccacagagacccaggccctggcccagaggacccagcaggacagcaccaggacagtgggggagcggctgcaggacacccacagctggaagtctgagctgcagcgggagatggaggccctggccgctgagaccaacctgctgctggcccagaagcagaggctggagcgggccctggatgccacagaggtgcccttcagcatcaccacagacaacctgcagtgccgggagcggcgggagcaccccaacctggtgcgggaccacgtggagacagagctgctgaaggaggccgagctgatccggaacatccaggagctgctgaagaggaccatcatgcaggccgtgtcccagatccggctgaaccgggagcacaaggagacctgtgagatggactggagcgacaagatggaggcctacaacattgatgagacctgtggccgccaccacagccagagcacagaggtgcaggcccacccctacagcaccaccttccaggagagcgccagcaccccagagacccgggccaagttcacccaggacaacctgtgccgggcccagcgggagcggctggccagcgccaacctgcgggtgctggtggactgcatcctgcgggacaccagcgaggacctgcggctgcagtgtgatgctgtgaacctggccttcggccgccgctgtgaggagctggaggatgcccgctacaagctgcaccaccacctgcacaagaccctgcgggagatcacagaccaggagcacaacgtggccgccctgaagcaggccatcaaggacaaggaggcccccctgcacgtggcccagacccggctgtacctgcggagccaccggcccaacatggagctgtgcagagatgctgcccagttccggctgctgtctgaggtggaggagctgaacatgagcctgacagccctgcgggagaagctgctggaggccgagcagagcctgaggaacctggaggacatccacatgagcctggagaaggacattgctgccatgaccaacagcctcttcatcgaccggcagaagtgcatggcccacaggacccgctaccccaccatcctgcagctggccggctaccagtag

SEQ ID NO: 18698 - DNA, 828 bp, synthetic construct
  source 1..828: mol_type = other DNA; note = Synthetic coding sequence
atgaggaagaggctgagcgcccctgagctgcggctgagcctgaccaagggccctggaaatgatggagccagccccacccagagcgcccccagcagcccagatggcagcagtgacctggagattgatgagctggagacccccagcgacagcgagcagctggacagcggccatgaatttgagtgggaggatgagctgcccagggctgagggcctgggcaccagcgagacagctgagcggctgggccggggctgcatgtgggatgtgactggagaagatggccaccactggagggtcttcaggatgggcccccgggagcagagggtggacatgacagtgattgagccctacaagaaggtgctgagccacggcggctaccatggagatggcctgaatgctgtgatcctgtttgccagctgctacctgcccaggagcagcatccccaactacacctacgtgatggagcacctgttccgctacatggtgggcaccctggagctgctggtggccgagaactacctgctggtgcacctgagcggcggcaccagccgggcccaggtgccccccctgtcctggatccggcagtgctaccgcaccctggaccggcggctgaggaagaacctgcgggccctggtggtggtgcacgccacctggtacgtgaaggccttcctggccctgctgcggcccttcatcagcagcaagttcaccaggaagatccgcttcctggacagcctgggggagctggcccagctgatcagcctggaccaggtgcacatccctgaggccgtgcggcagctggaccgggacctgcacggcagcggcggcacctag

SEQ ID NO: 18699 - DNA, 2391 bp, synthetic construct
  source 1..2391: mol_type = other DNA; note = Synthetic coding sequence
atggaggaggaggccagccgctctgctgctgccaccaaccctggcagccggctgacccgctggcccccaccagacaagcgggagggcagcgctgtggaccccgggaagagaagaagcctggccgccacccccagcagcagcctgccctgcaccctgattgccctgggcctgcggcatgagaaggaggccaatgagctgatggaggacctgtttgagaccttccaggatgagatgggcttcagcaacatggaggatgatggccctgaggaggaggagcgggtggccgagccccaggccaacttcaacaccccccaggccctgcgctttgaggagctgctggccaacctgctgaatgagcagcaccagatcgccaaggagctgtttgagcagctgaagatgaagaagcccagcgccaagcagcagaaggaggtggagaaggtgaagccccagtgcaaggaggtgcaccagaccctcatcctggaccctgcccagaggaagaggctgcagcagcagatgcagcagcacgtgcagctgctgacccagatccacctgctggccacctgcaaccccaacctgaaccctgaggccagcagcacccgcatctgcctgaaggagctgggcacctttgcccagagcagcatcgccctgcaccaccagtacaaccccaagttccagaccctcttccagccctgcaacctgatgggcgccatgcagctgattgaggacttcagcacccacgtgtccattgactgcagcccccacaagacagtgaagaagacagccaatgagttcccctgcctgcccaagcaggtggcctggatcctggccaccagcaaggtgttcatgtacccagagctgctgcctgtgtgcagcctgaaggccaagaacccccaggacaagatcctcttcaccaaggccgaggacaacaagtacctgctgacctgcaagacagcccggcagctgactgtgcgcatcaagaacctgaacatgaacagagccccagacaacatcatcaagttctacaagaagaccaagcagctgcctgtgctgggcaagtgctgtgaggagatccagccccaccagtggaagccacccatcgagcgggaggagcaccggctgcccttctggctgaaggccagcctgcccagcatccaggaggagctgcggcacatggctgatggagcccgggaggtgggcaacatgacaggcaccacagagatcaacagcgaccagggcctggagaaggacaacagcgagctgggcagcgagacccgctaccccctgctgctgcccaagggcgtggtgctgaagctgaagcctgtggccgaccgcttccccaagaaggcctggaggcagaagaggagctctgtgctgaagcccctgctgatccagcccagccccagcctgcagcccagcttcaaccctgggaagaccccagcccagagcacccacagcgaggccccacccagcaagatggtgctgcgcatcccccaccccatccagcctgccaccgtgctgcagacagtgcctggggtgccccccctgggcgtgtctggaggagagagctttgagagccctgctgccctgcctgccatgcctcctgaggcccggaccagcttccccctgtctgagagccagaccctgctgagcagcgcccctgtgcccaaggtgatgatgcccagccctgccagctccatgttcaggaagccctacgtgagaagaagacccagcaagagaagaggagcccgggccttccgctgcatcaagccagcccctgtgatccacccagccagcgtcatcttcaccgtgcctgccaccaccgtgaagatcgtgtccctgggcggcggctgcaacatgatccagcctgtgaatgctgctgtggcccagagcccccagaccatccccatcgccaccctgctggtgaaccccaccagcttcccctgccccctgaaccagcccctggtggccagctctgtgagccccctgattgtgtctggcaacagcgtgaacctgcccatccccagcaccccagaggacaaggcccacatgaatgtggacatcgcctgtgctgtggctgatggagaaaatgccttccagggcctggagcccaagctggagccccaggagctgagccccctgagcgccaccgtcttccccaaggtggagcacagccctggccccccacctgtggacaagcagtgccaggagggcctgtctgagaacagcgcctaccgctggacagtggtgaagacagaggagggccggcaggccctggagcccctgccccagggcatccaggagagcctgaacaacagcagccctggggacctggaggaggtggtgaagatggagccagaagatgccacagaggagatcagcggcttcctgtag

SEQ ID NO: 18700 - DNA, 1380 bp, synthetic construct
  source 1..1380: mol_type = other DNA; note = Synthetic coding sequence
atggccgccagcgccagcgctgctgctggggaggaggactgggtgctgcccagcgaggtggaggtgctggagagcatctacctggatgagctgcaggtgatcaagggaaatggaagaaccagcccctgggagatctacatcaccctgcacccagccacagctgaggaccaggacagccagtatgtgtgcttcaccctggtgctgcaggtgcctgctgagtacccccatgaggtgccccagatcagcatccggaacccccggggcctgagtgatgagcagatccacaccatcctgcaggtgctgggccacgtggccaaggccggcctgggcacagccatgctgtatgagctgattgagaagggcaaggagatcctgacagacaacaacatcccccacggccagtgtgtgatctgcctgtatggcttccaggagaaggaggccttcaccaagaccccctgctaccactacttccactgccactgcctggcccgctacatccagcacatggagcaggagctgaaggcccagggccaggagcaggagcaggagcggcagcacgccaccaccaagcagaaggctgtgggcgtgcagtgccctgtgtgccgggagcccctggtgtatgacctggccagcctgaaggccgcccctgagccccagcagcccatggagctgtaccagcccagcgctgagagcctgcggcagcaggaggagaggaagaggctgtaccagaggcagcaggagcggggcggcatcatcgacctggaggccgagaggaaccgctacttcatcagcctgcagcagcccccagccccagctgagcctgagagcgctgtggatgtgtccaagggcagccagccccccagcaccctggccgctgagctgagcaccagccctgctgtgcagagcaccctgcccccacccctgcctgtggccacccagcacatctgtgagaagatccctggcaccaggagcaaccagcagaggctgggggagacccagaaggccatgctggacccccccaagcccagccggggcccctggaggcagcctgagcggcggcaccccaagggaggagaatgtcatgcccccaagggcacccgggacacccaggagctgcccccacctgagggccccctgaaggagcccatggacctgaagccagagccccacagccagggcgtggagggccccccccaggagaagggccctggctcctggcagggccccccacccaggaggacccgggactgtgtgcgctgggagaggagcaagggccgcaccccaggcagcagctacccccggctgccccggggccagggcgcctaccggcccggcacccggcgggagagcctgggcctggagagcaaggatggcagctag

SEQ ID NO: 18701 - DNA, 2079 bp, synthetic construct
  source 1..2079: mol_type = other DNA; note = Synthetic coding sequence
atgggcagcgctgctgatgtgcgcttcagcctgggcaccaccacccacgcccctcctggggtgcaccggcgctacagcgccctgcgggaggagagcgccaaggactgggagaccagccccctgcccggcatgctggccccagctgctggccctgcctttgacagcgaccctgagatcagtgatgtggatgaagatgagcccggcggcctggtgggcagcgcagatgtggtgagccccagcggccacagtgatgcccagaccctggccatgatgctgcaggagcagctggatgccatcaatgaggagatccgcatgatccaggaggagaaggagagcacagagctgcgggcagaggagattgagaccagggtgaccagcggctccatggaggccctgaacctgaagcagctgaggaagaggggcagcatccccaccagcctgacagccctgagcctggccagcgccagcccccccctgagcggccgcagcacccccaagctgaccagccgctctgctgcccaggacctggacaggatgggcgtgatgaccctgcccagcgacctgaggaagcacaggaggaagctgctgagccctgtgtcccgggaggagaaccgggaggacaaggccaccatcaagtgtgagaccagcccccccagcagccccaggaccctgcggctggagaagctgggccacccagccctgagccaggaggagggcaagagcgccctggaggaccagggcagcaaccccagcagcagcaacagcagccaggacagcctgcacaagggggccaagaggaagggcatcaagagcagcatcggccgcctgtttgggaagaaggagaagggccgcctcatccagctgagcagagatggagccaccggccacgtgctgctgacagacagcgagttctccatgcaggagcccatggtgcctgccaagctgggcacccaggccgagaaggaccggcggctgaagaagaagcaccagctgctggaggatgcccggaggaagggcatgccctttgcccagtgggatggccccaccgtggtgtcctggctggagctgtgggtgggcatgcctgcctggtacgtggccgcctgccgggccaacgtgaagagcggggccatcatgtctgccctgagtgacacagagatccagcgggagatcggcatcagcaatgccctgcaccggctgaagctgcggctggccatccaggagatggtgtccctgaccagccccagcgccccacccaccagcaggaccagcagtggaaatgtgtgggtgacccatgaggagatggagaccctggagaccagcaccaagaccaccctggcctatggagacatgaaccacgagtggattggaaatgagtggctgcccagcctgggcctgccccagtaccgcagctacttcatggagtgcctggtggatgccaggatgctggaccacctgaccaagaaggacctgcgggtgcacctgaagatggtggacagcttccacaggaccagcctgcagtatggcatcatgtgcctgaagaggctgaactatgacaggaaggagctggagaagagaagagaggagagccagcacgagatcaaggatgtgctggtgtggaccaatgaccaggtggtgcactgggtgcagagcatcggcctgcgggactatgccggcaacctgcatgaaagtggagtgcacggggccctgctggccctggatgagaactttgaccacaacaccctggccctgatcctgcagatccccacccagaacacccaggcccggcaggtgatggagcgggagttcaacaacctgctggccctgggcacagacaggaagctggatgatggagatgacaaggtgttcagaagagcccccagctggaggaagcgcttccggccccgggagcaccacggccggggcggcatgctgagcgccagcgctgagaccctgcctgctggcttccgggtgtccaccctgggcaccctgcagcccccaccagccccacccaagaagatcatgcctgaggcccacagccactacctgtatggccacatgctgagcgccttccgggactag

SEQ ID NO: 18702 - DNA, 369 bp, synthetic construct
  source 1..369: mol_type = other DNA; note = Synthetic coding sequence
atggccccccagaaggacaggaagcccaagaggagcacctggaggttcaacctggacctgacccaccctgtggaggatggcatctttgattctggcaactttgagcagttcctgcgggagaaggtgaaggtgaatggcaagacaggcaacctgggcaatgtggtgcacatcgagcgcttcaagaacaagatcaccgtggtgtctgagaagcagttcagcaagcgctacctgaagtacctgaccaagaagtacctgaagaagaacaacctgcgggactggctgcgggtggtggccagtgacaaggagacctatgagctgcgctacttccagatcagccaggatgaagatgagagcgagagtgaagattag

SEQ ID NO: 18703 - DNA, 936 bp, synthetic construct
  source 1..936: mol_type = other DNA; note = Synthetic coding sequence
atgcagtacatcagccacatctttggagtcatcaactgcaatggcttcaccctgagtgaccagaggggcctgcaggccgtgggcgtgggcatcttccccaacctgggcctggtgaaccacgactgctggcccaactgcaccgtcatcttcaacaacgggaagattgagctgcgggccctgggcaagatcagcgagggggaggagctgactgtgtcctacatcgacttcctgaatgtgtctgaggagaggaagaggcagctgaagaagcagtactactttgactgcacctgtgagcactgccagaagaagctgaaggatgacctcttcctgggcgtgaaggacaaccccaagcccagccaggaggtggtgaaggagatgatccagttcagcaaggacaccctggagaagattgacaaggcccggtctgagggcctgtaccacgaggtggtgaagctgtgcagagaatgtctggagaagcaggagcctgtgtttgctgacaccaacatctacatgctgaggatgctgagcatcgtgtctgaggtgctgagctacctgcaggcctttgaggaggccagcttctacgcccggaggatggtggatggctacatgaagctgtaccaccccaacaatgcccagctgggcatggctgtgatgagagctggcctgaccaactggcatgctggcaacatcgaggtgggccacggcatgatctgcaaggcctatgccatcctgctggtgacccacggccccagccaccccatcaccaaggacctggaggccatgagggtgcagacagagatggagctgaggatgttccggcagaatgagttcatgtactacaagatgagggaggccgccctgaacaaccagcccatgcaggtgatggccgagcccagcaatgagcccagccctgccctcttccacaagaagcagtag

SEQ ID NO: 18704 - DNA, 1542 bp, synthetic construct
  source 1..1542: mol_type = other DNA; note = Synthetic coding sequence
atggccgagctgcagatgctgctggaggaggagatccctgggggccggcgggccctgtttgacagctacaccaacctggagcgggtggccgactactgtgagaacaactacatccagagcgctgacaagcagagggccctggaggagaccaaggcctacaccacccagagcctggcctctgtggcctacctgatcaacaccctggccaacaacgtgctgcagatgctggacatccaggccagccagctgcggaggatggagagcagcatcaaccacatcagccagacagtggacatccacaaggagaaggtggcccggcgggagatcggcatcctgaccaccaacaagaacaccagcaggacccacaagatcatcgccccagccaacctggagaggcctgtgcgctacatcaggaagcccatcgactacaccatcctggatgacattggacatggagtgaagtggctgctgcgcttcaaggtgtccacccagaacatgaagatgggcggcctgcccaggaccaccccacccacccagaagccacccagcccccccatgtctgggaagggcaccctgggccgccacagcccctaccgcaccctggagcctgtgcggccccctgtggtgcccaatgactatgtgcccagccccaccaggaacatggcccccagccagcagagccctgtgaggacagcctctgtgaaccagaggaacagaacctacagcagcagcggcagcagcggcggcagccaccccagcagccgcagcagcagccgggagaacagcggcagcggctctgtgggcgtgcccatcgctgtgcccacccccagcccccccagcgtcttccctgccccagctggcagcgctggcaccccacccctgcctgccaccagcgccagcgccccagcccccctggtgcctgccaccgtgcccagcagcacagccccagatgctgctgctgggggcgcccagaccctggctgatggcttcaccagccccaccccacctgtggtgagcagcaccccacccaccggccaccctgtgcagttctacagcatgaacagacctgccagccgccacaccccacccaccatcggcggcagcctgccctaccgccggccccccagcatcaccagccagaccagcctgcagaaccagatgaatggaggccccttctacagccagaaccctgtgtctgacaccccacctcctcctcctcctgtggaggagcctgtgtttgatgagagccccccacctcctcctcctcctgaggactatgaggaggaggaggccgctgtggtggagtacagcgacccctatgcagaagaagatcctccctgggcccccaggagctacctggagaaggtggtggccatctatgactacaccaaggacaaggaggatgagctgtccttccaggagggcgccatcatctacgtgatcaagaagaatgatgatggctggtatgaaggagtgatgaatggagtgacaggcctcttccctggcaactacgtggagagcatcatgcactacagcgagtag

SEQ ID NO: 18705 - DNA, 1170 bp, synthetic construct
  source 1..1170: mol_type = other DNA; note = Synthetic coding sequence
atgcccctggagaacctggaggaggagggcctgcccaagaacccagacctgagaattgcccagctgcgcttcctgctgagcctgcctgagcacagaggagatgctgctgtgagagatgagctgatggctgctgtgcgggacaacaacatggccccctactatgaggccctgtgcaagagcctggactggcagattgatgtggacctgctgaacaagatgaagaaggccaatgaagatgagctgaagaggctggatgaggagctggaggatgctgagaagaacctgggggagagcgagatcagagatgccatgatggccaaggccgagtacctgtgccgcatcggggacaaggagggcgccctgacagccttcaggaagacctatgacaagacagtggccctgggccaccggctggacatcgtgttctacctgctgagaattggcctcttctacatggacaatgacctgatcaccaggaacacagagaaggccaagagcctcatcgaggagggcggggactgggacagaagaaaccggctgaaggtgtaccagggcctgtactgtgtggccatccgggacttcaagcaggccgctgagctgttcctggacacagtgtccaccttcaccagctatgagctgatggactacaagacctttgtgacctacacagtgtatgtgtccatgattgccctggagaggccagacctgcgggagaaggtgatcaagggagctgagatcctggaggtgctgcacagcctgcctgctgtgcggcagtacctgttcagcctgtatgaatgtcgctacagcgtcttcttccagagcctggccgtggtggagcaggagatgaagaaggactggctgtttgccccccactaccgctactacgtgcgggagatgaggatccacgcctacagccagctgctggagagctaccgcagcctgaccctgggctacatggccgaggcctttggagtgggcgtggagttcatcgaccaggagctgagccgcttcatcgccgccggccgcctgcactgcaagattgacaaggtgaatgaaattgtggagaccaacagaccagacagcaagaactggcagtaccaggagaccatcaagaagggggacctgctgctgaacagagtgcagaagctgagcagggtcatcaacatgtag

SEQ ID NO: 18706 - DNA, 420 bp, synthetic construct
  source 1..420: mol_type = other DNA; note = Synthetic coding sequence
atggccaacattgctgtgcagaggatcaagcgggagttcaaggaggtgctgaagtctgaggagaccagcaagaaccagatcaaggtggacctggtggatgagaacttcacagagctgcggggggagattgctggccccccagacaccccctatgaaggaggccgctaccagctggagatcaagatccctgagacctaccccttcaacccccccaagtacaagcagaaccctgagatgttcaagcagacagcccggctgtgggcccacgtgtatgctggggcccctgtgagcagccctgagtacaccaagaagattgagaacctgtgtgccatgggctttgacagaaatgctgtgattgtggccctgagcagcaagtcctgggatgtggagacagccacagagctgctgctgagcaactag

SEQ ID NO: 18707 - DNA, 1203 bp, synthetic construct
  source 1..1203: mol_type = other DNA; note = Synthetic coding sequence
atgaacttcaccgtgggcttcaagcccctgctgggagatgcccacagcatggacaacctggagaagcagctgatctgccccatctgcctggagatgttcagcaagcctgtggtgatcctgccctgccagcacaacctgtgcaggaaatgtgccaatgatgtgttccaggccagcaaccccctgtggcagagccggggcagcaccaccgtgagcagcggcggccgcttccgctgccccagctgcagacatgaggtggtgctggacagacatggagtgtatggcctgcagaggaacctgctggtggagaacatcatcgacatctacaagcaggagagcagccggcccctgcacagcaaggccgagcagcacctgatgtgtgaggagcacgaggaggagaagatcaacatctactgcctgagctgtgaggtgcccacctgcagcctgtgcaaggtgtttggagcccacaaggactgtgaggtggcccccctgcccaccatctacaagaggcagaagaagcaggacctgaccctgctgccccggctggagtgcagcggcaccaacaccacctactgcagcctggacctgcccagcagcagtgacccccccatcctggccagccagaacaccaagatcatcgacagcgagctgagtgatggcatcgccatgctggtggccggaaatgacagagtgcaggccgtcatcacccagatggaggaggtgtgccagaccatcgaggacaacagccggcggcagaagcagctgctgaaccagagatttgagagcctgtgtgctgtgctggaggagaggaagggggagctgctgcaggccctggcccgggagcaggaggagaagctgcagagggtgcggggcctcatccggcagtatggagaccacctggaggccagcagcaagctggtggagagcgccatccagagcatggaggagccccagatggccctgtacctgcagcaggccaaggagctgatcaacaaggtgggcgccatgagcaaggtggagctggccggccggcctgagcccggctatgagagcatggagcagttcaccgtgcgggtggagcacgtggccgagatgctgcggaccatcgacttccagcccggggccagcggggaggaggaggaggtggccccagatggagaggagggcagcgctggccctgaggaggagaggccagatggcccctag

SEQ ID NO: 18708 - DNA, 198 bp, synthetic construct
  source 1..198: mol_type = other DNA; note = Synthetic coding sequence
atgttcctgtctgctgtgttctttgccaagagcaagagcaagaacatcctggtgaggatggtgtctgaggccggcaccggcttctgcttcaacaccaagaggaaccggctgcgggagaagctgaccctgctgcactatgaccctgtggtgaagcagagggtgctgtttgtggagaagaagaagatccgcagcctgtag

SEQ ID NO: 18709 - DNA, 2919 bp, synthetic construct
  source 1..2919: mol_type = other DNA; note = Synthetic coding sequence
atgaggcctgagggcgccggcatggagctgggcggcggggaggagcggctgcctgaggagagccggcgggagcactggcagctgctgggcaacctgaagaccaccgtggagggcctggtgtccaccaacagccccaacgtgtggagcaaatatggaggcctggagcggctgtgccgggacatgcagagcatcctgtaccacggcctcatccgggaccaggcctgccggcggcagacagactactggcagtttgtgaaggacatccgctggctgagcccccacagcgccctgcacgtggagaagttcatctctgtgcatgaaaatgaccagagcagcgcagatggagccagcgagagagctgtggccgagctgtggctgcagcacagcctgcagtaccactgcctgagcgcccagctgcggcccctgctgggggaccggcagtacatcaggaagttctacacagatgctgccttcctgctgagtgatgcccacgtgacagccatgctgcagtgcctggaggccgtggagcagaacaacccccggctgctggcccagattgatgcctccatgtttgccaggaagcatgagagccccctgctggtgaccaagagccagagcctgacagccctgcccagcagcacctacaccccacccaacagctatgcccagcacagctacttcggcagcttcagcagcctgcaccagagcgtgcccaacaacggcagcgagcggcgcagcaccagcttccccctgagcggcccccccaggaagccccaggagagccggggccacgtgtccccagctgaggaccagaccatccaggcccctcctgtgtctgtgtctgccctggcccgggacagccccctgaccccaaatgagatgagcagcagcaccctgaccagccccatcgaggcctcctgggtgagcagccagaatgacagccctggagatgccagcgagggccctgagtacctggccatcggcaacctggacccccggggccgcacagccagctgccagagccacagcagcaatgctgagagcagcagcagcaacctcttcagcagcagcagcagccagaagccagacagcgctgccagcagcctgggggaccaggagggcggcggggagagccagctgagctctgtgctgcggcgcagcagcttcagcgagggccagaccctgactgtgaccagcggggccaagaagagccacatccgcagccacagcgacaccagcatcgccagcagaggagcccctgagagctgcaatgacaaggccaagctgcggggccccctgccctacagcggccagagcagcgaggtgtccacccccagcagcctgtacatggagtatgagggcggccgctacctgtgcagcggggagggcatgttccggcggcccagcgagggccagagcctcatctcctacctgtctgagcaggactttggcagctgtgccgacctggagaaggaaaatgcccacttcagcatcagcgagagcctgattgctgccatcgagctgatgaagtgcaacatgatgagccagtgcctggaggaggaggaggtggaggaggaggacagcgaccgggagatccaggagctgaagcagaagatccggctgcggcggcagcagatccgcaccaagaacctgctgcccatgtaccaggaggccgagcacggcagcttccgggtgaccagcagcagcagccagttcagcagccgggacagcgcccagctgagtgacagcggcagcgcagatgaggtggatgaatttgagatccaggatgctgacatcagaagaaacacagccagcagcagcaagagctttgtgagcagccagagcttcagccactgcttcctgcacagcaccagcgctgaggccgtggccatgggcctgctgaagcagtttgagggcatgcagctgcctgctgccagcgagctggagtggctggtgcctgagcatgatgccccccagaagctgctgcccatcccagacagcctgcccatcagcccagatgatggccagcacgccgacatctacaagctgcgcatccgggtgcggggcaacctggagtgggccccaccccggccccagatcatcttcaacgtgcacccagcccccaccaggaagattgctgtggccaagcagaactaccgctgtgccggctgcggcatcagaacagatcctgactacatcaagaggctgcgctactgtgagtacctgggcaagtacttctgccagtgctgccatgaaaatgcccagatggccatccccagccgggtgctgaggaagtgggacttcagcaagtactacgtgagcaacttcagcaaggacctgctgatcaagatctggaatgaccccctcttcaacgtgcaggacatcaacagcgccctgtacaggaaggtgaagctgctgaaccaggtgcggctgctgcgggtgcagctgtgccacatgaagaacatgttcaagacctgccgcctggccaaggagctgctggacagctttgacacagtgcccggccacctgacagaggacctgcacctgtacagcctgaatgacctgacagccaccaggaagggggagctgggcccccggctggccgagctgaccagggctggggccacccacgtggagcgctgcatgctgtgccaggccaagggcttcatctgtgagttctgccagaatgaagatgacatcatcttcccctttgagctgcacaagtgcaggacctgtgaggagtgcaaggcctgctaccacaaggcctgcttcaagagcggcagctgcccccgctgtgagcggctgcaggcccggcgggaggccctggcccggcagagcctggagagctacctgagtgactatgaggaggagcctgctgaggccctggccctggaggccgctgtgctggaggccacctag

SEQ ID NO: 18710 - DNA, 1161 bp, synthetic construct
  source 1..1161: mol_type = other DNA; note = Synthetic coding sequence
atggctgctgtggagaccagggtgtgtgaaacagatggctgcagcagcgaggccaagctgcagtgccccacctgcatcaagctgggcatccagggcagctacttctgcagccaggagtgcttcaagggctcctgggccacccacaagctgctgcacaagaaggccaaggatgagaaggccaagcgggaggtgtcctcctggacagtggagggggacatcaacacagacccctgggccggctaccgctacaccgggaagctgcggccccactaccccctgatgcccaccaggcctgtgcccagctacatccagaggccagactatgctgaccaccccctgggcatgtctgagagcgagcaggccctgaagggcaccagccagatcaagctgctgagcagcgaggacatcgagggcatgaggctggtgtgccgcctggcccgggaggtgctggatgtggccgccggcatgatcaagccaggagtgaccacagaggagattgaccatgctgtgcacctggcctgcatcgccaggaactgctaccccagccccctgaactactacaacttccccaagagctgctgcacctctgtgaatgaggtgatctgccacggcatcccagaccggcggcccctgcaggagggggacatcgtgaatgtggacatcaccctgtacagaaatggctaccatggagacctgaatgagaccttctttgtgggggaggtggatgatggagccaggaagctggtgcagaccacctatgagtgcctgatgcaggccattgatgctgtgaagccaggagtgcgctaccgggagctgggcaacatcatccagaagcacgcccaggccaacggcttctctgtggtgcgcagctactgcggccacggcatccacaagctgttccacacagccccaaatgtgccccactacgccaagaacaaggctgtgggcgtgatgaagagcggccacgtgttcaccatcgagcccatgatctgtgagggcggctggcaggatgagacctggccagatggctggacagctgtgaccagagatggcaagaggtctgcccagtttgagcacaccctgctggtgacagacaccggctgtgagatcctgacccggcggctggacagcgcccggccccacttcatgagccagttctag

SEQ ID NO: 18711 - DNA, 738 bp, synthetic construct
  source 1..738: mol_type = other DNA; note = Synthetic coding sequence
atgggccgcctggatggcaaggtgatcatcctgacagctgctgcccagggcatcggccaggccgccgccctggcctttgcccgggagggcgccaaggtgattgccacagacatcaatgaaagcaagctgcaggagctggagaagtacccaggcatccagaccagggtgctggatgtgaccaagaagaagcagattgaccagtttgccaatgaggtggagcggctggatgtgctcttcaacgtggccggctttgtgcaccacggcaccgtgctggactgtgaggagaaggactgggacttctccatgaacctgaatgtgcgctccatgtacctgatgatcaaggccttcctgcccaagatgctggcccagaagagcggcaacatcatcaacatgagctctgtggccagctctgtgaagggcgtggtgaacagatgtgtgtacagcaccaccaaggctgctgtgattggcctgaccaagtctgtggccgctgacttcatccagcagggcatccgctgcaactgtgtgtgccccggcaccgtggacacccccagcctgcaggagcgcatccaggcccggggcaaccctgaggaggccagaaatgacttcctgaagaggcagaagacaggccgctttgccacagctgaggagatcgccatgctgtgtgtgtacctggccagtgatgaaagtgcctacgtgactggaaatcctgtgatcattgatggcggctggagcctgtag

SEQ ID NO: 18712 - DNA, 2520 bp, synthetic construct
  source 1..2520: mol_type = other DNA; note = Synthetic coding sequence
atgtctgtggtgggcatcgacctgggcttcctgaactgctacatcgctgtggcccggagcggcggcatcgagaccatcgccaatgagtacagcgaccgctgcaccccagcctgcatcagcctgggcagcaggacccgggccatcggaaatgctgccaagagccagatcgtgaccaacgtgaggaacaccatccacggcttcaagaagctgcacggccgcagctttgatgaccccatcgtgcagacagagcgcatccggctgccctatgagctgcagaagatgcccaacggcagcgctggggtgaaggtgcgctacctggaggaggagcggccctttgccatcgagcaggtgacaggcatgctgctggccaagctgaaggagaccagtgaaaatgccctgaagaagcctgtggccgactgtgtgatcagcatccccagcttcttcacagatgctgagaggagatctgtgatggctgctgcccaggtggccggcctgaactgcctgcggctgatgaatgagaccacagctgtggccctggcctacggcatctacaagcaggacctgccccccctggatgagaagcccagaaatgtggtgttcatcgacatgggccacagcgcctaccaggtgctggtgtgtgccttcaacaagggcaagctgaaggtgctggccaccacctttgacccctacctgggcggcaggaactttgatgaggccctggtggactacttctgtgatgagttcaagaccaagtacaagatcaacgtgaaggagaacagccgggccctgctgcggctgtaccaggagtgtgagaagctgaagaagctgatgtctgccaatgccagtgacctgcccctgaacatcgagtgcttcatgaatgacctggatgtgagcagcaagatgaacagagcccagtttgagcagctgtgtgccagcctgctggcccgggtggagccccccctgaaggctgtgatggagcaggccaacctgcagcgggaggacatcagcagcattgagatcgtgggcggggccacccgcatcccagctgtgaaggagcagatcaccaagttcttcctgaaggacatcagcaccaccctgaatgctgatgaagctgtggcccggggctgtgccctgcagtgtgccatcctgagccctgccttcaaggtgcgggagttcagcatcacagacctggtgccctacagcatcaccctgcgctggaagaccagctttgaagatggcagcggggagtgtgaggtgttctgcaagaaccacccagcccccttcagcaaggtgatcaccttccacaagaaggagccctttgagctggaggccttctacaccaacctgcacgaggtgccctacccagatgccagaattggcagcttcaccatccagaatgtgttcccccagagtgatggagacagcagcaaggtgaaggtgaaggtgcgggtgaacatccacggcatcttctctgtggccagcgccagcgtcatcgagaagcagaacctggagggggaccacagtgatgcccccatggagacagagaccagcttcaagaatgaaaacaaggacaacatggacaagatgcaggtggaccaggaggagggccaccagaagtgccacgccgagcacaccccagaggaggagattgaccacactggagccaagaccaagtctgctgtgtctgacaagcaggaccggctgaaccagaccctgaagaagggcaaggtgaagagcattgacctgcccatccagagcagcctgtgccggcagctgggccaggacctgctgaacagctacattgaaaatgaaggcaagatgatcatgcaggacaagctggagaaggagagaaatgatgccaagaatgctgtggaggagtatgtgtatgacttccgggaccggctgggcaccgtgtatgagaagttcatcaccccagaggacctgagcaagctgtctgctgtgctggaggacacagagaactggctgtatgaagatggagaggaccagcccaagcaggtgtatgtggacaagctgcaggagctgaagaagtatggccagcccatccagatgaagtacatggagcacgaggagcggcccaaggccctgaatgacctgggcaagaagatccagctggtgatgaaggtgattgaggcctacagaaacaaggatgaaagatatgaccacctggaccccacagagatggagaaggtggagaagtgcatcagtgatgccatgtcctggctgaacagcaagatgaatgcccagaacaagctgagcctgacccaggaccctgtggtgaaggtgtctgaaattgtggccaagagcaaggagctggacaacttctgcaaccccatcatctacaagcccaagcccaaggccgaggtgcctgaggacaagcccaaggccaacagcgagcacaacggccccatggatggccagagcggcacagagaccaagagtgacagcaccaaggacagcagccagcacaccaagagcagtggagagatggaggtggactag

SEQ ID NO: 18713 - DNA, 1224 bp, synthetic construct
  source 1..1224: mol_type = other DNA; note = Synthetic coding sequence
atggccgccccctgtgccgaggaccccagcctggagcggcacttcaagggccacagagatgctgtgacctgtgtggacttcagcatcaacaccaagcagctggccagcggctccatggacagctgcctgatggtgtggcacatgaagccccagagccgggcctaccgcttcaccggccacaaggatgctgtgacctgtgtgaacttcagccccagcggccacctgctggccagcggcagccgggacaagacagtgcgcatctgggtgcccaacgtgaagggggagagcacagtgttccgggcccacacagccaccgtgcgctctgtgcacttctgcagtgatggccagagctttgtgacagccagtgatgacaagacagtgaaggtgtgggccacccaccggcagaagttcctgttcagcctgagccagcacatcaactgggtgcgctgtgccaagttctccccagatggccgcctcatcgtgtctgccagtgatgacaagacagtgaagctgtgggacaagagcagccgggagtgtgtgcacagctactgtgagcacggcggctttgtgacctacgtggacttccaccccagcggcacctgcatcgctgctgctggcatggacaacacagtgaaggtgtgggatgtgaggacccaccggctgctgcagcactaccagctgcacagcgctgctgtgaatggcctgtccttccaccccagcggcaactacctgatcacagccagcagtgacagcaccctgaagatcctggacctgatggagggccgcctgctgtacaccctgcacggccaccagggccctgccaccaccgtggccttcagcaggactggagagtactttgccagcggcggcagtgatgagcaggtgatggtgtggaagagcaactttgacatcgtggaccatggagaggtgaccaaggtgccccggcccccagccaccctggccagctccatgggcaacctgcctgaggtggacttccctgtgcccccaggccggggccgctctgtggagagcgtgcagagccagccccaggagcctgtgtctgtgccccagaccctgaccagcaccctggagcacatcgtgggccagctggatgtgctgacccagacagtgtccatcctggagcagaggctgaccctgacagaggacaagctgaagcagtgcctggagaaccagcagctgatcatgcagagggccaccccctag

SEQ ID NO: 18714 - DNA, 1173 bp, synthetic construct
  source 1..1173: mol_type = other DNA; note = Synthetic coding sequence
atggccactggagacctgaagaggagcctgaggaacctggagcaggtgctgcggctgctgaactacccagaggaggtggactgtgtgggcctcatcaagggggaccctgctgccagcctgcccatcatctcctacagcttcaccagctacagcccctacgtgacagagctgatcatggagagcaatgtggagctgattgccaagaatgacctgcgcttcattgatgctgtgtacaagctgctgcgggaccagttcaactacaagcccatcctgaccaagaagcagttcatccagtgtggctttgctgagtggaagatccagatcgtgtgtgacatcctgaactgtgtgatgaagaagcacaaggagctgagcagcctgcagaagatccccagccagcagaggaagaagatcagcagcggcaagtctgagccccccctgggcaatgagaagatctctgctgaggccgtgggcgtggacatcagcggccgcttcatgaccagcggcaagaagaaggctgtggtgatccgccacctgtacaatgaagataatgtggacatcagcgaggacaccctgagccccatcacagatgtgaatgaggccgtggatgtgtctgacctgaatgccacagagatcaagatgcctgaggtgaaggtgcctgagatcaaggccgagcagcaggatgtgaatgtgaaccctgagatcacagccctgcagaccatgctggccgagtgccaggagaacctgaagaagctgaccagcattgagaagaggctggactgcctggagcagaagatgaagggcaaggtgatggtggatgagaacacctggaccaacctgctgagccgggtgaccctgctggagacagagatgctgctgagcaagaagaatgatgagttcatcgagttcaatgaggtgtctgaagattatgccagctgcagcgacatggacctgctgaacccccacaggaagtctgaggtggagaggcctgccagcatccccctgagcagcggctacagcacagccagcagtgacagcaccccccgggccagcacagtgaactactgcggcctgaatgagatcagcgaggagaccaccatccagaagatggagaggatgaagaagatgtttgaggagacagctgagctgctgaagtgccccaaccactacctgtag

SEQ ID NO: 18715 - DNA, 2601 bp, synthetic construct
  source 1..2601: mol_type = other DNA; note = Synthetic coding sequence
atgcctgctgtgtccctgccccccaaggaaaatgccctcttcaagaggatcctgcgctgctatgagcacaagcagtacagaaatggcctgaagttctgcaagcagatcctgagcaaccccaagtttgctgagcacggggagaccctggccatgaagggcctgaccctgaactgcctgggcaagaaggaggaggcctatgagctggtgcggcggggcctgagaaatgacctgaagagccacgtgtgctggcacgtgtatggcctgctgcagaggagtgacaagaagtatgatgaggccatcaagtgctacagaaatgccctgaagtgggacaaggacaacctgcagatcctgcgggacctgagcctgctgcagatccagatgagggacctggagggctaccgggagacccgctaccagctgctgcagctgcggcctgcccagagggcctcctggattggctacgccatcgcctaccacctgctggaggactatgagatggccgccaagatcctggaggagttcaggaagacccagcagaccagcccagacaaggtggactatgagtacagcgagctgctgctgtaccagaaccaggtgctgcgggaggccggcctgtaccgggaggccctggagcacctgtgcacctatgagaagcagatctgtgacaagctggccgtggaggagaccaagggggagctgctgctgcagctgtgccgcctggaggatgctgctgatgtgtaccggggcctgcaggagagaaatcctgagaactgggcctactacaagggcctggagaaggccctgaagccagccaacatgctggagcggctgaagatctatgaggaggcctggaccaagtacccccggggcctggtgccccggcggctgcccctgaacttcctgagcggggagaagttcaaggagtgcctggacaagttcctgaggatgaacttcagcaagggctgcccccctgtgttcaacaccctgcggagcctgtacaaggacaaggagaaggtggccatcatcgaggagctggtggtgggctatgagaccagcctgaagagctgccgcctcttcaaccccaatgatgatggcaaggaggagccccccaccaccctgctgtgggtgcagtactacctggcccagcactatgacaagattggccagcccagcatcgccctggagtacatcaacacagccatcgagagcacccccaccctcatcgagctgttcctggtgaaggccaagatctacaagcatgctggcaacatcaaggaggccgcccgctggatggatgaggcccaggccctggacacagctgaccgcttcatcaacagcaaatgtgccaagtacatgctgaaggccaacctgatcaaggaggccgaggagatgtgcagcaagttcacccgggagggcaccagcgctgtggagaacctgaatgagatgcagtgcatgtggttccagacagaatgtgcccaggcctacaaggccatgaacaagtttggagaggccctgaagaagtgccatgaaattgagcggcacttcatcgagatcacagatgaccagtttgacttccacacctactgcatgaggaagatcaccctgcggagctatgtggacctgctgaagctggaggatgtgctgcggcagcaccccttctacttcaaggccgcccgcatcgccatcgagatctacctgaagctgcatgacaaccccctgacagatgagaacaaggagcacgaggccgacacagccaacatgtctgacaaggagctgaagaagctgaggaacaagcagaggcgggcccagaagaaggcccagatcgaggaggagaagaagaatgctgagaaggagaagcagcagaggaaccagaagaagaagaaggatgatgatgatgaggagattggaggccccaaggaggagctgatccctgagaagctggccaaggtggagacccccctggaggaggccatcaagttcctgacccccctgaagaacctggtgaagaacaagattgagacccacctgtttgcctttgagatctacttcaggaaggagaagttcctgctgatgctgcagagcgtgaagagggcctttgccatcgacagcagccacccctggctgcacgagtgcatgatccgcctcttcaacacagctgtgtgtgagagcaaggacctgagtgacacagtgaggacagtgctgaagcaggagatgaacagactctttggagccaccaaccccaagaacttcaatgagaccttcctgaagaggaacagcgacagcctgccccaccggctgtctgctgccaagatggtgtactacctggaccccagcagccagaagagggccatcgagctggccaccaccctggatgagagcctgaccaacagaaacctgcagacctgcatggaggtgctggaggccctgtatgatggcagcctgggggactgcaaggaggccgctgagatctaccgggccaactgccacaagctgttcccctatgccctggccttcatgcctcctggctatgaggaggacatgaagatcaccgtgaatggagacagcagcgctgaggccgaggagctggccaatgagatctag

SEQ ID NO: 18716 - DNA, 1293 bp, synthetic construct
  source 1..1293: mol_type = other DNA; note = Synthetic coding sequence
atggccagcagcgccaagtctgctgagatgcccaccatcagcaagacagtgaaccccaccccagacccccaccaggagtacctggacccccgcatcaccatcgccctgtttgaaattggcagccacagccccagctcctggggcagcctgcccttcctgaagaacagcagccaccaggtgacagagcagcagacagcccagaagttcaacaacctgctgaaggagatcaaggacatcctgaagaacatggccggctttgaggagaagatcacagaggccaaggagctgtttgaggagaccaacatcacagaagatgtgtctgcccacaaggagaacatccggggcctggacaagatcaatgagatgctgagcaccaacctgcctgtgtccctggcccctgagaaggaggacaatgagaagaagcaggagatgatcctggagaccaacatcacagaagatgtgtctgcccacaaggagaacatccggggcctggacaagatcaatgagatgctgagcaccaacctgcctgtgtccctggcccctgagaaggaggacaatgagaagaagcagcagatgatcatggagaaccagaacagcgagaacacagcccaggtgtttgcccgggacctggtgaaccggctggaggagaagaaggtgctgaatgagacccagcagagccaggagaaggccaagaaccggctgaatgtgcaggaggagaccatgaagatccggaacaacatggagcagctgctgcaggaggccgagcactggagcaagcagcacacagagctgagcaagctgatcaagagctaccagaagagccagaaggacatcagcgagaccctgggcaacaatggagtgggcttccagacccagcccaacaatgaggtgtctgccaagcatgagctggaggagcaggtgaagaagctgagccatgacacctacagcctgcagctgatggccgccctgctggagaatgaatgccagatcctgcagcagagggtggagatcctgaaggagctgcaccaccagaagcagggcaccctgcaggagaagcccatccagatcaactacaagcaggacaagaagaaccagaagcccagcgaggccaagaaggtggagatgtacaagcagaacaagcaggccatgaagggcaccttctggaagaaggacaggagctgccgcagcctggatgtgtgcctgaacaagaaggcctgcaacacccagttcaacatccacgtggccaggaaggccctgcggggcaagatgaggtctgccagcagcctgaggtag

SEQ ID NO: 18717 - DNA, 5199 bp, synthetic construct
  source 1..5199: mol_type = other DNA; note = Synthetic coding sequence
atggccgccatcggccggggccgcagcctgaagaacctgcgggtgcggggcagaaatgattctggagaggagaatgtgcccctggacctgacccgggagcccagcgacaacctgcgggagatcctgcagaatgtggcccggctgcagggcgtgagcaacatgaggaagctgggccacctgaacaacttcaccaagctgctgtgtgacatcggccacagcgaggagaagctgggcttccactatgaggacatcatcatctgcctgcggctggccctgctgaatgaggccaaggaggtgcgggccgccggcctgcgggccctgcgctacctgatccaggacagcagcatcctgcagaaggtgctgaagctgaaggtggactacctgattgcccgctgcatcgacatccagcagagcaatgaggtggagaggacccaggccctgcggctggtgaggaagatgatcaccgtgaatgccagcctcttccccagctctgtgaccaacagcctgattgctgtgggcaatgatggcctgcaggagcgggacaggatggtgcgggcctgcatcgccatcatctgtgagctggccctgcagaaccctgaggtggtggccctgcggggcggcctgaacaccatcctgaagaatgtcatcgactgccagctgagccgcatcaatgaggccctgatcaccaccatcctgcacctgctgaaccaccccaagacccggcagtatgtgcgggcagatgtggagctggagcgcatcctggccccctacacagacttccactaccgccacagcccagacacagctgagggccagctgaaggaggaccgggaggcccgcttcctggccagcaagatgggcatcatcgccaccttccgctcctgggccggcatcatcaacctgtgcaagccaggcaacagcggcatccagagcctgattggagtgctgtgcatccccaacatggagatccggcggggcctgctggaggtgctgtatgacatcttccggctgcccctgcctgtggtgacagaggagttcatcgaggccctgctgtctgtggaccccggccgcttccaggacagctggaggctgagtgatggctttgtggccgctgaggccaagaccatcctgccccaccgggcccggagcaggccagacctgatggacaactacctggccctgatcctgagcgccttcatcagaaatggcctgctggagggcctggtggaggtgatcaccaacagtgatgaccacatctctgtgcgggccaccatcctgctgggggagctgctgcacatggccaacaccatcctgccccacagccacagccaccacctgcactgcctgcccaccctgatgaacatggccgccagctttgacatccccaaggagaagaggctgcgggccagcgctgccctgaactgcctgaagcgcttccacgagatgaagaagaggggccccaagccctacagcctgcacctggaccacatcatccagaaggccatcgccacccaccagaagagggaccagtacctgcgggtgcagaaggacatcttcatcctgaaggacacagaggaggccctgctgatcaacctgcgggacagccaggtgctgcagcacaaggagaacctggagtggaactggaacctgattggcaccatcctgaagtggcccaacgtgaacctgaggaactacaaggatgagcagctgcacagatttgtgcggcggctgctgtacttctacaagcccagcagcaagctgtatgccaacctggacctggactttgccaaggccaagcagctgactgtggtgggctgccagttcacagagttcctgctggagagtgaagaagatggccagggctacctggaggacctggtgaaggacatcgtgcagtggctgaatgccagcagcggcatgaagccagagaggagcctgcagaacaacggcctgctgaccaccctgagccagcactacttcctgttcatcggcaccctgagctgccacccccatggagtgaagatgctggagaagtgcagcgtcttccagtgcctgctgaacctgtgcagcctgaagaaccaggaccacctgctgaagctgactgtgagcagcctggactacagcagagatggcctggcccgggtcatcctgagcaagatcctgacagctgccacagatgcctgccgcctgtatgccaccaagcacctgcgggtgctgctgcgggccaacgtggagttcttcaacaactggggcatcgagctgctggtgacccagctgcatgacaagaacaagaccatcagcagcgaggccctggacatcctggatgaggcctgtgaggacaaggccaacctgcacgccctgatccagatgaagccagccctgagccacctgggggacaagggcctgctgctgctgctgcgcttcctgagcatccccaagggcttctcctacctgaatgaaagaggctacgtggccaagcagctggagaagtggcaccgggagtacaacagcaaatatgtggacctgattgaggagcagctgaatgaggccctgaccacctacaggaagcctgtggatggagacaactacgtgagaagaagcaaccagaggctgcagaggcctcatgtgtacctgcccatccacctgtatggccagctggtgcaccacaagacaggctgccacctgctggaggtgcagaacatcatcacagagctgtgcagaaatgtgaggaccccagacctggacaagtgggaggagatcaagaagctgaaggccagcctgtgggccctgggcaacatcggcagcagcaactggggcctgaacctgctgcaggaggagaatgtcatcccagacatcctgaagctggccaagcagtgtgaggtgctgagcatccggggcacctgtgtgtatgtgctgggcctgattgccaagaccaagcagggctgtgacatcctgaagtgccacaactgggatgctgtgcgccacagcaggaagcacctgtggcctgtggtgcctgatgatgtggagcagctgtgcaatgagctgagcagcatccccagcaccctgagcctgaacagcgagagcaccagcagccgccacaacagcgagagcgagagcgtgcccagctccatgttcatcctggaggatgaccgcttcggcagcagcagcaccagcaccttcttcctggacatcaatgaagacacagagcccaccttctatgacaggagcggccccatcaaggacaagaacagcttccccttctttgccagcagcaagctggtgaagaaccgcatcctgaacagcctgaccctgcccaacaagaagcacaggagcagcagtgaccccaagggcggcaagctgagcagcgagagcaagaccagcaacagacgcatccgcaccctgacagagcccagcgtggacttcaaccacagtgatgacttcacccccatcagcacagtgcagaagaccctgcagctggagaccagcttcatgggcaacaagcacatcgaggacaccggcagcacccccagcatcggggagaatgacctgaagttcaccaagaactttggaacagagaaccaccgggagaacaccagccgggagcggctggtggtggagagcagcaccagcagccacatgaagatccgcagccagagcttcaacacagacaccaccaccagcggcatcagctccatgagcagcagccccagccgggagaccgtgggcgtggatgccaccaccatggacacagactgtggctccatgagcacagtggtgtccaccaagaccatcaagaccagccactacctgaccccccagagcaaccacctgagcctgagcaagagcaacagcgtgtccctggtgcccccaggcagcagccacaccctgccccggcgggcccagagcctgaaggcccccagcatcgccaccatcaagagcctggccgactgcaacttctcctacaccagcagcagagatgccttcggctacgccaccctgaagaggctgcagcagcagaggatgcaccccagcctgagccacagcgaggccctggccagccctgccaaggatgtgctcttcacagacaccatcaccatgaaggccaacagctttgagagccggctgacccccagcagaattgacttcaagaagaagcacgtgggcggcatccgcagcctgcggcccaccatcaccaacaacctcttccgcttcatgaaggccctgtcctatgccagcctggacaaggaggacctgctgagccccatcaaccagaacaccctgcagaggagcagctctgtgcgctccatggtgtcctctgccacctacggcggcagtgatgactacatcggcctggccctgcctgtggacatcaatgacatcttccaggtgaaggacatcccctacttccagaccaagaacatcccccctcatgatgacagaggagcccgggcctttgcccatgatgctgggggcctgcccagcggcaccggcggcctggtgaagaacagcttccacctgctgcggcagcagatgagcctgacagagatcatgaacagcatccacagtgatgccagcctcttcctggagagcacagaggacaccggcctgcaggagcacacagatgacaactgcctgtactgtgtgtgcatcgagatcctgggcttccagcccagcaaccagctgagcgccatctgcagccacagcgacttccaggacatcccctacagcgactggtgtgagcagaccatccacaaccccctggaggtggtgcccagcaagttcagcggcatcagcggctgcagtgatggagtgtcccaggagggcagcgccagcagcaccaagagcacagagctgctgctgggcgtgaagaccatcccagatgacacccccatgtgccgcatcctgctgaggaaggaggtgctgcggctggtgatcaacctgagcagctctgtgtccaccaagtgccacgagaccggcctgctgaccatcaaggagaagtacccccagacctttgatgacatctgcctgtacagcgaggtgagccacctgctgagccactgcaccttccggctgccctgccgccgcttcatccaggagctgttccaggatgtgcagttcctgcagatgcatgaggaggccgaggccgtgctggccaccccacccaagcagcccatcgtggacaccagcgctgagagctag

SEQ ID NO: 18718 - DNA, 1761 bp, synthetic construct
  source 1..1761: mol_type = other DNA; note = Synthetic coding sequence
atgtctgccaccgtggtggatgctgtgaatgctgcccccctgagcggcagcaaggagatgagcctggaggagcccaagaagatgacccgggaggactggaggaagaagaaggagctggaggagcagaggaagctgggcaatgccccagctgaggtggatgaggagggcaaggacatcaacccccacatcccccagtacatcagctctgtgccctggtacatcgaccccagcaagaggcccaccctgaagcaccagaggccccagcctgagaagcagaagcagttcagcagcagcggggagtggtacaagaggggcgtgaaggagaacagcatcatcaccaagtacagaaaaggagcctgtgagaactgtggggccatgacccacaagaagaaggactgctttgagcggccccggcgggtgggcgccaagttcaccggcaccaacatcgccccagatgagcacgtgcagccccagctgatgtttgattatgatggcaagagggaccgctggaatggctacaaccctgaggagcacatgaagatcgtggaggagtatgccaaggtggacctggccaagaggaccctgaaggcccagaagctgcaggaggagctggccagcggcaagctggtggagcaggccaacagccccaagcaccagtggggcgaggaggagcccaacagccagatggagaaggaccacaacagtgaagatgaagatgaggacaagtatgcagatgacatcgacatgcctggccagaactttgacagcaagaggcgcatcaccgtgaggaacctgcgcatcagagaagatattgccaagtacctgaggaacctggaccccaacagcgcctactatgaccccaagacccgggccatgagggagaacccctatgccaatgctgggaagaacccagatgaggtgtcctatgctggggacaactttgtgcgctacaccggggacaccatctccatggcccagacccagctgtttgcctgggaggcctatgacaagggcagcgaggtgcacctgcaggccgaccccaccaagctggagctgctgtacaagagcttcaaggtgaagaaggaggacttcaaggagcagcagaaggagagcatcctggagaagtatggaggccaggagcacctggatgcccctcctgctgagctgctgctggcccagacagaagattatgtggagtacagcagacatggaacagtcatcaagggccaggagagagctgtggcctgcagcaaatatgaagaagatgtgaagatccacaaccacacccacatctggggcagctactggaaggagggccgctggggctacaagtgctgccacagcttcttcaagtacagctactgcaccggggaggccggcaaggagatcgtgaacagcgaggagtgcatcatcaatgagatcactggagaggagagcgtgaagaagccccagaccctgatggagctgcaccaggagaagctgaaggaggagaagaagaagaagaagaagaagaagaagaagcacaggaagagcagcagtgacagtgatgatgaggagaagaagcatgagaagctgaagaaggccctgaatgctgaggaggcccggctgctgcacgtgaaggagaccatgcagattgatgagaggaagaggccctacaacagcatgtatgagacccgggagcccacagaggaggagatggaggcctacaggatgaagaggcagaggccagatgaccccatggccagcttcctgggccagtag

SEQ ID NO: 18719 - DNA, 1185 bp, synthetic construct
  source 1..1185: mol_type = other DNA; note = Synthetic coding sequence
atggccctggaggtgggggacatggaggatggccagctgagtgacagcgacagcgacatgacagtggcccccagcgaccggcccctgcagctgcccaaggtgctgggcggggacagcgccatgagggccttccagaacacagccacagcctgtgcccctgtgagccactacagagctgtggagagcgtggacagcagcgaggagagcttcagtgacagtgatgatgacagctgcctgtggaagaggaagaggcagaagtgcttcaaccccccacccaagccagagcccttccagtttggccagagcagccagaagccccctgtggccggcggcaagaagatcaacaacatctggggcgctgtgctgcaggagcagaaccaggatgctgtggccacagagctgggcatcctgggcatggagggcaccatcgacaggagccggcagagcgagacctacaactacctgctggccaagaagctgaggaaggagagccaggagcacaccaaggacctggacaaggagctggatgagtacatgcacggcggcaagaagatgggcagcaaggaggaggagaatggccagggccacctgaagaggaagaggcctgtgaaggaccggctgggcaacagacctgagatgaactacaagggccgctatgagatcacagctgaggacagccaggagaaggtggctgatgagatctccttccggctgcaggagcccaagaaggacctgattgcccgggtggtgcgcatcatcggcaacaagaaggccatcgagctgctgatggagacagctgaggtggagcagaatggaggcctcttcatcatgaatggcagcagaagaaggaccccaggaggagtcttcctgaacctgctgaagaacacccccagcatcagcgaggagcagatcaaggacatcttctacatcgagaaccagaaggagtatgagaacaagaaggccgccaggaagaggaggacccaggtgctgggcaagaagatgaagcaggccatcaagagcctgaacttccaggaggatgatgacaccagccgggagacctttgccagtgacaccaatgaggccctggccagcctggatgagagccaggagggccatgctgaggccaagctggaggccgaggaggccatcgaggtggaccacagccatgacctggacatcttctag

SEQ ID NO: 18720 - DNA, 789 bp, synthetic construct
  source 1..789: mol_type = other DNA; note = Synthetic coding sequence
atgttcctgttcagcaggaagaccaggacccccatcagcacctacagcgacagctaccgggcccccaccagcatcaaggaggtgtacaaggacccccccctgtgtgcctgggaggccaacaagttcctgaccccaggcctgacccacaccatggagcggcacgtggaccctgaggccctgcagaagatggccaagtgtgctgtgcaggactacacctaccggggcagcatcagcggccacccctacctgcctgagaagtactggctgagccaggaggaggccgacaagtgcagccccaactacctgggcagtgactggtacaacacctggaggatggagccctacaacagcagctgctgcaacaagtacaccacctacctgccccggctgcccaaggaggccaggatggagacagctgtgcggggcatgcccctggagtgcccccccaggcctgagcggctgaatgcctatgagcgggaggtgatggtgaacatgctgaacagcctgagcaggaaccagcagctgccccgcatcaccccccgctgtggctgtgtggaccccctgcccggccgcctgcccttccacggctatgaaagtgcctgcagcggccgccactactgcctgcggggcatggactactatgccagcggggccccctgcacagaccggcggctgcggccctggtgccgggagcagcccaccatgtgcaccagcctgcgggccccagccagaaatgctgtgtgctgctacaacagccctgctgtgatcctgcccatcagcgagccctag

SEQ ID NO: 18721 - DNA, 4206 bp, synthetic construct
  source 1..4206: mol_type = other DNA; note = Synthetic coding sequence
atggaggagatccctgtgaaggtggccgtgcgcatccggcccctgctgtgcaaggaggccctgcacaaccaccaggtgtgtgtgcgggtcatccccaacagccagcaggtgatcatcggccgggacagagtcttcacctttgattttgtgtttgggaagaacagcacccaggatgaggtgtacaacacctgcatcaagcccctggtgctgagcctgattgagggctacaatgccaccgtgtttgcctacggccagacaggcagcggcaagacctacaccatcggcggcggccacatcgcctctgtggtggagggccagaagggcatcatcccccgggccatccaggagatcttccagagcatcagcgagcaccccagcattgacttcaacgtgaaggtgtcctacatcgaggtgtacaaggaggacctgcgggacctgctggagctggagacctccatgaaggacctgcacatccgggaggatgagaagggcaacacagtcatcgtgggcgccaaggaatgtcatgtggagagcgctggggaggtgatgagcctgctggagatgggaaatgctgcccggcacacaggcaccacccagatgaatgagcacagcagccgcagccacgccatcttcaccatcagcatctgccaggtgcacaagaacatggaggccgcagaagatggctcctggtacagccccaggcacatcgtgtccaagttccactttgtggacctggccggcagcgagcgggtgaccaagacaggcaacacaggagagcgcttcaaggagagcatccagatcaacagcggcctgctggccctgggcaatgtcatcagcgccctgggggaccccaggaggaagagcagccacatcccctacagagatgccaagatcacccggctgctgaaggacagcctgggcggcagcgccaagacagtgatgatcacctgtgtgagccccagcagcagcaactttgatgagagcctgaacagcctgaagtatgccaacagagccaggaacatccggaacaagcccaccgtgaacttcagccctgagagtgacagaattgatgagatggagtttgagatcaagctgctgcgggaggccctgcagagccagcaggccggcgtgtcccagaccacccagatcaaccgggagggcagcccagacaccaaccgcatccacagcctggaggagcaggtggcccagctgcagggagaatgtctgggctaccagtgctgcgtggaggaggccttcaccttcctggtggacctgaaggacacagtgcggctgaatgagaagcagcagcacaagctgcaggagtggttcaacatgatccaggaggtgaggaaggctgtgctgaccagcttccggggcatcggcggcacagccagcctggaggagggcccccagcacgtgacagtgctgcagctgaagcgggagctgaagaagtgccagtgtgtgctggccgcagatgaggtggtgttcaaccagaaggagctggaggtgaaggagctgaagaaccaggtgcagatgatggtgcaggagaacaagggccatgctgtgtccctgaaggaggcccagaaggtgaaccggctgcagaatgagaagatcatcgagcagcagctgctggtggaccagctgtctgaggagctgaccaagctgaacctgtctgtgaccagcagcgccaaggagaactgtggagatggcccagatgcccgcatccctgagcggcggccctacacagtgccctttgacacccacctgggccactacatctacatccccagccggcaggacagcaggaaggtgcacaccagcccccccatgtacagcctggaccgcatctttgctggcttccgcaccaggagccagatgctgctgggccacatcgaggagcaggacaaggtgctgcactgccagttcagtgacaacagtgatgatgaggagagcgagggccaggagaagagcggcacccgctgccgcagccgctcctggatccagaagccagacagcgtgtgcagcctggtggagctgagtgacacccaggatgagacccagaagagtgacctggagaatgaagacctgaagattgactgcctgcaggagagccaggagctgaacctgcagaagctgaagaacagcgagcgcatcctgacagaggccaagcagaagatgagggagctgaccatcaacatcaagatgaaggaggacctgatcaaggagctgatcaagacaggaaatgatgccaagtctgtgtccaagcagtacagcctgaaggtgaccaagctggagcatgatgctgagcaggccaaggtggagctgattgagacccagaagcagctgcaggagctggagaacaaggacctgagtgatgtggccatgaaggtgaagctgcagaaggagttcaggaagaagatggatgctgccaagctgcgggtgcaggtgctgcagaagaagcagcaggacagcaagaagctggccagcctgagcatccagaatgagaagagggccaatgagctggagcagagcgtggaccacatgaagtaccagaagatccagctgcagaggaagctgcgggaggagaatgagaagaggaagcagctggatgctgtgatcaagagggaccagcagaagatcaaggagatccagctgaagacaggccaggaggagggcctgaagcccaaggccgaggacctggatgcctgcaacctgaagaggaggaagggcagctttggcagcattgaccacctgcagaagctggatgagcagaagaagtggctggatgaggaggtggagaaggtgctgaaccagaggcaggagctggaggagctggaggccgacctgaagaagcgggaggccatcgtgtccaagaaggaggccctgctgcaggagaagagccacctggagaacaagaagctgcggagcagccaggccctgaacacagacagcctgaagatcagcacccggctgaacctgctggagcaggagctgtctgagaagaatgtgcagctgcagaccagcacagctgaggagaagaccaagatcagcgagcaggtggaggtgctgcagaaggagaaggaccagctgcagaagagaagacacaacgtggatgagaagctgaagaatggccgggtgctgagccctgaggaggagcacgtgctcttccagctggaggagggcatcgaggccctggaggccgccatcgagtacagaaatgaaagcatccagaaccggcagaagagcctgcgggccagcttccacaacctgagcagaggagaggccaacgtgctggagaagctggcctgcctgagccctgtggagatccgcaccatcctcttccgctacttcaacaaggtggtgaacctgcgggaggccgagaggaagcagcagctgtacaatgaggagatgaagatgaaggtgctggagcgggacaacatggtgcgggagctggagagcgccctggaccacctgaagctgcagtgtgaccggcggctgaccctgcagcagaaggagcacgagcagaagatgcagctgctgctgcaccacttcaaggagcaggatggagagggcatcatggagaccttcaagacctatgaggacaagatccagcagctggagaaggacctgtacttctacaagaagaccagccgggaccacaagaagaagctgaaggagctggtgggggaggccatccggcggcagctggcccccagcgagtaccaggaggccggagatggagtgctgaagccagagggcggcggcatgctgtctgaggagctgaagtgggccagcaggcctgagagcatgaagctgagcggccgggagcgggagatggacagcagcgccagcagcctgcggacccagcccaacccccagaagctgtgggaggacatccctgagctgccccccatccacagcagcctggcccctccttctggccacatgctgggcaatgaaaacaagacagaaacagatgacaaccagttcaccaagagccacagccggctgagcagccagatccaggtggtgggcaatgtgggccgcctgcatggagtgacccctgtgaagctgtgcaggaaggagctgcggcagatcagcgccctggagctgagcctgcggcgcagcagcctgggcgtgggcatcggctccatggctgctgacagcattgaggtgtccaggaagccccgggacctgaagacctag

SEQ ID NO: 18722 - DNA, 768 bp, synthetic construct
  source 1..768: mol_type = other DNA; note = Synthetic coding sequence
atggtgaagggggagaagggccccaagggcaagaagatcaccctgaaggtggccaggaactgcatcaagatcacctttgatggcaagaagaggctggacctgagcaagatgggcatcaccaccttccccaagtgcatcctgcggctgagtgacatggatgagctggacctgagcaggaacctgatcaggaagatcccagacagcatcagcaagttccagaacctgcgctggctggacctgcacagcaactacatcgacaagctgcctgagagcatcggccagatgaccagcctgctgtacctgaatgtgagcaacaaccggctgaccagcaatggcctgcctgtggagctgaagcagctgaagaacatccgggctgtgaacctgggcctgaaccacctggacagcgtgcccaccaccctgggcgccctgaaggagctgcacgaggtgggcctgcatgacaacctgctgaacaacatccctgtgtccatcagcaagctgcccaagctgaagaagctgaacatcaagaggaaccccttccccaagccaggagagagcgagatcttcatcgacagcatccggcggctggagaacctgtatgtggtggaggagaaggacctgtgtgccgcctgcctgaggaagtgccagaatgcccgggacaacctgaaccgcatcaagaacatggccaccaccacccccaggaagaccatcttccccaacctgatcagccccaacagcatggccaaggacagctgggaggactggaggtag

SEQ ID NO: 18723 - DNA, 645 bp, synthetic construct
  source 1..645: mol_type = other DNA; note = Synthetic coding sequence
atgggcagaagacctgcccgctgctaccgctactgcaagaacaagccctaccccaagagccgcttctgccggggcgtgcctgatgccaagatccgcatctttgacctgggcaggaagaaggccaaggtggatgagttccccctgggcggccacatggtgtctgatgaatatgagcagctgagcagcgaggccctggaggccgcccgcatctgtgccaacaagtacatggtgaagagctgtggcagagatggcttccacatgagggtgcggctgcaccccttccacgtgatccgcatcaacaagatgctgagctgtgccggggctgaccggctgcagacaggcatgagaggagccttcggcaagccccagggcaccgtggcccgggtgcacatcggccaggtgatcatgagcatccgcaccaagctgcagaatgaggagcacgtgattgaggccctgcggcgggccaagttcaagtttcctggccggcagaagatccacatcagcaagaagtggggcttcaccaagttcaatgctgatgaatttgaggacatggtggccaagaagtgcctgatcccagatggctgcggcgtgaagtatgtgcccagccacggccccctggacaagtggagggtgctgcacagctag

SEQ ID NO: 18724 - DNA, 3231 bp, synthetic construct
  source 1..3231: mol_type = other DNA; note = Synthetic coding sequence
atgaagagccgcttcagcaccatcgacctgcgggctgtgctggccgagctgaatgccagcctgctgggcatgagggtgaacaacgtgtatgatgtggacaacaagacctacctgatccggctgcagaagccagacttcaaggccaccctgctgctggagagcggcatccgcatccacaccacagaatttgagtggcccaagaacatgatgcccagcagctttgccatgaagtgcaggaagcacctgaagagccggcggctggtgtctgccaagcagctgggcgtggaccgcatcgtggacttccagtttggaagtgatgaggccgcctaccacctgatcatcgagctgtatgaccggggcaacatcgtgctgacagattatgaatatgtgatcctgaacatcctgcgcttcagaacagatgaagcagatgatgtgaagtttgctgtgcgggagcgctaccccctggaccacgcccgggctgctgagcccctgctgaccctggagcggctgacagaaattgtggccagcgcccccaagggggagctgctgaagagggtgctgaaccccctgctgccctacggccctgccctgattgagcactgcctgctggagaatggcttctctggaaatgtgaaggtggatgagaagctggagaccaaggacatcgagaaggtgctggtgtccctgcagaaggccgaggactacatgaagaccaccagcaacttcagcggcaagggctacatcatccagaagcgggagatcaagcccagcctggaggccgacaagcctgtggaggacatcctgacctatgaggagttccaccccttcctgttcagccagcacagccagtgcccctacattgaatttgagagctttgacaaggctgtggatgagttctacagcaagattgagggccagaagattgacctgaaggccctgcagcaggagaagcaggccctgaagaagctggacaacgtgaggaaggaccatgaaaatcggctggaggccctgcagcaggcccaggagattgacaagctgaagggggagctgattgagatgaacctgcagatcgtggaccgggccatccaggtggtgcgcagcgccctggccaaccagattgactggacagagatcggcctgattgtgaaggaggcccaggcccagggcgaccctgtggccagcgccatcaaggagctgaagctgcagaccaaccacgtgaccatgctgctgaggaacccctacctgctgtctgaggaggaggatgatgatgtggatggagatgtgaatgtggagaagaatgaaacagagccccccaagggcaagaagaagaagcagaagaacaagcagctgcagaagccccagaagaacaagcccctgctggtggatgtggacctgagcctgagcgcctatgccaatgccaagaagtactatgaccacaagagatatgctgccaagaagacccagaagacagtggaggccgctgagaaggccttcaagtctgctgagaagaagaccaagcagaccctgaaggaggtgcagacagtgaccagcatccagaaggccaggaaggtgtactggtttgagaagttcctgtggttcatcagcagcgagaactacctgatcatcggcggccgggaccagcagcagaatgagatcatcgtgaagcgctacctgacccctggggacatctacgtgcatgctgacctgcacggggccaccagctgtgtgatcaagaaccccactggagagcccatcccccccaggaccctgacagaagctggcaccatggccctgtgctacagcgctgcctgggatgcccgggtcatcaccagcgcctggtgggtgtaccaccaccaggtgtccaagacagcccccaccggggagtacctgaccaccggcagcttcatgatccggggcaagaagaacttcctgcccccatcctacctgatgatgggcttctccttcctgttcaaggtggatgagagctgtgtgtggaggcaccagggcgagaggaaggtgcgggtgcaggatgaggacatggagaccctggccagctgcaccagcgagctgatcagcgaggagatggagcagctggatggaggagacaccagcagtgatgaggacaaggaggagcacgagacccctgtggaggtggagctgatgacccaggtggaccaggaggacatcaccctgcagagcggcagagatgagctgaatgaggagctgatccaggaggagagcagtgaagatgaaggagaatatgaggaggtgaggaaggaccaggacagcgtgggggagatgaaggatgaaggagaggagaccctgaactacccagacaccaccatcgacctgagccacctgcagccccagaggagcatccagaagctggccagcaaggaggagagcagcaacagcagtgacagcaagagccagagcagaagacacctgagcgccaaggagcggcgggagatgaagaagaagaagctgcccagcgacagcggggacctggaggccctggagggcaaggacaaggagaaggagagcacagtgcacatcgagacccaccagaacaccagcaagaatgtggccgctgtgcagcccatgaagaggggccagaagagcaagatgaagaagatgaaggagaagtacaaggaccaggatgaagaagatcgggagctgatcatgaagctgctgggcagcgctggcagcaacaaggaggagaagggcaagaagggcaagaagggcaagaccaaggatgagcctgtgaagaagcagccccagaagccccggggcggccagagggtgtctgacaacatcaagaaggagacccccttcctggaggtgatcacccatgagctgcaggactttgctgtggatgacccccatgatgacaaggaggagcaggacctggaccagcagggcaatgaggagaacctgtttgacagcctgaccggccagccccacccagaagatgtgctgctgtttgccatccccatctgtgccccctacaccaccatgaccaactacaagtacaaggtgaagctgaccccaggagtgcagaagaagggcaaggccgccaagacagccctgaacagcttcatgcacagcaaggaggccacagcccgggagaaggacctcttccgctctgtgaaggacacagacctgagcaggaacatccctgggaaggtgaaggtgtctgcccccaacctgctgaatgtgaagaggaagtag

SEQ ID NO: 18725 - DNA, 963 bp, synthetic construct
  source 1..963: mol_type = other DNA; note = Synthetic coding sequence
atgggagacatcccagctgtgggcctgagctcctggaaggccagccctgggaaggtgacagaggccgtgaaggaggccattgatgctggctaccgccactttgactgtgcctacttctaccacaatgaaagagaggtgggcgccggcatccgctgcaagatcaaggagggcgctgtgcggcgggaggacctcttcatcgccaccaagctgtggtgcacctgccacaagaagagcctggtggagacagcctgcaggaagagcctgaaggccctgaagctgaactacctggacctgtacctgatccactggcccatgggcttcaagccaccccaccctgagtggatcatgagctgcagcgagctgtccttctgcctgagccacccccgggtgcaggacctgcccctggatgagagcaacatggtgatccccagcgacacagacttcctggacacctgggaggccatggaggacctggtgatcaccggcctggtgaagaacattggagtgagcaacttcaaccacgagcagctggagcggctgctgaacaagccaggcctgcgcttcaagcccctgaccaaccagatcgagtgccacccctacctgacccagaagaacctgatctccttctgccagagcagagatgtgtctgtgacagcctaccggcccctgggcggcagctgtgaaggagtggacctgattgacaaccctgtgatcaagagaattgccaaggagcacggcaagagccctgcccagatcctgatccgcttccagatccagagaaatgtgattgtcatccctggcagcatcacccccagccacatcaaggagaacatccaggtgtttgattttgagctgacccagcacgacatggacaacatcctgagcctgaacagaaacctgcggctggccatgttccccatcaccaagaaccacaaggactaccccttccacatcgagtactag

SEQ ID NO: 18726 - DNA, 1239 bp, synthetic construct
  source 1..1239: mol_type = other DNA; note = Synthetic coding sequence
atgagcggctaccagaggaggcctggggccacccccctgagccgggcccggagcctggccatcccagatgccccagccttctatgaaagaagaagctgcctgccccagctgaactgtgagcggccccacggccgggacctggacagccccttcttcggcatccggcctgccttcatgtgctacgtgcccagccctgtgctggcctctgtgggggacacagatgacagatttgaggacctggaggaggccaaccccttctccttccgggagttcctgaagaccaagaacctgggcctgagcaaggaggaccctgccagccgcatctatgccaaggaggccagccgccacagcctgggcctggaccacaacagcccccccagccagacaggaggctacggcctggagtaccagcagcccttctttgaggaccccactggagctggggacctgctggatgaggaggaggatgaggacaccggctggagcggggcctacctgcccagcgccatcgagcagacccaccctgagcgggtgcctgctggcaccagcccctgcagcacctacctgtccttcttcagcacccccagcgagctggccggccctgagagcctgcccagctgggccctgagtgacacagacagccgggtgtccccagccagccctgctggcagccccagcgctgactttgctgtgcacggggagagcctgggggacagacacctgcggaccctgcagatctcctatgatgccctgaaggatgagaacagcaagctgcggaggaagctgaatgaggtgcagagcttcagcgaggcccagacagagatggtgaggaccctggagaggaagctggaggccaagatgatcaaggaggagagtgactaccatgacctggagagcgtggtgcagcaggtggagcagaacctggagctgatgaccaagagagctgtgaaggcagaaaatcatgtggtgaagctgaagcaggagatcagcctgctgcaggcccaggtgagcaacttccagcgggagaatgaggccctgcgctgtggccagggcgccagcctgactgtggtgaagcagaatgctgatgtggccctgcagaacctgcgggtggtgatgaacagcgcccaggccagcatcaagcagctggtgtctggagctgagaccctgaacctggtggccgagatcctgaagagcattgaccgcatcagcgaggtgaaggatgaggaggaggacagctag

SEQ ID NO: 18727 - DNA, 1440 bp, synthetic construct
  source 1..1440: mol_type = other DNA; note = Synthetic coding sequence
atggatgccaccatcgccccccaccgcatccccccagagatgccccagtatggagaggagaaccacatctttgagctgatgcagaacatgctggagcagctgctgatccaccagcctgaggaccccatccccttcatgatccagcacctgcaccgggacaatgacaacgtgccccgcatcgtcatcctgggccccccagccagcggcaagaccaccatcgccatgtggctgtgcaagcacctgaacagcagcctgctgaccctggagaacctgatcctgaatgagttctcctacacagccacagaggcccggcggctgtacctgcagaggaagacagtgcccagcgccctgctggtgcagctgatccaggagcggctggccgaggaggactgcatcaagcagggctggatcctggatggcatccctgagacccgggagcaggccctgcgcatccagaccctgggcatcacccccaggcatgtgattgtgctgagcgccccagacacagtgctgattgaaagaaacctgggcaagagaattgacccccagacaggagagatctaccacaccacctttgactggcccccagagagcgagatccagaaccggctgatggtgcctgaggacatcagcgagctggagacagcccagaagctgctggagtaccacaggaacatcgtgcgggtcatccccagctaccccaagatcctgaaggtgatctctgctgaccagccctgtgtggatgtgttctaccaggccctgacctacgtgcagagcaaccacaggaccaatgcccccttcaccccccgggtgctgctgctgggccctgtgggcagcggcaagagcctgcaggccgccctgctggcccagaagtaccgcctggtgaatgtgtgctgcggccagctgctgaaggaggccgtggccgacaggaccacctttggagagctgatccagcccttctttgagaaggagatggctgtgcctgacagcctgctgatgaaggtgctgagccagaggctggaccagcaggactgcatccagaagggctgggtgctgcatggagtgccccgggacctggaccaggcccacctgctgaaccggctgggctacaaccccaacagagtcttcttcctgaatgtgccctttgacagcatcatggagcggctgaccctgcggagaattgatcctgtgactggagagcgctaccacctgatgtacaagcccccacccaccatggagatccaggcccggctgctgcagaaccccaaggatgctgaggagcaggtgaagctgaagatggacctcttctacagaaacagcgctgacctggagcagctgtatggcagcgccatcaccctgaatggagaccaggacccctacacagtgtttgagtacatcgagagcggcatcatcaaccccctgcccaagaagatcccctag

SEQ ID NO: 18728 - DNA, 432 bp, synthetic construct
  source 1..432: mol_type = other DNA; note = Synthetic coding sequence
atggcccacgagatgattggcacccagatcgtgacagagcggctggtggccctgctggagagcggcacagagaaggtgctgctgattgacagccggccctttgtggagtacaacaccagccacatcctggaggccatcaacatcaactgcagcaagctgatgaagaggcggctgcagcaggacaaggtgctgatcacagagctgatccagcacagcgccaagcacaaggtggacatcgactgcagccagaaggtggtggtgtatgaccagagcagccaggatgtggccagcctgagcagtgactgcttcctgactgtgctgctgggcaagctggagaagagcttcaacagcgtgcacctgctggccggggctgatgctgctgagtgggactggctgtgtgtgaagtgccagcagtacctgagcaaggcctag

SEQ ID NO: 18729 - DNA, 1191 bp, synthetic construct
  source 1..1191: mol_type = other DNA; note = Synthetic coding sequence
atggccagcctgagccgggccctgcgggtggccgccgcccacccccggcagagccccacccggggcatgggcccctgcaacctgagcagcgctgctggccccacagctgagaagtctgtgccctaccagaggaccctgaaggagggccagggcacctctgtggtggcccagggccccagccggcccctgcccagcacagccaacgtggtggtgattggaggcggcagcctgggctgccagaccctgtaccacctggccaagctgggcatgtctggagctgtgctgctggagcgggagcggctgaccagcggcaccacctggcacacagctggcctgctgtggcagctgcggcccagtgatgtggaggtggagctgctggcccacacccggcgggtggtgtcccgggagctggaggaggagaccggcctgcacacaggctggatccagaatggaggcctcttcatcgccagcaaccggcagaggctggatgagtacaagaggctgatgagcctgggcaaggcctatggagtggagagccacgtgctgagccctgctgagaccaagaccctgtaccccctgatgaatgtggatgacctgtatggcaccctgtatgtgccccatgatggcaccatggaccctgctggcacctgcaccaccctggcccgggccgccagcgcccggggggcccaggtgattgagaactgccctgtgacaggcatccgggtgtggacagatgactttggagtgcggcgggtggccggcgtggagacccagcacggcagcatccagaccccctgtgtggtgaactgtgccggcgtgtgggccagcgctgtgggccgcatggccggcgtgaaggtgcccctggtggccatgcaccacgcctacgtggtgacagaaagaattgagggcatccagagcttcaccctgctgcccaccctggagtacagcggcaccgtgtctgcccactgcaacctgcggctgcccggcagcagcaacagccgggccagcgccagccacgtggccggcatcaagtgtgcccggcaccacaccaggctcatcttcttctgcatcctggtggagacagagttccaccacgtggccaaggccggcctggagctgctgagcagcggcaacccccccatcagtgacttccagagcgcccgcatcaccggggtgagccaccacgcctag

SEQ ID NO: 18730 - DNA, 4416 bp, synthetic construct
  source 1..4416: mol_type = other DNA; note = Synthetic coding sequence
atggagcctgagcctgtggaggactgtgtgcagagcaccctggccgccctgtaccccccatttgaggccacagcccccaccctgctgggccaggtgttccaggtggtggagaggacctaccgggaggatgccctgcgctacaccctggacttcctggtgcctgccaagcacctgctggccaaggtgcagcaggaggcctgtgcccagtacagcggcttcctgttcttccacgagggctggcccctgtgcctgcacgagcaggtggtggtgcagctggccgccctgccctggcagctgctgcggcctggggacttctacctgcaggtggtgcccagcgctgcccaggccccccggctggccctgaagtgcctggcccctgggggcggccgggtgcaggaggtgcctgtgcccaatgaggcctgtgcctacctgttcaccccagagtggctgcagggcatcaacaaggaccggcccaccggccgcctgagcacctgcctgctgagcgcccccagcggcatccagaggctgccctgggccgagctgatctgccccaggtttgtgcacaaggagggcctgatggtgggccaccagcccagcaccctgcccccagagctgcccagcggccccccaggcctgcccagcccccccctgcctgaggaggccctgggcaccaggagccctggagatggccacaatgcccctgtggagggccctgagggggagtatgtggagctgctggaggtgaccctgcctgtgcggggcagccccacagatgctgagggcagccctggcctgagccgggtgaggacagtgcccaccaggaaaggagctgggggcaagggccgccaccggcggcaccgggcctggatgcaccagaagggcctgggcccccggggccaggatggagcccggcccccaggagagggcagcagcactggagccagccctgagagccccccaggagctgaggccgtgcctgaggccgctgtgctggaggtgtctgagcccccagctgaggccgtgggggaggccagcggcagctgccccctgcggcctggagagctgcggggcggcggcggcggcggccagggcgctgagggccccccaggcaccccaagaagaactggaaaaggaaacagaaggaagaagagagctgctggccgcggggccctgagccggggcggggacagcgcccccctgagccctggggacaaggaggatgccagccaccaggaggccctgggcaacctgcccagccccagcgagcacaagctgcctgagtgccacctggtgaaggaggagtatgagggcagcggcaagccagagagcgagcccaaggagctgaagacagctggggagaaggagccccagctgtctgaggcctgtggccccacagaggagggcgctggggagcgggagctggagggccctggcctgctgtgcatggccggccacacaggccctgagggccccctgagtgacacccccaccccacccctggagaccgtgcaggagggcaaaggagacaacatccctgaggaggccctggccgtgtctgtgtctgaccacccagatgtggcctgggacctgatggccagcggcttcctgatcctgactggaggagtggaccagagcggccgggccctgctgaccatcaccccaccctgccccccagaggagcccccacccagccgggacaccctgaacaccaccctgcactacctgcacagcctgctgcggccagacctgcagaccctgggcctgtctgtgctgctggacctgcggcaggccccacccctgcccccagccctgatcccagccctgagccagctgcaggacagcggggacccccccctggtgcagaggctgctgatcctgattcatgatgacctgcccacagagctgtgtggcttccagggcgctgaggtgctgtctgaaaatgacctgaagagggtggccaagccagaggagctgcagtgggagctgggcggccaccgggaccccagccccagccactgggtggagatccaccaggaggtggtgcggctgtgccgcctgtgccagggcgtgctgggctctgtgcggcaggccatcgaggagctggagggcgctgctgagcctgaggaggaggaggccgtgggcatgcccaagcccctgcagaaggtgctggccgacccccggctgacagccctgcagagagatggaggagccatcctgatgaggctgcggagcacccccagcagcaagctggagggccagggccctgccaccctgtaccaggaggtggatgaggccatccaccagctggtgcggctgagcaacctgcacgtgcagcagcaggagcagaggcagtgcctgcggcggctgcagcaggtgctgcagtggctgagcggccctggagaggagcagctggccagctttgccatgcctggggacaccctgagcgccctgcaggagacagagctgcgcttccgggccttctctgctgaggtgcaggagcggctggcccaggcccgggaggccctggccctggaggagaatgccaccagccagaaggtgctggacatctttgagcagaggctggagcaggtggagagcggcctgcaccgggccctgcggctgcagcgcttcttccagcaggcccacgagtgggtggatgagggctttgcccggctggccggggccggccctggccgggaggccgtgctggccgccctggccctgcggcgggcccctgagcccagcgctggcaccttccaggagatgagggccctggccctggacctgggcagccctgctgccctgcgggagtggggccgctgccaggcccgctgccaggagctggagcggcgcatccagcagcacgtgggggaggaggccagcccccggggctacagaagaagaagagcagatggagccagcagtggaggagcccagtggggccccaggagccccagccccagcctgagcagcctgctgctgcccagcagccctggccccaggcctgcccccagccactgcagcctggccccctgtggggaggactatgaggaggagggccctgagctggcccctgaggccgagggccggccccccagggctgtgctgatccggggcctggaggtgaccagcacagaggtggtggacaggacctgcagcccccgggagcacgtgctgctgggccgggcccggggcccagatggcccctggggcgtgggcacccccaggatggagaggaagaggagcatcagcgcccagcagaggctggtgtctgagctgattgcctgtgagcaggactatgtggccaccctgtctgagcctgtgcccccacctggccctgagctgaccccagagctgcggggcacctgggccgccgccctgagcgcccgggagcggctgcgctccttccacaggacccacttcctgcgggagctgcagggctgtgccacccaccccctgagaattggagcctgcttcctgcggcacggggaccagttcagcctgtatgcccagtatgtgaagcaccgccacaagctggagaatggcctggccgccctgagccccctgagcaagggctccatggaggccggcccctacctgccccgggccctgcagcagcccctggagcagctgaccaggtatggccgcctgctggaggagctgctgcgggaggccggccctgagctgagcagcgagtgccgggccctgggcgctgctgtgcagctgctgcgggagcaggaggcccggggccgggacctgctggccgtggaggccgtgcggggctgtgaaattgacctgaaggagcagggccagctgctgcaccgggaccccttcaccgtcatctgtggcaggaagaagtgcctgcggcacgtgttcctgtttgagcacctgctgctcttcagcaagctgaagggccctgagggcggcagcgagatgtttgtgtacaagcaggccttcaagacagctgacatgggcctgacagagaacatcggggacagcggcctgtgctttgagctgtggttcagaagaagaagagcccgggaggcctacaccctgcaggccaccagccctgagatcaagctgaagtggaccagcagcatcgcccagctgctgtggaggcaggccgcccacaacaaggagctgcgggtgcagcagatggtgtccatgggcatcggcaacaagcccttcctggacatcaaggccctgggggagaggaccctgagcgccctgctgaccggccgggcccctgagaccctggacagcagtggagatgtgtccccaggccccaggaacagccccagcctgcagcccccccaccctggcagcagcacccccaccctggccagccggggcatcctgggcctgagccggcagagccacgcccgggccctgagtgaccccaccacccccctgtag

SEQ ID NO: 18731 - DNA, 4560 bp, synthetic construct
  source 1..4560: mol_type = other DNA; note = Synthetic coding sequence
atggagcctgagcctgtggaggactgtgtgcagagcaccctggccgccctgtaccccccatttgaggccacagcccccaccctgctgggccaggtgttccaggtggtggagaggacctaccgggaggatgccctgcgctacaccctggacttcctggtgcctgccaagcacctgctggccaaggtgcagcaggaggcctgtgcccagtacagcggcttcctgttcttccacgagggctggcccctgtgcctgcacgagcaggtggtggtgcagctggccgccctgccctggcagctgctgcggcctggggacttctacctgcaggtggtgcccagcgctgcccaggccccccggctggccctgaagtgcctggcccctgggggcggccgggtgcaggaggtgcctgtgcccaatgaggcctgtgcctacctgttcaccccagagtggctgcagggcatcaacaaggaccggcccaccggccgcctgagcacctgcctgctgagcgcccccagcggcatccagaggctgccctgggccgagctgatctgccccaggtttgtgcacaaggagggcctgatggtgggccaccagcccagcaccctgcccccagagctgcccagcggccccccaggcctgcccagcccccccctgcctgaggaggccctgggcaccaggagccctggagatggccacaatgcccctgtggagggccctgagggggagtatgtggagctgctggaggtgaccctgcctgtgcggggcagccccacagatgctgagggcagccctggcctgagccgggtgaggacagtgcccaccaggaaaggagctgggggcaagggccgccaccggcggcaccgggcctggatgcaccagaagggcctgggcccccggggccaggatggagcccggcccccaggagagggcagcagcactggagccagccctgagagccccccaggagctgaggccgtgcctgaggccgctgtgctggaggtgtctgagcccccagctgaggccgtgggggaggccagcggcagctgccccctgcggcctggagagctgcggggcggcggcggcggcggccagggcgctgagggccccccaggcaccccaagaagaactggaaaaggaaacagaaggaagaagagagctgctggccgcggggccctgagccggggcggggacagcgcccccctgagccctggggacaaggaggatgccagccaccaggaggccctgggcaacctgcccagccccagcgagcacaagctgcctgagtgccacctggtgaaggaggagtatgagggcagcggcaagccagagagcgagcccaaggagctgaagacagctggggagaaggagccccagctgtctgaggcctgtggccccacagaggagggcgctggggagcgggagctggagggccctggcctgctgtgcatggccggccacacaggccctgagggccccctgagtgacacccccaccccacccctggagaccgtgcaggagggcaaaggagacaacatccctgaggaggccctggccgtgtctgtgtctgaccacccagatgtggcctgggacctgatggccagcggcttcctgatcctgactggaggagtggaccagagcggccgggccctgctgaccatcaccccaccctgccccccagaggagcccccacccagccgggacaccctgaacaccaccctgcactacctgcacagcctgctgcggccagacctgcagaccctgggcctgtctgtgctgctggacctgcggcaggccccacccctgcccccagccctgatcccagccctgagccagctgcaggacagcggggacccccccctggtgcagaggctgctgatcctgattcatgatgacctgcccacagagctgtgtggcttccagggcgctgaggtgctgtctgaaaatgacctgaagagggtggccaagccagaggagctgcagtgggagctgggcggccaccgggaccccagccccagccactgggtggagatccaccaggaggtggtgcggctgtgccgcctgtgccagggcgtgctgggctctgtgcggcaggccatcgaggagctggagggcgctgctgagcctgaggaggaggaggccgtgggcatgcccaagcccctgcagaaggtgctggccgacccccggctgacagccctgcagagagatggaggagccatcctgatgaggctgcggagcacccccagcagcaagctggagggccagggccctgccaccctgtaccaggaggtggatgaggccatccaccagctggtgcggctgagcaacctgcacgtgcagcagcaggagcagaggcagtgcctgcggcggctgcagcaggtgctgcagtggctgagcggccctggagaggagcagctggccagctttgccatgcctggggacaccctgagcgccctgcaggagacagagctgcgcttccgggccttctctgctgaggtgcaggagcggctggcccaggcccgggaggccctggccctggaggagaatgccaccagccagaaggtgctggacatctttgagcagaggctggagcaggtggagagcggcctgcaccgggccctgcggctgcagcgcttcttccagcaggcccacgagtgggtggatgagggctttgcccggctggccggggccggccctggccgggaggccgtgctggccgccctggccctgcggcgggcccctgagcccagcgctggcaccttccaggagatgagggccctggccctggacctgggcagccctgctgccctgcgggagtggggccgctgccaggcccgctgccaggagctggagcggcgcatccagcagcacgtgggggaggaggccagcccccggggctacagaagaagaagagcagatggagccagcagtggaggagcccagtggggccccaggagccccagccccagcctgagcagcctgctgctgcccagcagccctggccccaggcctgcccccagccactgcagcctggccccctgtggggaggactatgaggaggagggccctgagctggcccctgaggccgagggccggccccccagggctgtgctgatccggggcctggaggtgaccagcacagaggtggtggacaggacctgcagcccccgggagcacgtgctgctgggccgggcccggggcccagatggcccctggggcgtgggcacccccaggatggagaggaagaggagcatcagcgcccagcagaggctggtgtctgagctgattgcctgtgagcaggactatgtggccaccctgtctgagcctgtgcccccacctggccctgagctgaccccagagctgcggggcacctgggccgccgccctgagcgcccgggagcggctgcgctccttccacaggacccacttcctgcgggagctgcagggctgtgccacccaccccctgagaattggagcctgcttcctgcggcacggggaccagttcagcctgtatgcccagtatgtgaagcaccgccacaagctggagaatggcctggccgccctgagccccctgagcaagggctccatggaggccggcccctacctgccccgggccctgcagcagcccctggagcagctgaccaggtatggccgcctgctggaggagctgctgcgggaggccggccctgagctgagcagcgagtgccgggccctgggcgctgctgtgcagctgctgcgggagcaggaggcccggggccgggacctgctggccgtggaggccgtgcggggctgtgaaattgacctgaaggagcagggccagctgctgcaccgggaccccttcaccgtcatctgtggcaggaagaagtgcctgcggcacgtgttcctgtttgagcacctgctgctcttcagcaagctgaagggccctgagggcggcagcgagatgtttgtgtacaagcaggccttcaagacagctgacatgggcctgacagagaacatcggggacagcggcctgtgctttgagctgtggttcagaagaagaagagcccgggaggcctacaccctgcaggccaccagccctgagatcaagctgaagtggaccagcagcatcgcccagctgctgtggaggcaggccgcccacaacaaggagctgcgggtgcagcagatggtgtccatgggcatcggcaacaagcccttcctggacatcaaggccctgggggagaggaccctgagcgccctgctgaccggccgggccgcccggacccgggcctctgtggccgtgagcagctttgaacatgctggccccagcctgcccggcctgagccctggggcctgcagcctgcctgcccgggtggaggaggaggcctgggacctggatgtgaagcagatcagcctggcccctgagaccctggacagcagtggagatgtgtccccaggccccaggaacagccccagcctgcagcccccccaccctggcagcagcacccccaccctggccagccggggcatcctgggcctgagccggcagagccacgcccgggccctgagtgaccccaccacccccctgtag

SEQ ID NO: 18732 - DNA, 2709 bp, synthetic construct
  source 1..2709: mol_type = other DNA; note = Synthetic coding sequence
atgtttcctgccctggagacccacctgaagcagaccatcccagacccctatgaggacttcatgtaccgccacctgcagtactacggctacttcaaggcccagaggggcagcctgcccaacagcgccacccaccagcacgtgaggaagaacaacccccagtgcctgctgaatggcagcctgggggagaaggatgacctgatcccagacaccctgcagaaggagaagctgctgtggcccatcagcctgagcagcgctgtgcaccggcagatcgaggccatcaacagagacttccacagctgcctgggctggatgcagtggaggggcctgagcagcctgcagcccccaccaccccgcttcaaggacagccctgccagcgccttccgggtggccggcatcacagacagccacatgctgagcctgccccacctgcggagccggcagctgctgtatgatgagctggatgaggtgaacccccggctgcgggagccccaggagctgttcagcatcctgagcaccaagaggcccctgcaggccccccgctggcccattgaatgtgaggtgatcaaggagaacatccaccacatcgagtgggccccaccccagcctgagtacttctaccagcccaagggaaatgagaaggtgcctgagatcgtgggggagaagaagggcaccgtggtgtaccagctggacagcgtgcccatcgagggcagctacttcaccagcagccgggtgggcggcaagaggggcatcgtgaaggagctggccgtgaccctgcagggccctgaggacaacaccctgctgtttgagagcagatttgagagcggcaacctgcagaaggctgtgcgggtggacacctatgaatatgagctgaccctgaggacagacctgtacaccaacaagcacacccagtggttctacttccgggtgcagaacaccaggaaggatgccacctaccgcttcaccatcgtgaacctgctgaagcccaagagcctgtacacagtgggcatgaagcccctgctgtacagccagctggatgccaacaccagaaatattggctggaggcgggagggcaatgagatcaagtactacaagaacaacacagatgatggccagcagcccttctactgcctgacctggaccatccagttcccctatgaccaggacacctgcttctttgcccacttctacccctacacctacacagacctgcagtgctacctgctgtctgtggccaacaaccccatccagagccagttctgcaagctgcagaccctgtgccgcagcctggccggcaacacagtgtacctgctgaccatcaccaaccccagccagaccccccaggaggccgccgccaagaaggctgtggtgctgagcgcccgggtgcaccctggagagagcaatggctcctgggtgatgaagggcttcctggacttcatcctgagcaacagcccagatgcccagctgctgcgggacatctttgtgttcaaggtgctgcccatgctgaacccagatggagtgattgtgggcaactaccgctgcagcctggccggccgggacctgaacagacactacaagaccatcctgaaggagagcttcccctgcatctggtacaccaggaacatgatcaagaggctgctggaggagcgggaggtgctgctgtactgtgacttccacggccacagcaggaagaacaacatcttcctgtatggctgcaacaacaacaacaggaagtactggctgcacgagagggtcttccccctgatgctgtgcaagaatgccccagacaagttctccttccacagctgcaacttcaaggtgcagaagtgcaaggagggcaccggccgggtggtgatgtggaggatgggcatcctgaacagctacaccatggagagcacctttggaggcagcaccctgggcaacaagagggacacccacttcaccatcgaggacctgaagagcctgggctaccacgtgtgtgacaccctgctggacttctgtgaccctgaccagatgaagttcacccagtgcctggccgagctgaaggagctgctgcggcaggagatccacaagaagttccacgagctgggccaggatgtggacctggagggctcctggagcgacatcagcctgagtgacatcgagagcagcaccagcggcagtgacagcagcctgagtgatggcctgcctgtgcacctggccaacattgctgatgagctgacccagaagaagaagatgttcaagaagaagaagaagaagagcctgcagaccaggaagcagagaaatgagcagtaccagaagaagaacctgatgcagaagctgaagctgacagaggacaccagcgagaaggccggctttgccagcaccctgcagaagcagcccaccttcttcaagaacagcgagaacagcagcttcctgcccatgaagaatgaaaacccccggctgaatgagaccaacctgaacagaagagacaaggacacccccctggaccccagcatggccaccctcatcctgcccaagaacaagggccgcatgcagaacaagaagccaggcttcaccgtgtcctgcagccccaagaggaccatcaacagcagccaggagcccgcccctggcatgaagcccaactggcccaggagccgctacccagccaccaagaggggctgtgccgccatggccgcctaccccagcctgcacatctacacctacccctag

SEQ ID NO: 18733 - DNA, 3234 bp, synthetic construct
  source 1..3234: mol_type = other DNA; note = Synthetic coding sequence
atggaggtgcaggtgtcccaggccagcctgggctttgagctgacctctgtggagaagagcctgcgggagtggagccggctgagccgggaggtgattgcctggctgtgccccagcagccccaacttcatcctgaacttccccccacctccttctgccagctctgtgtccatggtgcagctgttcagcagccccttcggctaccagagccccagcggccacagcgaggaggagcgggagggcaacatgaagagcgccaagccccaggtgaaccacagccagcacggggagagccagagggccctgagccccctgcagagcaccctgagcagcgctgccagccccagccaggcctatgagacctacattgaaaatggcctcatctgcctgaagcacaagatccggaacatcgagaagaagaagctgaagctggaggactacaaggaccggctgaagagcggggagcacctgaacccagaccagctggaggccgtggagaagtatgaggaggtgctgcacaacctggagtttgccaaggagctgcagaagaccttcagcggcctgagcctggacctgctgaaggcccagaagaaggcccagaggcgggagcacatgctgaagctggaggccgagaagaagaagctgcggaccatcctgcaggtgcagtatgtgctgcagaacctgacccaggagcacgtgcagaaggacttcaagggcggcctgaatggagctgtgtacctgcccagcaaggagctggactacctgatcaagttcagcaagctgacctgcccagagagaaatgaaagcctgtctgtggaggaccagatggagcagagcagcctgtacttctgggacctgctggagggcagcgagaaggctgtggtgggcaccacctacaagcacctgaaggacctgctgagcaagctgctgaacagcggctactttgagagcatccctgtgcccaagaatgccaaggagaaggaggtgcccctggaggaggagatgctgatccagagcgagaagaagacccagctgagcaagacagaatctgtgaaggagagcgagagcctgatggagtttgcccagcctgagatccagccccaggagttcctgaacagacgctacatgacagaggtggactacagcaacaagcagggcgaggagcagccctgggaggccgactatgccaggaagcccaacctgcccaagcgctgggacatgctgacagagccagatggccaggagaagaagcaggagagcttcaagtcctgggaggccagcggcaagcaccaggaggtgtccaagccagctgtgtccctggagcagaggaagcaggacaccagcaagctgcggagcaccctgcctgaggagcagaagaagcaggagatcagcaagagcaagcccagccccagccagtggaagcaggacacccccaagagcaaggccggctacgtgcaggaggagcagaagaagcaggagacccccaagctgtggcctgtgcagctgcagaaggagcaggaccccaagaagcagacccccaagtcctggacccccagcatgcagagcgagcagaacaccaccaagtcctggaccacccccatgtgtgaggagcaggacagcaagcagcctgagacccccaagtcctgggagaacaacgtggagagccagaagcacagcctgaccagccagagccagatcagccccaagtcctggggcgtggccacagccagcctcatccccaatgaccagctgctgcccaggaagctgaacacagagcccaaggatgtgcccaagcctgtgcaccagcctgtgggcagcagcagcaccctgcccaaggaccctgtgctgaggaaggagaagctgcaggacctgatgacccagatccagggcacctgcaacttcatgcaggagagcgtgctggactttgacaagcccagcagcgccatccccaccagccagcccccatctgccaccccaggcagccctgtggccagcaaggagcagaacctgagcagccagagcgacttcctgcaggagcccctgcaggccaccagcagccctgtgacctgcagcagcaatgcctgcctggtgaccacagaccaggccagcagcggcagcgagacagagttcatgaccagcgagaccccagaggtgttcaacgtgaatgcccccctgccccccaggaaggagcaggagatcaaggagagcccctacagccctggctacaaccagagcttcaccacagccagcacccagaccccaccccagtgccagctgcccagcatccacgtggagcagacagtgcacagccaggagacagccaactaccacccagatggcaccatccaggtgtccaatggcagcctggccttctacccagcccagaccaacgtgttcccccggcccacccagccctttgtgaacagccggggctctgtgcggggctgcacccggggcggccgcctcatcaccaacagctaccgcagccctgggggctacaagggctttgacacctaccggggcctgcccagcatcagcaatggaaactacagccagctgcagttccaggcccgggagtacagcggggccccctacagccagagggacaacttccagcagtgctacaagagaggaggcaccagcggcggcccccgggccaacagcagagctggctggagcgacagcagccaggtgagcagccctgagcgggacaatgagaccttcaacagcggggacagcggccagggcgacagccgctccatgacccctgtggatgtgcctgtgaccaacccagctgccaccatcctgcctgtgcacgtgtaccccctgccccagcagatgagggtggccttctctgctgcccggaccagcaacctggcccctggcaccctggaccagcccatcgtgtttgacctgctgctgaacaacctgggggagacctttgacctgcagctgggccgcttcaactgccctgtgaatggcacctacgtgttcatcttccacatgctgaagctggccgtgaatgtgcccctgtatgtgaacctgatgaagaatgaggaggtgctggtgtctgcctatgccaatgatggagccccagaccatgaaacagccagcaaccacgccatcctgcagctgttccagggcgaccagatctggctgcggctgcacagaggagccatctacggcagctcctggaagtacagcaccttcagcggctacctgctgtaccaggactag

SEQ ID NO: 18734 - DNA, 1056 bp, synthetic construct
  source 1..1056: mol_type = other DNA; note = Synthetic coding sequence
atgaccctgcggctgctggaggactggtgccggggcatggacatgaaccccaggaaggccctgctgattgctggcatcagccagagctgcagcgtggccgagattgaggaggccctgcaggccggcctggcccccctgggggagtaccgcctgctgggccgcatgttcagaagagatgagaacaggaaggtggccctggtgggcctgacagctgagaccagccacgccctggtgcccaaggagatccctggaaaaggaggcatctggagggtcatcttcaagcccccagaccctgacaacaccttcctgagccggctgaatgagttcctggccggggagggcatgacagtgggggagctgagccgggccctgggccatgaaaatggcagcctggaccctgagcagggcatgatccctgagatgtgggcccccatgctggcccaggccctggaggccctgcagcctgccctgcagtgcctgaagtacaagaagctgcgggtcttcagcggccgggagagccctgagcccggggaggaggagtttggccgctggatgttccacaccacccagatgatcaaggcctggcaggtgcctgatgtggagaagagaagaaggctgctggagagcctgcggggccctgccctggatgtgatccgggtgctgaagatcaacaaccccctcatcaccgtggatgagtgcctgcaggccctggaggaggtgtttggagtgacagacaacccccgggagctgcaggtgaagtacctgaccacctaccagaaggatgaggagaagctgagcgcctacgtgctgcggctggagcccctgctgcagaagctggtgcagagaggagccatcgagagagatgctgtgaaccaggcccggctggaccaggtgattgctggagctgtgcacaagaccatccggcgggagctgaacctgcctgaagatggccctgcccctggcttcctgcagctgctggtgctgatcaaggactatgaggccgctgaggaggaggaggccctgctgcaggccatcctggagggcaacttcacctag

SEQ ID NO: 18735 - DNA, 2559 bp, synthetic construct
  source 1..2559: mol_type = other DNA; note = Synthetic coding sequence
atgagcggccgggcccgggtgaaggcccggggcatcgcccggagccccagcgccacagaggtgggccgcatccaggccagccccctgcccaggtctgtggacctgagcaacaatgaggccagcagcagcaatggcttcctgggcaccagccgcatcagcaccaatgacaagtatggcatcagcagtggagatgctggcagcaccttcatggagcggggcgtgaagaacaagcaggacttcatggacctgagcatctgcacccgggagaagctggcccacgtgaggaactgcaagacaggcagcagcggcatccctgtgaagctggtgaccaacctcttcaacctggacttcccccaggactggcagctgtaccagtaccacgtgacctacatcccagacctggccagccggcggctgagaattgccctgctgtacagccacagcgagctgagcaacaaggccaaggcctttgatggagccatcctcttcctgagccagaagctggaggagaaggtgacagagctgagcagcgagacccagagaggagagaccatcaagatgaccatcaccctgaagcgggagctgcccagcagcagccctgtgtgcatccaggtgttcaacatcatcttcaggaagatcctgaagaagctgtccatgtaccagatcggcaggaacttctacaaccccagcgagcccatggagatcccccagcacaagctgagcctgtggccaggctttgccatctctgtgtcctactttgagaggaagctgctcttcagcgcagatgtgtcctacaaggtgctgagaaatgagaccgtgctggagttcatgacagccctgtgccagaggacaggcctgagctgcttcacccagacctgtgagaagcagctgattggcctgattgtgctgacccgctacaacaacagaacctacagcattgatgacatcgactggagcgtgaagcccacccacaccttccagaagagagatggaacagagatcacctacgtggactactacaagcagcagtatgacatcaccgtgtctgacctgaaccagcccatgctggtgtccctgctgaagaagaagagaaatgacaacagcgaggcccagctggcccacctgatccctgagctgtgcttcctgaccggcctgacagaccaggccaccagtgacttccagctgatgaaggctgtggccgagaagacccggctgagccccagcggccggcagcagaggctggcccggctggtggacaacatccagaggaacaccaatgccaggtttgagctggagacctggggcctgcacttcggcagccagatcagcctgaccggccgcatcgtgcccagcgagaagatcctgatgcaggaccacatctgccagcctgtgtctgctgctgactggagcaaggacatccgcacctgcaagatcctgaatgcccagagcctgaacacctggctgatcctgtgcagcgacagaacagaatatgtggccgagagcttcctgaactgcctgcggcgggtggccggctccatgggcttcaacgtggactaccccaagatcatcaaggtgcaggagaacccagctgcctttgtgcgggccatccagcagtatgtggaccctgatgtgcagctggtgatgtgcatcctgcccagcaaccagaagacctactatgacagcatcaagaagtacctgagcagtgactgccctgtgcccagccagtgtgtgctggcccggaccctgaacaagcagggcatgatgatgagcatcgccaccaagatcgccatgcagatgacctgcaagctgggcggggagctgtgggccgtggagatccccctgaagagcctgatggtggtgggcattgatgtgtgcaaggatgccctgagcaaggatgtgatggtggtgggctgtgtggcctctgtgaacccccgcatcacccgctggttcagccgctgcatcctgcagaggaccatgacagatgtggccgactgcctgaaggtgttcatgactggagccctgaacaagtggtacaagtacaaccacgacctgcctgcccgcatcatcgtgtacagagctggggtgggagatggccagctgaagaccctcatcgagtatgaggtgccccagctgctgagctctgtggccgagagcagcagcaacaccagcagccggctgtctgtgattgtggtgaggaagaagtgcatgccccgcttcttcacagagatgaacagaacagtgcagaacccccccctgggcaccgtggtggacagcgaggccaccagaaatgagtggtatgacttctacctgatcagccaggtggcctgccggggcaccgtgagccccacctactacaacgtcatctatgatgacaatggcctgaagccagaccacatgcagaggctgaccttcaagctgtgccacctgtactacaactggccaggcatcgtgtctgtgcctgccccctgccagtatgcccacaagctgaccttcctggtggcccagagcatccacaaggagcccagcctggagctggccaaccacctgttctacctgtag

SEQ ID NO: 18736 - DNA, 2163 bp, synthetic construct
  source 1..2163: mol_type = other DNA; note = Synthetic coding sequence
atgtatggcagcgcccggtctgtgggcaaggtggagcccagcagccagagccctggccgcagcccccggctgcccaggagcccccggctgggccacaggaggaccaacagcactggaggcagcagcggcagctctgtgggcggcggcagcggcaagaccctgtccatggagaacatccagagcctgaatgctgcctatgccaccagcggccccatgtacctgagtgaccatgaaaatgtgggcagcgagacccccaagagcaccatgaccctgggccgcagcggcggccgcctgccctacggcgtgaggatgacagccatgggcagcagccccaacatcgccagcagcggcgtggccagtgacaccatcgcctttggagagcaccacctgccccctgtgtccatggccagcacagtgccccacagcctgcggcaggcccgggacaacaccatcatggacctgcagacccagctgaaggaggtgctgcgggagaatgacctgctgaggaaggatgtggaggtgaaggagagcaagctgagcagctccatgaacagcatcaagaccttctggagccctgagctgaagaaggagcgggccctgaggaaggatgaggccagcaagatcaccatctggaaggagcagtacagagtggtgcaggaggagaaccaggtggatgccctgcggctgcggctggaggagaaggagaccatgctgaacaagaagaccaagcagatccaggacatggccgaggagaagggcacccaggccggggagatccatgacctgaaggacatgctggatgtgaaggagaggaaggtgaatgtgctgcagaagaagattgagaacctgcaggagcagctgcgggacaaggagaagcagatgagcagcctgaaggagcgggtgaagagcctgcaggccgacaccaccaacacagacacagccctgaccaccctggaggaggccctggccgagaaggagaggaccatcgagcggctgaaggagcagagggacagagatgagcgggagaagcaggaggagattgacaactacaagaaggacctgaaggacctgaaggagaaggtgtccctgctgcagggcgacctgtctgagaaggaggccagcctgctggacctgaaggagcacgccagcagcctggccagcagcggcctgaagaaggacagccggctgaagaccctggagatcgccctggagcagaagaaggaggagtgcctgaagatggagagccagctgaagaaggcccatgaagctgccctggaggcccgggccagccctgagatgtctgaccgcatccagcacctggagcgggagatcacccgctacaaggatgagagcagcaaggcccaggccgaggtggaccggctgctggagatcctgaaggaggtggagaatgagaagaatgacaaggacaagaagattgctgagctggagagcctcttcagccggcaggtgaaggaccagaacaagaaggtggccaacctgaagcacaaggagcaggtggagaagaagaagagcgcccagatgctggaggaggcccggcggcgggaggacaacctgaatgacagcagccagcagctgcaggacagcctgaggaagaaggatgacagaattgaggagctggaggaggccctgcgggagagcgtgcagatcacagctgagcgggagatggtgctggcccaggaggagagcgcccggaccaatgctgagaagcaggtggaggagctgctgatggccatggagaaggtgaagcaggagctggagagcatgaaggccaagctgagcagcacccagcagagcctggccgagaaggagacccacctgaccaacctgcgggcagagaggaggaagcacctggaggaggtgctggagatgaagcaggaggccctgctggccgccatcagcgagaaggatgccaacatcgccctgctggagctgagcagcagcaagaagaagacccaggaggaggtggccgccctgaagcgggagaaggaccggctggtgcagcagctgaagcagcagacccagaacaggatgaagctgatggctgacaactatgaagatgaccacttcaagagcagccacagcaaccagaccaaccacaagcccagcccagaccaggatgaggaggagggcatctgggcctag

SEQ ID NO: 18737 - DNA, 1344 bp, synthetic construct
  source 1..1344: mol_type = other DNA; note = Synthetic coding sequence
atggacatgggcaaccagcaccccagcatcagccggctgcaggagatccagaaggaggtgaagtctgtggagcagcaggtgattggcttcagcggcctgagtgatgacaagaactacaagaagctggagcgcatcctgaccaagcagctgtttgaaattgattctgtggacacagagggcaaaggagacatccagcaggccaggaagagagctgcccaggagacagagcggctgctgaaggagctggagcagaatgccaaccacccccaccgcatcgagatccagaacatctttgaggaggcccagagcctggtgcgggagaagatcgtgcccttctacaacggcggcaactgtgtgacagatgaatttgaggagggcatccaggacatcatcctgcggctgacccacgtgaagacaggaggcaagatcagcctgaggaaggcccgctaccacaccctgaccaagatctgtgctgtgcaggagatcatcgaggactgcatgaagaagcagcccagcctgcccctgtctgaagatgcccaccccagcgtggccaagatcaactttgtgatgtgtgaggtgaacaaggcccggggcgtgctgattgccctgctgatgggcgtgaacaacaatgagacctgccgccacctgagctgtgtgctgagcggcctgattgctgacctggatgccctggatgtgtgtggccgcacagagatccggaactaccgccgggaggtggtggaggacatcaacaagctgctgaagtacctggacctggaggaggaggccgacaccaccaaggcctttgacctgcggcagaaccacagcatcctgaagattgagaaggtgctgaagaggatgagggagatcaagaatgagctgctgcaggcccagaaccccagcgagctgtacctgagcagcaagacagagctgcagggcctcatcggccagctggatgaggtgtccctggagaagaacccctgcatccgggaggccaggagaagagctgtgattgaggtgcagaccctcatcacctacatcgacctgaaggaggccctggagaagaggaagctgtttgcctgtgaggagcaccccagccacaaggctgtgtggaatgtgctgggcaacctgtctgagatccagggcgaggtgctgagctttgatggcaacagaacagacaagaactacatccggctggaggagctgctgaccaagcagctgctggccctggatgctgtggacccccagggcgaggagaagtgcaaggccgccaggaagcaggccgtgcggctggcccagaacatcctgagctacctggacctgaagagtgatgagtgggagtactag

SEQ ID NO: 18738 - DNA, 1476 bp, synthetic construct
  source 1..1476: mol_type = other DNA; note = Synthetic coding sequence
atggcccagagcggcggggaggcccggcccggccccaagacagctgtgcagatccgggtggccatccaggaggccgaggatgtggatgagctggaggatgaggaggagggcgctgagaccagaggagctggggaccctgcccgctacctgagccctggctggggcagcgccagcgaggaggagcccagccggggccacagcggcaccacagccagcggaggagaaaatgaaagagaggacctggagcaggagtggaagcccccagatgaggagctgatcaagaagctggtggaccagatcgagttctacttcagtgatgagaacctggagaaggatgccttcctgctgaagcacgtgagaagaaacaagctgggctacgtgtctgtgaagctgctgaccagcttcaagaaggtgaagcacctgacccgggactggaggaccacagcccacgccctgaagtacagcgtggtgctggagctgaatgaagaccacaggaaggtgcggaggaccacccctgtgcccctcttccccaatgaaaacctgcccagcaagatgctgctggtgtatgacctgtacctgagccccaagctgtgggccctggccaccccccagaagaatggccgggtgcaggagaaggtgatggagcacctgctgaagctgtttggcaccttcggggtcatcagctctgtgcgcatcctgaagccaggccgggagctgcccccagacatccgccgcatcagcagccgctacagccaggtgggcacccaggagtgtgccatcgtggagtttgaggaggtggaggccgccatcaaggcccacgagttcatgatcacagagagccagggcaaggagaacatgaaggctgtgctgattggcatgaagccacccaagaagaagccagccaaggacaagaaccatgatgaggagcccacagccagcatccacctgaacaagagcctgaacaagagggtggaggagctgcagtacatgggagatgagagcagcgccaacagcagcagtgaccctgagagcaaccccaccagccccatggccggcagaagacatgctgccaccaacaagctgagccccagcggccaccagaacctcttcctgagccccaatgccagcccctgcaccagcccctggagcagccccctggcccagaggaagggcgtgtccaggaagagccccctggccgaggagggccgcctgaactgcagcaccagccctgagatcttcaggaagtgcatggactacagcagtgacagctctgtgacccccagcggcagcccctgggtgagaagaagacggcaggccgagatgggcacccaggagaagagccctggcaccagccccctgctgagcaggaagatgcagacagcagatggcctgcctgtgggcgtgctgcggctgccccggggccctgacaacacccggggcttccacggccacgagaggagccgggcctgtgtgtag

SEQ ID NO: 18739 - DNA, 315 bp, synthetic construct
  source 1..315: mol_type = other DNA; note = Synthetic coding sequence
atggccggcaaggcccaccggctgtctgctgaggagcgggaccagctgctgcccaacctgcgggctgtgggctggaatgagctggagggcagagatgccatcttcaagcagttccacttcaaggacttcaacagagccttcggcttcatgaccagggtggccctgcaggccgagaagctggaccaccaccctgagtggttcaacgtgtacaacaaggtgcacatcaccctgagcacccatgaatgtgccggcctgtctgagcgggacatcaacctggccagcttcatcgagcaggtggccgtgtccatgacctag

SEQ ID NO: 18740 - DNA, 738 bp, synthetic construct
  source 1..738: mol_type = other DNA; note = Synthetic coding sequence
atgattggagtgtcctttgaggaggccaagagcatcatcaccggggccaagctgagcacccggctggagagcgcctgggagatcgccttcatccggcagaagagtgacaacatccagcctgagaacctgagctgcaccagcctgattgaggccagcggggagtatggcccccaggccagcaccctgagcctcttcagcagccccccagagatcctgatccccaagaccagcagcacccccaagaccaacaatgacatcctgagcagctgtgagatcaagacaggctacaacaagacagtgcagatccccatcaccagcgagaacagcacagtgggcctgagcaacacagatgtggccagcgcctggacagagaactacggcctgcaggagaagatcagcctgaaccccagcgtgcgcttcaaggccgagaagctggagatggccctgaactacctgggcatccagcccaccaaggagcagcaccaggccctgcggcagcaggtgcaggccgacagcaaaggaacagtgtcctttggagactttgtgcaggtggccaggaacctcttctgcctgcagctggatgaggtgaatgtgggcgcccacgagatcagcaacatcctggacagccagctgctgccctgtgacagcagcgaggctgatgagatggagcggctgaagtgtgaaagagatgatgccctgaaggaggtgaacaccctgaagtggccaggccagaactag

SEQ ID NO: 18741 - DNA, 849 bp, synthetic construct
  source 1..849: mol_type = other DNA; note = Synthetic coding sequence
atgggcggcgctgtgtctgctggagaagataatgatgagctgattgacaacctgaaggaggcccagtacatcagaacagagctggtggagcaggccttccgggccatcgacagagctgactactacctggaggagttcaaggaaaatgcctacaaggacctggcctggaagcacggcaacatccacctgagcgccccctgcatctacagcgaggtgatggaggccctggacctgcagcccggcctgtccttcctgaacctgggcagcggcaccggctacctgagctccatggtgggcctcatcctgggcccctttggagtgaaccacggcgtggagctgcacagtgatgtgattgaatatgccaagcagaagctggacttcttcatccgcaccagtgacagctttgacaagtttgacttctgtgagcccagctttgtgactggaaactgcctggagatcagcccagactgcagccagtatgacagagtgtactgtggggccggcgtgcagaaggagcacgaggagtacatgaagaacctgctgaaggtgggcggcatcctggtgatgcccctggaggagaagctgaccaagatcaccaggacaggccccagcgcctgggagaccaagaagatcctggccgtgtcctttgcccccctcatccagccctgccacagcgagagcggcaagagccggctggtgcagctgcggagccccagctttgtgcagggctggagcgtggtggtgctgagccagctgacagctgccagcaccttccaggccgaggccatcctgcccagccagagccccacctggctgaccctgcaggtgctggccaccatgcccaactag

SEQ ID NO: 18742 - DNA, 612 bp, synthetic construct
  source 1..612: mol_type = other DNA; note = Synthetic coding sequence
atggcccggccccggccccgggagtacaaggccggggacctggtgtttgccaagatgaagggctacccccactggccagccagaattgatgagctgcctgagggcgctgtgaagcccccagccaacaagtaccccatcttcttcttcggcacccatgaaacagccttcctgggccccaaggacctcttcccctacaaggagtacaaggacaagtttgggaagagcaacaagaggaagggcttcaatgaaggcctgtgggagattgagaacaaccctggggtgaagttcaccggctaccaggccatccagcagcagagcagcagcgagacagaaggagagggcggcaacacagcagatgccagcagcgaggaggagggggacagagtggaggaggatggcaagggcaagaggaagaatgagaaggccggcagcaagaggaagaagagctacaccagcaagaagagcagcaagcagagcaggaagagccctggagatgaagatgacaaggactgcaaggaggaggagaacaagagcagcagcgagggcggagatgctggaaatgacaccaggaacaccaccagtgacctgcagaagaccagcgagggcacctag

SEQ ID NO: 18743 - DNA, 540 bp, synthetic construct
  source 1..540: mol_type = other DNA; note = Synthetic coding sequence
atgaagacccctgtggagctggccgtgtctggcatgcagaccctgggcctgcagcaccgctgccggggcggctacagagtgaaggcccggaccagctatgtggatgagaccctgtttggcagccctgctggcacccggcccaccccaccagactttgaccccccctgggtggagaaggccaacagaacccggggcgtgggcaaggaggccagcaaggccctgggcgccaagggcagctgtgagaccacccccagccggggcagcacccccaccctgacccccaggaagaagaacaagtaccggcccatcagccacacccccagctactgtgatgagagcctgtttggcagccgctctgagggcgccagctttggagcccccaggatggccaagggagatgctgccaagctgcgggccctgctgtggaccccaccacccaccccccggggcagccacagcccccggccccgggaggcccctcctcctgtgccccccacccagatgggcctgcgcatcagcggcctgccccggcagggctag

SEQ ID NO: 18744 - DNA, 1104 bp, synthetic construct
  source 1..1104: mol_type = other DNA; note = Synthetic coding sequence
atggatggagaggacatcccagacttcagcagcctgaaggaggagacagcctactggaaggagctgagcctgaagtacaagcagagcttccaggaggccagagatgagctggtggagttccaggagggcagccgggagctggaggccgagctggaggcccagctggtgcaggccgagcagaggaacagagacctgcaggccgacaaccagaggctgaagtatgaggtggaggccctgaaggagaagctggagcaccagtatgcccagagctacaagcaggtgtctgtgctggaggatgacctgagccagacccgggccatcaaggagcagctgcacaagtatgtgcgggagctggagcaggccaatgatgacctggagcgggccaagagggccaccatcgtgtccctggaggactttgagcagaggctgaaccaggccattgaaagaaatgccttcctggagagcgagctggatgagaaggagagcctgctggtgtctgtgcagaggctgaaggatgaggcccgggacctgcggcaggagctggccgtgcgggagcggcagcaggaggtgaccaggaagagcgcccccagcagccccaccctggactgtgagaagatggacagcgctgtgcaggccagcctgagcctgcctgccacccctgtgggcaaaggaacagagaacaccttccccagccccaaggccatccccaatggatttggcaccagccccctgaccccatctgcccgcatcagcgccctgaacatcgtgggggacctgctgaggaaggtgggcgccctggagagcaagctggccgcctgcaggaactttgccaaggaccaggccagcaggaagagctacatctctggaaatgtgaactgtggggtgctgaatggaaatggcaccaagttcagccgcagcggccacaccagcttctttgacaagggcagcagcagcagctgtgccatccgggccagcagaagacgcttcagcagcagcagcgctgacctggccggccggggcggcggagatggcagcatcccagcccagcacagcactggagccagcggcaaggcccccccacccaccctgctgctggagacctag

SEQ ID NO: 18745 - DNA, 591 bp, synthetic construct
  source 1..591: mol_type = other DNA; note = Synthetic coding sequence
atgggcagccgcagcagccacgccgctgtgatcccagatggagacagcatccggcgggagaccggcttcagccaggccagcctgctgcggctgcaccaccgcttccgggccctggacaggaacaagaagggctacctgagcaggatggacctgcagcagatcggggccctggccgtgaaccccctgggggaccgcatcatcgagagcttcttcccagatggcagccagagggtggacttccctggctttgtgcgggtgctggcccacttccggcctgtggaggatgaggacacagagacccaggaccccaagaagccagagcccctgaacagcagaagaaacaagctgcactacgccttccagctgtatgacctggacagagatggcaagatcagcagacatgagatgctgcaggtgctgcggctgatggtgggcgtgcaggtgacagaggagcagctggagaacattgctgacagaacagtgcaggaggctgatgaagatggagatggagctgtgtcctttgtggagttcaccaagagcctggagaagatggatgtggagcagaagatgagcatccgcatcctgaagtag

SEQ ID NO: 18746 - DNA, 2313 bp, synthetic construct
  source 1..2313: mol_type = other DNA; note = Synthetic coding sequence
atgttccgctatgagagcctggaggactgccccctggatgaagatgaagatgccttccagggcctgggggaggaggatgaggagattgaccagttcaatgatgacacctttggaagtggagctgtggatgatgactggcaggaggcccacgagcggctggccgagctggaggagaagctgcctgtggccgtgaatgagcagacaggaaatggagagagagatgagatggacctgctgggggaccacgaggagaacctggccgagcggctgagcaagatggtgattgaaaatgagctggaggaccctgccatcatgagagctgtgcagaccaggcctgtgctgcagccccagcccggcagcctgaacagcagcatctgggatggcagcgaggtgctgcggcgcatccggggccccctgctggcccaggagatgcccaccgtgtctgtgctggagtatgccctgccccagaggcctccccagggcccagaagatgaccgggacctgtctgagcgggccctgcccaggaggagcaccagccccatcatcggcagcccccctgtgcgggctgtgcccatcggcaccccacccaagcagatggctgtgcccagcttcacccagcagatcctgtgccccaagcctgtgcacgtgcggccccccatgccaccccgctacccagccccctacggggagaggatgagccccaaccagctgtgcagcgtgcccaacagcagcctgctgggccaccccttccccccatctgtgccccctgtgctgagccccctgcagagggcccagctgctgggcggggcccagctgcagcccggccgcatgagccccagccagtttgcccgggtgcccggctttgtgggcagccccctggccgccatgaaccccaagctgctgcagggccgggtgggccagatgctgcccccagcccctggcttccgggccttcttcagcgccccacccagcgccaccccaccaccccagcagcaccccccaggccctggcccccacctgcagaacctgcggagccaggcccccatgttccggccagacaccacccacctgcacccccagcaccggcggctgctgcaccagaggcagcagcagaacagaagccagcacaggaacctgaatggagctggggaccggggcagccacaggagcagccaccaggaccacctgaggaaggacccctatgccaacctgatgctgcagcgggagaaggactgggtgtccaagatccagatgatgcagctgcagagcacagacccctacctggatgacttctactaccagaactactttgagaagctggagaagctgtctgctgctgaggagatccagggagatggccccaagaaggagaggaccaagctgatcaccccccaggtggccaagctggagcacgcctacaagcctgtgcagtttgagggcagcctgggcaagctgactgtgtcctctgtgaacaaccccaggaagatgattgatgctgtggtgaccagccgctcagaagatgatgagaccaaggagaagcaggtgcgggacaagaggaggaagaccctggtgatcatcgagaagacctacagcctgctgctggatgtggaggactatgaaagacgctacctgctgagcctggaggaggagaggcctgccctgatggatgacaggaagcacaagatctgcagcatgtatgacaacctgcggggcaagctgcccggccaggagcggcccagtgatgaccactttgtgcagatcatgtgcatcaggaagggcaagaggatggtggcccgcatcctgcccttcctgagcacagagcaggccgctgacatcctgatgaccacagccaggaacctgcccttcctgatcaagaaggatgcccaggatgaggtgctgccctgcctgctgagccccttcagcctgctgctgtaccacctgcccagcgtgtccatcaccagcctgctgcggcagctgatgaacctgccccagagcgctgccaccccagccctgagcaacccccacctgacagctgtgctgcagaacaagtttggcctgagcctgctgctgatcctgctgagcagaggagaggacctgcagagcagtgaccctgccacagagagcacccagaacaaccagtggacagaggtgatgttcatggccacccgggagctgctgcgcatcccccaggccgccctggccaagcccatcagcatccccaccaacctggtgtccctcttcagccgctacgtggaccggcagaagctgaacctgctggagaccaagctgcagctggtgcagggcatcagatag

SEQ ID NO: 18747 - DNA, 1518 bp, synthetic construct
  source 1..1518: mol_type = other DNA; note = Synthetic coding sequence
atgaggctgcggcggctggccctcttccctggggtggccctgctgctggccgccgcccggctggccgccgccagtgatgtgctggagctgacagatgacaactttgagagccgcatcagtgacaccggcagcgctggcctgatgctggtggagttctttgccccctggtgtggccactgcaagaggctggccccagaatatgaagctgctgccacccggctgaagggcatcgtgcccctggccaaggtggactgcacagccaacaccaacacctgcaacaagtatggagtgtctggctaccccaccctgaagatcttcagagatggagaggaggccggggcctatgatggccccaggacagcagatggcatcgtgagccacctgaagaagcaggccggccctgcctctgtgcccctgaggacagaggaggagttcaagaagttcatcagtgacaaggatgccagcatcgtgggcttctttgatgacagcttcagcgaggcccacagcgagttcctgaaggccgccagcaacctgcgggacaactacagatttgcccacaccaacgtggagagcctggtgaatgaatatgatgacaatggagagggcatcatcctcttccggcccagccacctgaccaacaagtttgaggacaagacagtggcctacacagagcagaagatgaccagcggcaagatcaagaagttcatccaggagaacatcttcggcatctgcccccacatgacagaggacaacaaggacctgatccagggcaaggacctgctgattgcctactatgatgtggactatgagaagaatgccaagggcagcaactactggaggaacagagtgatgatggtggccaagaagttcctggatgctggccacaagctgaactttgctgtggccagcaggaagaccttcagccatgagctgagtgactttggcctggagagcacagctggggagatccctgtggtggccatcagaacagccaagggggagaagtttgtgatgcaggaggagttcagcagagatggcaaggccctggagcgcttcctgcaggactactttgatggcaacctgaagcgctacctgaagtctgagcccatccctgagagcaatgatggccctgtgaaggtggtggtggccgagaactttgatgaaattgtgaacaatgaaaacaaggatgtgctgattgagttctacgccccctggtgtggccactgcaagaacctggagcccaagtacaaggagctgggggagaagctgagcaaggaccccaacatcgtgattgccaagatggatgccacagccaatgatgtgcccagcccctatgaggtgcggggcttccccaccatctacttctccccagccaacaagaagctgaaccccaagaagtatgaaggaggccgggagctgagtgacttcatctcctacctgcagcgggaggccaccaacccccctgtgatccaggaggagaagcccaagaagaagaagaaggcccaggaggacctgtag

SEQ ID NO: 18748 - DNA, 684 bp, synthetic construct
  source 1..684: mol_type = other DNA; note = Synthetic coding sequence
atgtctgtggtgccccccaacagaagccagacaggctggccccggggcgtgacccagtttggaaacaagtacatccagcagaccaagcccctgaccctggagaggaccatcaacctgtaccccctgaccaactacaccttcggcaccaaggagcccctgtatgagaaggacagctctgtggccgcccgcttccagaggatgagggaggagtttgacaagattggcatgagaagaacagtggagggcgtgctgattgtgcatgagcaccggctgccccacgtgctgctgctgcagctgggcaccaccttcttcaagctgcctggaggagagctgaaccctggagaagatgaggtggagggcctgaagaggctgatgacagagatcctgggccggcaggatggagtgctgcaggactgggtgattgatgactgcatcggcaactggtggaggcccaactttgagcccccccagtacccctacatcccagcccacatcaccaagcccaaggagcacaagaagctgttcctggtgcagctgcaggagaaggccctgtttgctgtgcccaagaactacaagctggtggccgcccccctgtttgagctgtatgacaatgcccctggctacggccccatcatcagcagcctgccccagctgctgagccgcttcaacttcatctacaactag

SEQ ID NO: 18749 - DNA, 2244 bp, synthetic construct
  source 1..2244: mol_type = other DNA; note = Synthetic coding sequence
atgagccaggtgaagagcagctacagctatgatgcccccagcgacttcatcaacttcagcagcctggatgatgaaggagacacccagaacatcgacagctggtttgaggagaaggccaacctggagaacaagctgctgggcaagaatggaactggaggcctcttccagggcaagacccccctgaggaaggccaacctgcagcaggccatcgtgacccccctgaagcctgtggacaacacctactacaaggaggccgagaaggagaacctggtggagcagagcatccccagcaatgcctgcagcagcctggaggtggaggccgccatcagcaggaagaccccagcccagccccagaggaggagcctgcggctgagcgcccagaaggacctggagcagaaggagaagcaccacgtgaagatgaaggccaagagatgtgccacccctgtgatcattgatgagatcctgcccagcaagaagatgaaggtgagcaacaacaagaagaagccagaggaggagggcagcgcccaccaggacacagctgagaagaatgccagcagccctgagaaggccaagggccgccacacagtgccctgcatgcccccagccaagcagaagttcctgaagagcacagaggagcaggagctggagaagtccatgaagatgcagcaggaggtggtggagatgaggaagaagaatgaggagttcaagaagctggccctggccggcatcggccagcctgtgaagaagtctgtgtcccaggtgaccaagtctgtggacttccacttcagaacagatgagcgcatcaagcagcaccccaagaaccaggaggagtacaaggaggtgaacttcaccagcgagctgaggaagcaccccagcagccctgcccgggtgaccaagggctgcaccatcgtgaagcccttcaacctgagccagggcaagaagaggacctttgatgagaccgtgtccacctacgtgcccctggcccagcaggtggaggacttccacaagaggacccccaaccgctaccacctgcggagcaagaaggatgacatcaacctgctgcccagcaagagctctgtgaccaagatctgccgggacccccagacccctgtgctgcagaccaagcaccgggcccgggctgtgacctgcaagagcacagctgagctggaggccgaggagctggagaagctgcagcagtacaagttcaaggcccgggagctggacccccgcatcctggagggcggccccatcctgcccaagaagccccctgtgaagccacccacagagcccatcggctttgacctggagattgagaagaggatccaggagcgggagagcaagaagaagacagaagatgagcactttgagttccacagccggccctgccccaccaagatcctggaggatgtggtgggcgtgcctgagaagaaggtgctgcccatcaccgtgcccaagagccctgcctttgccctgaagaaccgcatccgcatgcccaccaaggaggatgaggaggaggatgagcctgtggtgatcaaggcccagcctgtgccccactatggagtgcccttcaagccccagatccctgaggccaggacagtggagatctgccccttctcctttgacagccgggacaaggagcggcagctgcagaaggagaagaagatcaaggagctgcagaagggggaggtgcccaagttcaaggccctgcccctgccccactttgacaccatcaacctgcctgagaagaaggtgaagaatgtgacccagatcgagcccttctgcctggagacagacagaagaggagccctgaaggcccagacctggaagcaccagctggaggaggagctgcggcagcagaaggaggccgcctgcttcaaggcccggcccaacacagtcatcagccaggagccctttgtgcccaagaaggagaagaagtctgtggccgagggcctgagcggcagcctggtgcaggagcccttccagctggccacagagaagagggccaaggagcggcaggagctggagaagaggatggccgaggtggaggcccagaaggcccagcagctggaggaggcccggctgcaggaggaggagcagaagaaggaggagctggcccggctgcggcgggagctggtgcacaaggccaaccccatcaggaagtaccagggcctggagatcaagagcagtgaccagcccctgactgtgcctgtgagccccaagttcagcacccgcttccactgctag

SEQ ID NO: 18750 - DNA, 360 bp, synthetic construct
  source 1..360: mol_type = other DNA; note = Synthetic coding sequence
atgaagctggtgcgcttcctgatgaagctgagccatgagaccgtgaccatcgagctgaagaatggcacccaggtgcacggcaccatcaccggggtggatgtgtccatgaacacccacctgaaggctgtgaagatgaccctgaagaaccgggagcctgtgcagctggagaccctgagcatccggggcaacaacatccgctacttcatcctgcctgacagcctgcccctggacaccctgctggtggatgtggagcccaaggtgaagagcaagaagcgggaggccgtggccggccggggccggggccggggccggggccggggccggggccggggccggggccggggcggccccaggaggtag

SEQ ID NO: 18751 - DNA, 555 bp, synthetic construct
  source 1..555: mol_type = other DNA; note = Synthetic coding sequence
atgatgggcgccagcaccctgcaggagcccgccctgagccctggccgctgcccccggcagcccctgcggagcaagtttggccaccagggcagcacagtgcagaggaagtgcagcaagaccaatgccctgaatgtgtcccagaagatgattgagatgtttgtgaggaccaagcacaagattgacaagagccatgaatttgccctggtggtggtgaatgatgacacagcctggctgagcggcctgaccagtgacccccgggagctgtgcagctgcctgtatgacctggagacagccagctgcagcaccttcaacatcagcggggccagccctgcccggcagcagaagacagagctgcctgtgacagaaaatgtgcagaccatccccccaccctacgtggtgaggaccatcctggtgtacagccggcccccctgccagccccagttcagcctgacagagcccatgaagaagatgttccagtgcccctacttcttctttgatgtggtgtacatccacaacggcacagaggagaaggaggaggagatgtcctggaagtag

SEQ ID NO: 18752 - DNA, 1203 bp, synthetic construct
  source 1..1203: mol_type = other DNA; note = Synthetic coding sequence
atggccagcgagaagcccctggccgctgtgacctgcacagcccctgtgaacattgctgtgatcaagtactggggcaagagagatgaggagctggtgctgcccatcaacagcagcctgtctgtgaccctgcaccaggaccagctgaagaccaccaccacagctgtgatcagcaaggacttcacagaggaccgcatctggctgaatggccgggaggaggatgtgggccagccccggctgcaggcctgcctgcgggagatccgctgcctggccaggaagagaagaaacagcagagatggagaccccctgcccagcagcctgagctgcaaggtgcacgtggcctctgtgaacaacttccccacagctgctggcctggccagcagcgctgctggctacgcctgcctggcctacaccctggcccgggtgtatggagtggagagtgacctgtctgaggtggcccggcggggcagcggcagcgcctgccgcagcctgtatggaggctttgtggagtggcagatgggagagcaggctgatggcaaggacagcatcgcccggcaggtggcccctgagagccactggccagagctgcgggtgctgatcctggtggtgtctgctgagaagaagctgaccggcagcacagtgggcatgagggcctctgtggagaccagccccctgctgcgcttccgggcagagagcgtggtgcctgccaggatggccgagatggcccgctgcatccgggagcgggacttccccagctttgcccagctgaccatgaaggacagcaaccagttccacgccacctgcctggacaccttcccccccatctcctacctgaatgccatctcctggaggatcatccacctggtgcaccgcttcaatgcccaccacggggacaccaaggtggcctacacctttgatgctggccccaatgctgtgatcttcaccctggatgacacagtggccgagtttgtggccgctgtgtggcacggcttccccccaggcagcaatggagacaccttcctgaagggcctgcaggtgcggcctgcccccctgtctgctgagctgcaggccgccctggccatggagcccacccctgggggcgtgaagtacatcatcgtgacccaggtgggccctggcccccagatcctggatgacccctgtgcccacctgctgggcccagatggcctgcccaagccagctgcctag

SEQ ID NO: 18753 - DNA, 1350 bp, synthetic construct
  source 1..1350: mol_type = other DNA; note = Synthetic coding sequence
atgagggagtgcatcagcatccacgtgggccaggccggcgtgcagattggaaatgcctgctgggagctgtactgcctggagcacggcatccagccagatggccagatgcccagcgacaagaccatcggcggcggagatgacagcttcaacaccttcttcagcgagaccggggccggcaagcacgtgcccagggctgtgtttgtggacctggagcccaccgtgattgatgaggtgaggacaggcacctaccggcagctgttccaccctgagcagctgatcaccgggaaggaggatgctgccaacaactatgcccggggccactacaccatcggcaaggagatcatcgacctggtgctggaccgcatcaggaagctggccgaccagtgcaccggcctgcagggcttcctggtgttccacagctttggaggcggcactggaagtggcttcaccagcctgctgatggagcggctgtctgtggactatggcaagaagagcaagctggagttcagcatctacccagccccccaggtgtccacagctgtggtggagccctacaacagcatcctgaccacccacaccaccctggagcacagcgactgtgccttcatggtggacaatgaggccatctatgacatctgcagaagaaacctggacatcgagcggcccacctacaccaacctgaacagactcatcagccagatcgtgagcagcatcacagccagcctgcgctttgatggagccctgaatgtggacctgacagagttccagaccaacctggtgccctacccccgcatccacttccccctggccacctacgcccctgtgatctctgctgagaaggcctaccacgagcagctgactgtggccgagatcaccaatgcctgctttgagcccgccaaccagatggtgaagtgtgaccccaggcatggcaagtacatggcctgctgcctgctgtacagaggagatgtggtgcccaaggatgtgaatgctgccatcgccaccatcaagaccaagaggaccatccagtttgtggactggtgccccaccggcttcaaggtgggcatcaactaccagcccccaacagtggtgcctggaggagacctggccaaggtgcagagagctgtgtgcatgctgagcaacaccacagctgtggccgaggcctgggcccggctggaccacaagtttgacctgatgtatgccaagagggcctttgtgcactggtacgtgggggagggcatggaggagggggagttcagcgaggcccgggaggacatggccgccctggagaaggactatgaggaggtgggcgctgacagcgcagatggagaagatgaaggagaggagtactag

SEQ ID NO: 18754 - DNA, 1365 bp, synthetic construct
  source 1..1365: mol_type = other DNA; note = Synthetic coding sequence
atgagcaccttccggcaggaggatgtggaggaccactatgagatgggagaggagctgggcagcggccagtttgccatcgtgaggaaatgtcggcagaagggcaccgggaaggagtatgctgccaagttcatcaagaagaggcggctgagcagcagcagaagaggagtgtcccgggaggagattgagcgggaggtgaacatcctgcgggagatccgccaccccaacatcatcaccctgcatgacatctttgagaacaagacagatgtggtgctgatcctggagctggtgtctggaggagagctgtttgacttcctggccgagaaggagagcctgacagaagatgaggccacccagttcctgaagcagatcctggatggagtgcactacctgcacagcaagagaattgcccactttgacctgaagccagagaacatcatgctgctggacaagaatgtgcccaacccccgcatcaagctgattgactttggcatcgcccacaagattgaggccggaaatgagttcaagaacatcttcggcaccccagagtttgtggcccctgagatcgtgaactatgagcccctgggcctggaggccgacatgtggagcattggagtcatcacctacatcctgctgagcggggccagccccttcctgggggagaccaagcaggagaccctgaccaacatctctgctgtgaactatgactttgatgaggagtacttcagcaacaccagcgagctggccaaggacttcatccggcggctgctggtgaaggaccccaagaggaggatgaccatcgcccagagcctggagcacagctggatcaaggccatcagaagaagaaatgtgcggggggaggacagcggcaggaagccagagcggcggcggctgaagaccacccggctgaaggagtacaccatcaagagccacagcagcctgccccccaacaacagctatgctgactttgagcgcttcagcaaggtgctggaggaggccgctgctgctgaggagggcctgcgggagctgcagaggagccggcggctgtgccatgaagatgtggaggccctggccgccatctatgaggagaaggaggcctggtaccgggaggagagtgacagcctgggccaggacctgcggcggctgcggcaggagctgctgaagacagaggccctgaagaggcaggcccaggaggaggccaagggggccctgctgggcaccagcggcctgaagaggcgcttcagccggctggagaacagatatgaggccctggccaagcaggtggccagcgagatgagatttgtgcaggacctggtgcgggccctggagcaggagaagctgcagggcgtggagtgtggcctgaggtag

SEQ ID NO: 18755 - DNA, 1326 bp, synthetic construct
  source 1..1326: mol_type = other DNA; note = Synthetic coding sequence
atgaagaagttcttccaggagttcaaggctgacatcaagttcaagtctgctggccctggccagaagctgaaggagagcgtgggggagaaggcccacaaggagaagcccaaccagcctgcccccaggcctccccggcagggccccaccaatgaggcccagatggctgctgctgctgccctggcccggctggagcagaagcagagccgggcctggggccccaccagccaggacaccatccggaaccaggtgaggaaggagctgcaggccgaggccaccgtgtctggcagccctgaggcccctggcaccaacgtggtgtctgagccccgggaggagggcagcgcccacctggccgtgcctggggtgtacttcacctgccccctgaccggggccaccctgaggaaggaccagagagatgcctgcatcaaggaggccatcctgctgcacttcagcacagatcctgtggccgccagcatcatgaagatctacaccttcaacaaggaccaggacagagtgaagctgggcgtggacaccatcgccaagtacctggacaacatccacctgcaccctgaggaggagaagtacaggaagatcaagctgcagaacaaggtgttccaggagcgcatcaactgcctggagggcacccatgagttctttgaggccatcggcttccagaaggtgctgctgcctgcccaggaccaggaggaccctgaggagttctacgtgctgtctgagaccaccctggcccagccccagagcctggagcggcacaaggagcagctgctggccgctgagcctgtgcgggccaagctggaccggcagaggagggtcttccagcccagccccctggccagccagtttgagctgcccggggacttcttcaacctgacagctgaggagatcaagcgggagcagaggctgcggtctgaggccgtggagcggctgtctgtgctgcggaccaaggccatgagggagaaggaggagcagaggggcctgaggaagtacaactacaccctgctgcgggtgcggctgcctgatggctgcctgctgcagggcaccttctacgcccgggagcggctgggcgctgtgtatggctttgtgcgggaggccctgcagagcgactggctgccctttgagctgctggccagcggcggccagaagctgtctgaagatgagaacctggccctgaatgaatgtggcctggtgcccagcgccctgctgaccttctcctgggacatggctgtgctggaggacatcaaggctgctggagctgagccagacagcatcctgaagccagagctgctgagcgccatcgagaagctgctgtag

SEQ ID NO: 18756 - DNA, 900 bp, synthetic construct
  source 1..900: mol_type = other DNA; note = Synthetic coding sequence
atgagggacctgctgctgcactggggccctggcccccccatccgggccccccaggaggaggccgaggccctgctggagctgcagggccgcctgcaggaggcccaggacaccacagaggccctgcgggcccagctgggcgtgcaggaggtgcagctgcagggcctgcagggcgccctgcagcagctgcagcaggagacagagcagaactgcagaagagagctgcagcagatgcacggccagctggccggcctgcgggccaggatggccagcctgcggcagggctgtggggacctgcggggcctggtgtccaccttcacccagagctgccagggcagcctgtctgaggcccggggccaggtgtcctgggccctgggcgccctgagcagcggcggccctggcacccagctgcctgagggccagcagggccccccagctggctgccccggccgcctgcctgagctgaagggcaacatccgggtgctgtgccgcctgcggcccggcaccagcagcagcctggtgtctgtggagcccggccctgggggcaccgtgaccacctgctaccggggccgccaccggcgcttccggctggactgggtgtttcctccagatgccagccaggaggaggtgttccgggagctggagcctgctgtgctgagctgcctgcggggctacagcgtgtgcatcttcacctacggccagacaggcaccgggaagacctacagcatggagggccccccagaagatcctggcatcgtgccccgggccctgcagagcctcttccgggagatgggcgccggccggcagcaccggcgctaccacggccgctgcctgagccctgctgagagccctgagcacccccggcccggcctgcccccctgccgggcccggagccccctgtag

SEQ ID NO: 18757 - DNA, 2517 bp, synthetic construct
  source 1..2517: mol_type = other DNA; note = Synthetic coding sequence
atgtatgccttctacagcctgctgatctacatcttctacagcctcttcagaagagatggaggagctgctgctgctgctgagcccggggaccctgcccagagggccaggaagccccggggcagaagaagaccagacctgcctgcccctgagctgtggacagagctgaccggcctggccgccagcagcgagccagaagatggcagcgagggcgctgctgagggccgggctgctgctgtgtccctggaggaggccctgctgcggctggccgagttcctgtctgtgcagctgggcgctgaggagagctgtggcggccctgctgacctgggccagagcggggaggtgcccagcctgctgactgtgaccagccagctgctggccctgctggcctggctgcggagcccccggggccggcaggccctgctgcagggcacccagcctgccccccgggtgcggccccccagcccagatggcagcaccagccaggaggagagccccagccacttcaccgctgtgcctggagagcccctgggagatgagacccagggccagcagcccctgcagctggaggaggaccagagggcctggcagaggctggagcagctgatcctgggccagctggaggagctgaagcagcagctggagcagcaggaggaggagctgggccgcctgcggctgggcgtgggcgccacagacagcgagaagagggtgcagcacctgaccctggagaatgaggccctgaagcagagcctgagcctgatgagggacctgctgctgcactggggccctggcccccccatccgggccccccaggaggaggccgaggccctgctggagctgcagggccgcctgcaggaggcccaggacaccacagaggccctgcgggcccagctgggcgtgcaggaggtgcagctgcagggcctgcagggcgccctgcagcagctgcagcaggagacagagcagaactgcagaagagagctgcagcagatgcacggccagctggccggcctgcgggccaggatggccagcctgcggcagggctgtggggacctgcggggcctggtgtccaccttcacccagagctgccagggcagcctgtctgaggcccggggccaggtgtcctgggccctgggcgccctgagcagcggcggccctggcacccagctgcctgagggccagcagggccccccagctggctgccccggccgcctgcctgagctgaagggcaacatccgggtgctgtgccgcctgcggcccggcaccagcagcagcctggtgtctgtggagcccggccctgggggcaccgtgaccacctgctaccggggccgccaccggcgcttccggctggactgggtgtttcctccagatgccagccaggaggaggtgttccgggagctggagcctgctgtgctgagctgcctgcggggctacagcgtgtgcatcttcacctacggccagacaggcaccgggaagacctacagcatggagggccccccagaagatcctggcatcgtgccccgggccctgcagagcctcttccgggagatgggcgccggccggcagcaccgggtgaccctgtccatggtggagatctacaatgaggccgtgcgggacctgctggcccctggccccccagagcggctggccgtgcggcagggccctgagggccagggcggcatccaggtggccggcctgacccactgggatgtgcccaacctggagaccctgcaccagatgctgaagctgggccgcagcaacagagccacagctgccacagccatgaaccagaggagcagccgcagccacgccctggtgaccctgaccctgcgggccgccagccccccccgggcccctggaacagctggcaccctgcacctggtggacctggccggcagcgagcgggccaggaaggccggggccgccggcccccccaggggggaccctgatggagcccggcggctgcgggaggcccagaccatcaacagaagcctgctggccctgggcggcgtgatggccgccctgcgggcccaccggccccacgtgcccttccgggacagccagctgacccggctgctgcagcctgccctgggccctggcaccacagctgtgctgctgctgcaggtgggcgctggggccggccaggtgtgtgcctgccgcagcccccccacccgggcccggcccccagcccccctggcccggcgcagcccccggggccgccgcatcagcggccggcagagcgcccccagcagcagccccacagagtgggtgaagtggagctggggccagcccggggctgctggcagccgggcccctcctggccgcctgctgcccagcgcccccaccctgcggagccctggccccccagcccccctgcggcggcccctggccgtgctgcacgcccctgtgcccaccacagcccgggcccggctgagccggccccagagggcctgccccagcagccctggcagccggccctgcccctggggcctgcggcccggcctgtgctggcagaggaggtag

SEQ ID NO: 18758 - DNA, 597 bp, synthetic construct
  source 1..597: mol_type = other DNA; note = Synthetic coding sequence
atggccagcggaaatgcccgcatcggcaagccagccccagacttcaaggccacagctgtggtggatggagccttcaaggaggtgaagctgagtgactacaagggcaagtatgtggtgctcttcttctaccccctggacttcacctttgtgtgccccacagagatcatcgccttcagcaacagagctgaggacttcaggaagctgggctgtgaggtgctgggcgtgtctgtggacagccagttcacccacctggcctggatcaacacccccaggaaggagggcggcctgggccccctgaacatccccctgctggctgatgtgacccggcggctgtctgaagattatggagtgctgaagacagatgagggcatcgcctaccggggcctcttcatcattgatggaaaaggagtgctgcggcagatcaccgtgaatgacctgcctgtgggccgctctgtggatgaggccctgcggctggtgcaggccttccagtacacagatgagcacggggaggtgtgcccagctggctggaagccaggcagtgacaccatcaagcccaacgtggatgacagcaaggagtacttcagcaagcacaactag

SEQ ID NO: 18759 - DNA, 1380 bp, synthetic construct
  source 1..1380: mol_type = other DNA; note = Synthetic coding sequence
atgtctgtgcgcttcagcagcaccagccggcggctgggcagctgtggcggcaccggctctgtgcggctgagcagtggaggagctggctttggagctggcaacacctgtggggtgcccggcatcggcagcggcttcagctgtgcctttggaggcagcagcagcgctgggggctacggcggcggcctgggcggcggcagcgccagctgtgccgccttcaccggaaatgaacatggcctgctgtctggaaatgagaaggtgaccatgcagaacctgaatgaccggctggccagctacctggagaatgtgcgggccctggaggaggccaatgctgacctggagcagaagatcaagggctggtatgagaagtttggacctggcagctgccggggcctggaccatgactacagccgctacttccccatcattgatgagctgaagaaccagatcatcagcgccaccaccagcaatgcccacgtggtgctgcagaatgacaatgcccggctgacagcagatgacttccggctgaagtttgaaaatgagctggccctgcaccagagcgtggaggccgacatcaatggcctgcggcgggtgctggatgagctgaccctgtgcaggacagacctggagatccagctggagaccctgtctgaggagctggcctacctgaagaagaaccacgaggaggagatgaaggccctgcagtgtgccgccggcggcaatgtgaatgtggagatgaatgctgcccctggggtggacctgactgtgctgctgaacaacatgagagcagaatatgaggccctggccgagcagaacagaagagatgctgaggcctggttcaatgagaagagcgccagcctgcagcagcagatcagtgatgatgctggggccaccaccagcgccagaaatgagctgattgagatgaagaggaccctgcagaccctggagattgagctgcagagcctgctggccaccaagcacagcctggagtgcagcctgacagaaacagagagcaactactgtgcccagctggcccagatccaggcccagatcggggccctggaggagcagctgcaccaggtgaggacagaaacagagggccagaagctggagtatgagcagctgctggacatcaaggtgcacctggagaaggagattgagacctactgcctgctgattgatggagaagatggcagctgcagcaagagcaagggctatggaggccctggcaaccagaccaaggacagcagcaagaccaccatcgtgaagacagtggtggaggagattgacccccggggcaaggtgctgagcagccgggtgcacacagtggaggagaagagcaccaaggtgaacaacaagaatgagcagagggtgagcagctag

SEQ ID NO: 18760 - DNA, 834 bp, synthetic construct
  source 1..834: mol_type = other DNA; note = Synthetic coding sequence
atgcccagcgtgtccaaggctgctgctgctgccctgagcggcagccccccccagacagagaagcccacccactaccgctacctgaaggagttcagaacagagcagtgccccctcttcagccagcacaagtgtgcccagcaccggcccttcacctgcttccactggcacttcctgaaccagaggagaagaagacccctgcggaggagagatggcaccttcaactacagcccagatgtgtactgcagcaagtacaatgaggccaccggggtgtgcccagatggagatgagtgcccctacctgcacaggaccaccggggacacagagaggaagtaccacctgcgctactacaagacaggcacctgcatccatgaaacagatgcccggggccactgtgtgaagaatggcctgcactgtgcctttgcccacggccccctggacctgcggccccctgtgtgtgatgtgcgggagctgcaggcccaggaggccctgcagaatggccagctgggcggcggggagggcgtgcctgacctgcagcccggggtgctggccagccaggccatgattgagaagatcctgtctgaggacccccgctggcaggatgccaactttgtgctgggcagctacaagacagagcagtgccccaagccaccccggctgtgccggcagggctacgcctgcccccactaccacaacagccgggacagaagaagaaacccccggcgcttccagtacagctggcagctgggccggcgggtgctgcggctgagcccccgggccaacaacccccgggtggccctgccccgggtgcacacaggccccagcagcacagcctag

SEQ ID NO: 18761 - DNA, 918 bp, synthetic construct
  source 1..918: mol_type = other DNA; note = Synthetic coding sequence
atggacctgagcggcgtgaagaagaagagcctgctgggcgtgaaggagaacaacaagaagagcagcacccgggcccccagccccaccaagaggaaggacagaagtgatgagaagagcaaggacaggagcaaggacaagggggccaccaaggagagcagcgagaaggaccggggccgggacaagaccaggaagagaagaagtgccagcagcggcagcagcagcaccaggagccgcagcagcagcaccagcagcagcggcagcagcaccagcacaggcagcagcagcggcagcagcagcagcagcgccagcagccgcagcggcagcagcagcaccagccgcagcagcagcagcagcagcagcagcggcagccccagccccagcagaagaagacatgacaacagaagaagaagccgcagcaagagcaagccacccaagagagatgagaaggagaggaagagaagaagccccagccccaagcccaccaaggtgcacatcggccgcctgaccagaaatgtgaccaaggaccacatcatggagatcttcagcacctacggcaagatcaagatgattgacatgcctgtggagaggatgcacccccacctgagcaagggctacgcctacgtggagtttgaaaatccagatgaggccgagaaggccctgaagcacatggatggcggccagattgatggccaggagatcacagccacagctgtgctggccccctggccccggcccccaccccggcgcttcagcccccccaggaggatgctgcccccaccacccatgtggaggaggagcccccccaggatgagaagaagaagccgcagccccaggagaagaagccctgtgagaagaagaagccgcagccctggaagaagaagacacaggagccgcagcagcagcaacagcagcaggtag

SEQ ID NO: 18762 - DNA, 3198 bp, synthetic construct
  source 1..3198: mol_type = other DNA; note = Synthetic coding sequence
atgaggaagcaggaggtgaggacaggccgggaggccggccagggccacggcaccggcagccctgctgagcaggtgaaggccctgatggacctgctggccggcaagggcagccagggcagccaggccccccaggccctggacaggaccccagatgcccccctgggcccctgcagcaatgacagccgcatccagaggcacaggaaggccctgctgagcaaggtgggcggcggccctgagctgggcggcccctggcaccggctggccagcctgctgctggtggagggcctgacagacctgcagctgcgggagcatgacttcacccaggtggaggccacccggggcggcggccacccagccaggacagtggccctggacaggctcttcctgcccctgagccgggtgtctgtgcccccccgggtgtccatcaccatcggcgtggccggcatgggcaagaccaccctggtgcgccactttgtgcggctgtgggcccacggccaggtgggcaaggacttcagcctggtgctgcccctgaccttccgggacctgaacacccatgagaagctgtgtgccgacaggctcatctgcagcgtcttcccccacgtgggggagcccagcctggccgtggccgtgcctgcccgggccctgctgatcctggatggcctggatgaatgtaggacccccctggacttcagcaacacagtggcctgcacagaccccaagaaggagatccctgtggaccacctgatcaccaacatcatccggggcaacctcttccctgaggtgtccatctggatcaccagccggcccagcgccagcggccagatccctgggggcctggtggacaggatgacagagatccggggcttcaatgaggaggagatcaaggtgtgcctggagcagatgtttcctgaggaccaggccctgctgggctggatgctgagccaggtgcaggccgaccgggccctgtacctgatgtgcaccgtgcctgccttctgccgcctgaccggcatggccctgggccacctgtggaggagcaggacaggcccccaggatgctgagctgtggccacccaggaccctgtgtgagctgtacagctggtacttcaggatggccctgtctggagagggccaggagaagggcaaggccagcccccgcatcgagcaggtggcccatggaggcaggaagatggtgggcaccctgggccgcctggccttccacggcctgctgaagaagaagtatgtgttctatgagcaggacatgaaggcctttggagtggacctggccctgctgcagggcgccccctgcagctgcttcctgcagcgggaggagaccctggccagctctgtggcctactgcttcacccacctgagcctgcaggagtttgtggccgccgcctactactacggggccagccggcgggccatctttgacctcttcacagagagcggcgtgtcctggccccggctgggcttcctgacccacttccgctctgctgcccagagggccatgcaggccgaggatggccgcctggatgtgttcctgcgcttcctgagcggcctgctgagcccccgggtgaatgccctgctggccggcagcctgctggcccagggcgagcaccaggcctaccgcacccaggtggccgagctgctgcagggctgcctgcggccagatgctgctgtgtgtgcccgggccatcaacgtgctgcactgcctgcacgagctgcagcacacagagctggcccggtctgtggaggaggccatggagagcggggccctggcccggctgaccggccctgcccaccgggccgccctggcctacctgctgcaggtgtctgatgcctgtgcccaggaggccaacctgagcctgagcctgagccagggcgtgctgcagagcctgctgccccagctgctgtactgcaggaagctgcggctggacaccaaccagttccaggaccctgtgatggagctgctgggctctgtgctgagcggcaaggactgccgcatccagaagatcagcctggccgagaaccagatcagcaacaagggggccaaggccctggcccggagcctgctggtgaacagaagcctgaccagcctggacctgcggggcaacagcatcggcccccagggcgccaaggccctggctgatgccctgaagatcaacagaaccctgaccagcctgagcctgcagggcaacacagtgagagatgatggagcccgctccatggccgaggccctggccagcaacagaaccctgtccatgctgcacctgcagaagaacagcatcggccccatgggcgcccagaggatggctgatgccctgaagcagaacagaagcctgaaggagctgatgttcagcagcaacagcattggagatggaggagccaaggccctggccgaggccctgaaggtgaaccagggcctggagagcctggacctgcagagcaacagcatcagtgatgctggggtggccgccctgatgggcgccctgtgcaccaaccagaccctgctgagcctgagcctgagagaaaattccatcagccctgagggcgcccaggccatcgcccacgccctgtgtgccaacagcaccctgaagaacctggacctgacagccaacctgctgcatgaccagggcgcccgggccatcgctgtggccgtgcgggagaacagaaccctgaccagcctgcacctgcagtggaacttcatccaggccggggccgcccaggccctgggccaggccctgcagctgaacagaagcctgaccagcctggacctgcaggagaatgccatcggagatgatggagcctgtgctgtggcccgggccctgaaggtgaacacagccctgacagccctgtacctgcaggtggccagcatcggggccagcggggcccaggtgctgggggaggccctggccgtgaacagaaccctggagatcctggacctgcggggaaatgccatcggcgtggccggggccaaggccctggccaatgccctgaaggtgaacagcagcctgcggcggctgaacctgcaggagaacagcctgggcatggatggagccatctgcatcgccacagccctgagcggcaaccaccggctgcagcacatcaacctgcagggcaaccacatcggggacagcggggccaggatgatcagcgaggccatcaagaccaatgcccccacctgcaccgtggagatgtag

SEQ ID NO: 18763 - DNA, 927 bp, synthetic construct
  source 1..927: mol_type = other DNA; note = Synthetic coding sequence
atgaaccccatcgtggtggtgcacggcggcggggccggccccatcagcaaggacaggaaggagcgggtgcaccagggcatggtgcgggccgccaccgtgggctacggcatcctgcgggagggcggcagcgctgtggatgctgtggagggcgctgtggtggccctggaggatgatcctgagttcaatgccggctgcggctctgtgctgaacaccaacggggaggtggagatggatgccagcatcatggatggcaaggacctgtctgctggagctgtgtctgctgtgcagtgcatcgccaaccccatcaagctggcccggctggtgatggagaagaccccccactgcttcctgacagaccagggcgccgcccagtttgctgctgccatgggcgtgcctgagatccctggagagaagctggtgacagaaagaaacaagaagaggctggagaaggagaagcatgagaagggggcccagaagacagactgccagaagaacctgggcaccgtgggcgctgtggccctggactgcaagggaaatgtggcctatgccaccagcactggaggcatcgtgaacaagatggtgggccgggtgggggacagcccctgcctgggcgccggcggctatgctgacaatgacattggagctgtgtccaccactggacatggagagagcatcctgaaggtgaacctggcccggctgaccctcttccacatcgagcagggcaagacagtggaggaggccgctgacctgagcctgggctacatgaagagccgggtgaagggcctgggcggcctcatcgtggtgtccaagacaggagactgggtggccaagtggaccagcacctccatgccctgggccgccgccaaggatggcaagctgcactttggaattgatcctgatgacaccaccatcacagacctgccctag

SEQ ID NO: 18764 - DNA, 1212 bp, synthetic construct
  source 1..1212: mol_type = other DNA; note = Synthetic coding sequence
atggccggccggcgggcccagacaggcagcgccccacccaggcctgctgccccccaccccccagccagccgggccttcccccagcactgccggcccagagatgctgagcggccccccagccccaggagccccctgatgcctggctgtgagctgcctgtgggcacctgcccagacatgtgcccagctgctgagcgggcccagcgggagcgggagcaccggctgcaccggctggaggtggtgcccggctgccggcaggacccccccagggctgacccccagagagctgtgaaggagtacagcaggcctgctgctgggaagccccggcccccacccagccagctgcggccccccagcgtgctgctggccaccgtgcgctacctggccggggaggtggccgagagcgctgacatcgcccgggcagaggtggccagctttgtggccgaccggctgcgggctgtgctgctggacctggccctgcagggcgctggagatgctgaggccgctgtggtgctggaggccgccctggccaccctgctgactgtggtggcccggctgggcccagatgctgcccggggccctgctgaccctgtgctgctgcaggcccaggtgcaggagggcttcggcagcctgcggcgctgctacgcccggggggccggcccccacccccggcagcctgccttccagggcctcttcctgctgtacaacctgggctctgtggaggccctgcacgaggtgctgcagctgcctgctgccctgcgggcctgcccccccctgaggaaggccctggccgtggatgctgccttccgggagggcaatgctgcccggctcttccggctgctgcagaccctgccctacctgcccagctgtgctgtgcagtgccacgtgggccacgcccggcgggaggccctggccaggtttgcccgggccttcagcacccccaagggccagaccctgcccctgggcttcatggtgaacctgctggccctggatggcctgcgggaggcccgggacctgtgccaggcccacggcctgcccctggatggagaggagcgggtggtgttcctgcggggccgctacgtggaggagggcctgcccccagccagcacctgcaaggtgctggtggagagcaagctgcggggccgcaccctggaggaggtggtgatggccgaggaggaggatgagggcacagacaggcctggcagccctgcctag

SEQ ID NO: 18765 - DNA, 894 bp, synthetic construct
  source 1..894: mol_type = other DNA; note = Synthetic coding sequence
atggccgagctgacagccctggagagcctgattgagatgggcttcccccggggccgggcagagaaggccctggccctgactggaaaccagggcatcgaggccgccatggactggctgatggagcatgaagatgatcctgatgtggatgagcccctggagacccccctgggccacatcctgggccgggagcccaccagcagcgagcagggcggcctggagggcagcggcagcgctgctggggagggcaagccagccctgtctgaggaggagcggcaggagcagaccaagaggatgctggagctggtggcccagaagcagcgggagcgggaggagcgggaggagcgggaggccctggagcgggagcggcagaggcggcggcagggccaggagctgtctgctgcccggcagaggctgcaggaggatgagatgagaagagctgctgaggagaggagaagagagaaggccgaggagctggccgcccggcagagggtgcgggagaagattgaaagagacaaggccgagcgggccaagaagtatggaggctctgtgggcagccagcccccacctgtggcccctgagcccggccctgtgcccagcagccccagccaggagccccccaccaagcgggagtatgaccagtgccgcatccaggtgcggctgcctgatggcaccagcctgacccagaccttccgggcccgggagcagctggccgctgtgcggctgtatgtggagctgcacagaggagaggagctgggcggcggccaggaccctgtgcagctgctgagcggcttcccccggcgggccttcagcgaggccgacatggagcggcccctgcaggagctgggcctggtgcccagcgctgtgctgattgtggccaagaagtgccccagctag

SEQ ID NO: 18766 - DNA, 570 bp, synthetic construct
  source 1..570: mol_type = other DNA; note = Synthetic coding sequence
atgaggctgagcctgcccctgctgctgctgctgctgggcgcctgggccatccctgggggcctgggggaccgggcccccctgacagccacagccccccagctggatgatgaggagatgtacagcgcccacatgcctgcccacctgcgctgtgatgcctgcagagctgtggcctaccagatgtggcagaacctggccaaggccgagaccaagctgcacaccagcaacagcggcggcagaagagagctgtctgagctggtgtacacagatgtgctggacaggagctgcagcaggaactggcaggactatggagtgcgggaggtggaccaggtgaagaggctgaccggccctggcctgtctgagggccctgagcccagcatctctgtgatggtgactggaggcccctggcccacccggctgagcaggacctgcctgcactacctgggggagtttggagaggaccagatctatgaggcccaccagcagggccgcggggccctggaggccctgctgtgtggcggcccccagggcgcctgcagcgagaaggtgtctgccacccgggaggagctgtag

SEQ ID NO: 18767 - DNA, 3129 bp, synthetic construct
  source 1..3129: mol_type = other DNA; note = Synthetic coding sequence
atggccaatgacagccctgccaagagcctggtggacatcgacctgagcagcctgcgggaccctgctggcatctttgagctggtggaggtggtgggcaatggcacctacggccaggtgtacaagggccgccacgtgaagacaggccagctggccgccatcaaggtgatggatgtgacagaagatgaggaggaggagatcaagctggagatcaacatgctgaagaagtacagccaccacaggaacatcgccacctactacggggccttcatcaagaagagccccccaggccatgatgaccagctgtggctggtgatggagttctgtggggccggcagcatcacagacctggtgaagaacaccaagggcaacaccctgaaggaggactggatcgcctacatcagccgggagatcctgcggggcctggcccacctgcacatccaccacgtgatccaccgggacatcaagggccagaatgtgctgctgacagaaaatgctgaggtgaagctggatgaaacagaatatgagtacagcggcagcgaggaggaggaggaggaggtgcctgagcaggagggggagcccagcagcatcgtgaatgtgcctggagagagcaccctgcggcgggacttcctgcggctgcagcaggagaacaaggagaggtctgaggccctgcggcggcagcagctgctgcaggagcagcagctgcgggagcaggaggagtacaagaggcagctgctggccgagcggcagaagagaattgagcagcagaaggagcagaggcggcggctggaggagcagcagaggcgggagcgggaggcccggcggcagcaggagcgggagcagaggcggcgggagcaggaggagaagaggcggctggaggagctggagaggaggaggaaggaggaggaggagaggagaagagctgaggaggagaagagaagagtggagcgggagcaggagtacatccggcggcagctggaggaggagcagaggcacctggaggtgctgcagcagcagctgctgcaggagcaggccatgctgctggagtgccgctggagggagatggaggagcaccggcaggccgagcggctgcagaggcagctgcagcaggagcaggcctacctgctgagcctgcagcacgaccaccggcggccccacccccagcacagccagcagcccccaccaccccagcaggagaggagcaagcccagcttccacgcccctgagcccaaggcccactatgagcctgctgaccgggcccgggaggtgcctgtgaggaccaccagccgcagccctgtgctgagcagaagagacagccccctgcagggcagcggccagcagaacagccaggccggccagaggaacagcaccagcagcattgagccccggctgctgtgggagcgggtggagaagctggtgcccaggcctggcagcggcagcagcagcggcagcagcaacagcggcagccagcccggcagccaccctggcagccagagcggcagcggggagcgcttccgggtgcgcagcagcagcaagtctgagggcagccccagccagaggctggagaatgctgtgaagaagccagaggacaagaaggaggtgttccggcccctgaagccagctgtgagaattgacctgacagccctggccaaggagctgcgggctgtggaggatgtgcggcccccccacaaggtgacagactacagcagcagcagcgaggagagcggcaccacagatgaggaggatgatgatgtggagcaggagggcgcagatgagagcaccagcggccctgaggacaccagggctgccagcagcctgaacctgagcaatggagaaacagagagcgtgaagaccatgattgtgcatgatgatgtggagagcgagcccgccatgacccccagcaaggagggcaccctgattgtgcggcagacccagagcgccagcagcaccctgcagaagcacaagagcagcagcagcttcacccccttcatcgacccccggctgctgcagatcagccccagcagcggcaccaccgtgacctctgtggtgggcttcagctgtgatggcatgaggcctgaggccatccggcaggaccccaccaggaaaggatctgtggtgaatgtgaaccccaccaacacccggccccagagcgacaccccagagatcaggaagtacaagaagcgcttcaacagcgagatcctgtgtgccgccctgtggggcgtgaacctgctggtgggcacagagagcggcctgatgctgctggacaggagcggccagggcaaggtgtaccccctcatcaacagaagacgcttccagcagatggatgtgctggagggcctgaatgtgctggtgaccatcagcggcaagaaggacaagctgcgggtgtactacctgtcctggctgaggaacaagatcctgcacaatgaccctgaggtggagaagaagcagggctggaccaccgtgggggacctggagggctgtgtgcactacaaggtggtgaagtatgaaagaatcaagttcctggtgattgccctgaagagctctgtggaggtgtatgcctgggcccccaagccctaccacaagttcatggccttcaagagctttggagagctggtgcacaagcccctgctggtggacctgactgtggaggagggccagaggctgaaggtgatctacggcagctgtgccggcttccacgctgtggatgtggacagcggctctgtgtatgacatctacctgcccacccacatccagtgcagcatcaagccccacgccatcatcatcctgcccaacacagatggcatggagctgctggtgtgctatgaagatgagggcgtgtatgtgaacacctacggccgcatcaccaaggatgtggtgctgcagtggggcgagatgcccacctctgtggcctacatccgcagcaaccagaccatgggctggggcgagaaggccatcgagatccgctctgtggagaccggccacctggatggagtcttcatgcacaagagggcccagaggctgaagttcctgtgtgaaagaaatgacaaggtgttctttgcctctgtgcgcagcggcggcagcagccaggtgtacttcatgaccctgggccgcaccagcctgctgtcctggtag

SEQ ID NO: 18768 - DNA, 1113 bp, synthetic construct
  source 1..1113: mol_type = other DNA; note = Synthetic coding sequence
atgggcttcaaccggcccagcaagatccaggagaatgccctgcccatgatgctggccgagcccccccagaacctgattgcccagagccagagcggcaccgggaagacagctgcctttgtgctggccatgctgagccgggtggagcccagcgaccgctacccccagtgcctgtgcctgagccccacctatgagctggccctgcagacaggcaaggtgattgagcagatgggcaagttctacccagagctgaagctggcctatgctgtgcggggcaacaagctggagcggggccagaagatcagcgagcagatcgtcatcggcaccccaggcaccgtgctggactggtgcagcaagctgaagttcatcgaccccaagaagatcaaggtgtttgtgctggatgaagcagatgtgatgattgccacccagggccaccaggaccagagcatccgcatccagaggatgctgcccaggaactgccagatgctgctcttcagcgccacctttgaagattctgtgtggaagtttgcccagaaggtggtgcctgaccccaacgtcatcaagctgaagcgggaggaggagaccctggacaccatcaagcagtactacgtgctgtgcagcagcagagatgagaagttccaggccctgtgcaacctgtatggagccatcaccatcgcccaggccatgatcttctgccacaccaggaagacagcctcctggctggccgctgagctgagcaaggagggccaccaggtggccctgctgtctggagagatgatggtggagcagagagctgctgtgattgagcgcttccgggagggcaaggagaaggtgctggtgaccaccaacgtgtgtgcccggggcattgatgtggagcaggtgtctgtggtgatcaactttgacctgcctgtggacaaggatggcaacccagacaatgagacctacctgcaccgcatcggccgcacaggccgctttgggaagaggggcctggccgtgaacatggtggacagcaagcacagcatgaacatcctgaaccgcatccaggagcacttcaacaagaagattgaaaggctggacacagatgacctggatgaaattgagaagatcgccaactag

SEQ ID NO: 18769 - DNA, 1437 bp, synthetic construct
  source 1..1437: mol_type = other DNA; note = Synthetic coding sequence
atggccacagacagctgggccctggccgtggatgagcaggaggccgctgtgaagtccatgaccaacctgcagatcaaggaggagaaggtgaaggctgacaccaacggcatcatcaagaccagcaccacagctgagaagacagatgaggaggagaaggaggaccgggccgcccagagcctgctgaacaagctgatccgcagcaacctggtggacaacaccaaccaggtggaggtgctgcagagggaccccaacagccccctgtacagcgtgaagagctttgaggagctgcggctgaagccccagctgctgcagggcgtgtatgccatgggcttcaaccggcccagcaagatccaggagaatgccctgcccatgatgctggccgagcccccccagaacctgattgcccagagccagagcggcaccgggaagacagctgcctttgtgctggccatgctgagccgggtggagcccagcgaccgctacccccagtgcctgtgcctgagccccacctatgagctggccctgcagacaggcaaggtgattgagcagatgggcaagttctacccagagctgaagctggcctatgctgtgcggggcaacaagctggagcggggccagaagatcagcgagcagatcgtcatcggcaccccaggcaccgtgctggactggtgcagcaagctgaagttcatcgaccccaagaagatcaaggtgtttgtgctggatgaagcagatgtgatgattgccacccagggccaccaggaccagagcatccgcatccagaggatgctgcccaggaactgccagatgctgctcttcagcgccacctttgaagattctgtgtggaagtttgcccagaaggtggtgcctgaccccaacgtcatcaagctgaagcgggaggaggagaccctggacaccatcaagcagtactacgtgctgtgcagcagcagagatgagaagttccaggccctgtgcaacctgtatggagccatcaccatcgcccaggccatgatcttctgccacaccaggaagacagcctcctggctggccgctgagctgagcaaggagggccaccaggtggccctgctgtctggagagatgatggtggagcagagagctgctgtgattgagcgcttccgggagggcaaggagaaggtgctggtgaccaccaacgtgtgtgcccggggcattgatgtggagcaggtgtctgtggtgatcaactttgacctgcctgtggacaaggatggcaacccagacaatgagacctacctgcaccgcatcggccgcacaggccgctttgggaagaggggcctggccgtgaacatggtggacagcaagcacagcatgaacatcctgaaccgcatccaggagcacttcaacaagaagattgaaaggctggacacagatgacctggatgaaattgagaagatcgccaactag

SEQ ID NO: 18770 - DNA, 2238 bp, synthetic construct
  source 1..2238: mol_type = other DNA; note = Synthetic coding sequence
atggtgggccctggccccacagctgctgctgctgtggaggagcggcagaggaagctgcaggagtacctggccgccaagggcaagctgaagagccagaacaccaagccctacctgaagagcaagaacaactgccagaaccagccccccagcaagagcaccatccggcccaagaatgatgtgaccaaccacgtggtgctgcctgtgaagcccaagaggagcatcagcatcaagctgcagccccggccccccaacacagctggcagccagaagcccaagctggagccccccaagctgctgggcaagaggctgaccagtgaatgtgtgagcagcaacccctacagcaagcccagcagcaagagcttccagcagtgtgaggccggcagcagcaccactggagagctgagcaggaagcctgtgggcagcctgaacatcgagcagctgaagaccaccaagcagcagctgacagaccagggcaatggaaaatgtattgacttcatgaacaacatccacgtggagaatgaaagcctggacaacttcctgaaggagaccaacaaggagaacctgctggacatcctgacagagcctgagaggaagccagaccccaagctgtacaccaggagcaagcccaagacagacagctacaaccagaccaagaacagcctggtgcccaagcaggccctgggcaagagctctgtgaacagcgctgtgctgaaggacagagtgaacaagcagtttgtgggggagacccagagcaggaccttccctgtgaagagccagcagctgagcagaggagctgacctggcccggcctggggtgaagcccagcaggacagtgcccagccacttcatccgcaccctgagcaaggtgcagagcagcaagaagcctgtggtgaagaacatcaaggacatcaaggtgaacagaagccagtatgaaagaccaaatgagaccaagatccgcagctaccctgtgacagagcagagggtgaagcacaccaagcccaggacctaccccagcctgctgcagggcgagtacaacaacagacaccccaacatcaagcaggaccagaagagcagccaggtgtgcatcccccagaccagctgtgtgctgcagaagagcaaggccatcagccagaggcccaacctgactgtgggccgcttcaacagcgccatccccagcacccccagcatccggcccaacggcaccagcggcaacaagcacaacaacaacggcttccagcagaaggcccagaccctggacagcaagctgaagaaggctgtgccccagaaccacttcctgaacaagacagcccccaagacccaggctgatgtgaccaccgtgaatggcacccagaccaaccccaacatcaagaagaaggccacagctgaggacaggaggaagcagctggaggagtggcagaagagcaagggcaagacctacaagaggcctcccatggagctgaagaccaagaggaaggtgatcaaggagatgaacatctccttctggaagagcattgagaaggaggaggaggagaagaaggcccagctggagctgagcagcaagatcaacaacaccctgacagaatgtctgaacctgattgagggcggcgtgcccagcaatgagatcctgaacatcctgagcagcatccctgaggccgagaagtttgccaagttctggatctgcaaggccaagctgctggccagcaagggcacctttgatgtgattggcctgtatgaggaggccatcaagaatggagccacccccatccaggagctgaggaaggtggtgctgaacatcctgcaggacagcaacagaaccacagagggcatcaccagtgacagcctggtggccgagaccagcatcacctctgtggaggagctggccaagaagatggagagcgtgaagagctgcctgagccccaaggagcgggagcaggtgacagccaccccaagaattgccaaggccgagcagcacaactacccaggcatcaagctgcagatcggccccatcccccgcatcaatggcatgcctgaggtgcaggacatgaagttcatcacccctgtgcggcgcagcagcagaattgaaagagctgtgagccgctacccagagatgctgcaggagcatgacctggtggtggccagcctggatgagctgctggaggtggaggagaccaagtgcttcatcttcagaagaaatgaggccctgcctgtgaccctgggcttccagaccccagagagctag

SEQ ID NO: 18771 - DNA, 378 bp, synthetic construct
  source 1..378: mol_type = other DNA; note = Synthetic coding sequence
atgagcagcaccctgggcaagctgagcaaccaggtggaggagaccctgcccctgctgaagaaggtgcctgccaactacttccacatctgcagcgccatcctgatgggcttcagcctgagcaagagcgccacccaggtgtctgccatccacatggacagcaaggtggatgaccacctgatccggggcacagagaagagccggctggagcccgccacccagctgttccagaacaccaagaagatccggctggaggacaccaaccaggagaacttcacccgcatcgagggcactggaacaggcagcctgagcggcaaggccctgggctctgtggtgtatgtgaaggagagtgatggcctggagatgacagatgtggagtag

SEQ ID NO: 18772 - DNA, 4284 bp, synthetic construct
  source 1..4284: mol_type = other DNA; note = Synthetic coding sequence
atgtccatgctgaagcccagcggcctgaaggcccccaccaagatcctgaagccaggcagcacagccctgaagacccccacagctgtggtggcccctgtggagaagaccatcagcagcgagaaggccagcagcacccccagcagcgagacccaggaggagtttgtggatgacttccgggtgggggagcgggtgtgggtgaatggaaacaagccaggcttcatccagttcctgggggagacccagtttgcccctggccagtgggccggcatcgtgctggatgagcccatcggcaagaatgatggctctgtggccggcgtgcgctacttccagtgtgagcccctgaagggcatcttcacccggcccagcaagctgaccaggaaggtgcaggctgaagatgaggccaacggcctgcagaccaccccagccagccgggccaccagccccctgtgcaccagcacagcctccatggtgagcagcagccccagcacccccagcaacatcccccagaagcccagccagcctgctgccaaggagcccagcgccaccccacccatcagcaacctgaccaagacagccagcgagagcatcagcaacctgtctgaggccggcagcatcaagaagggggagcgggagctgaagatcggggacagagtgctggtgggcggcaccaaggccggcgtggtgcgcttcctgggggagacagactttgccaagggggagtggtgtggggtggagctggatgagcccctgggcaagaatgatggagctgtggccggcacccgctacttccagtgccagcccaagtatggcctgtttgcccctgtgcacaaggtgaccaagattggcttccccagcaccaccccagccaaggccaaggccaatgctgtgagaagagtgatggccaccaccagcgccagcctgaagaggagccccagcgccagcagcctgagctccatgagctctgtggccagctctgtgagcagccggcccagcaggacaggcctgctgacagagaccagcagccgctatgccaggaagatcagcggcaccacagccctgcaggaggccctgaaggagaagcagcagcacatcgagcagctgctggccgagcgggacctggagcgggcagaggtggccaaggccaccagccacgtgggggagattgagcaggagctggccctggccagagatggccatgaccagcacgtgctggagctggaggccaagatggaccagctgcggaccatggtggaggccgctgaccgggagaaggtggagctgctgaaccagctggaggaggagaagaggaaggtggaggacctgcagttccgggtggaggaggagagcatcaccaagggggacctggagacccagaccaagctggagcacgcccgcatcaaggagctggagcagagcctgctgtttgagaagaccaaggctgacaagctgcagcgggagctggaggacaccagggtggccaccgtgtctgagaagagccgcatcatggagctggagaaggacctggccctgcgggtgcaggaggtggccgagctgcggcggcggctggagagcaacaagccagctggagatgtggacatgagcctgagcctgctgcaggagatcagcagcctgcaggagaagctggaggtgaccaggacagaccaccagcgggagatcaccagcctgaaggagcactttggagcccgggaggagacccaccagaaggagatcaaggccctgtacacagccacagagaagctgagcaaagaaaatgaaagcctgaagagcaagctggagcacgccaacaaggagaacagtgatgtgattgccctgtggaagagcaagctggagacagccatcgccagccaccagcaggccatggaggagctgaaggtgtccttcagcaagggcctgggcacagaaacagctgagtttgctgagctgaagacccagatcgagaagatgaggctggactaccagcatgaaattgagaacctgcagaaccagcaggacagcgagagagctgcccacgccaaggagatggaggccctgcgggccaagctgatgaaggtgatcaaggagaaggagaacagcctggaggccatccgcagcaagctggacaaggccgaggaccagcacctggtggagatggaggacaccctgaacaagctgcaggaggccgagatcaaggtgaaggagctggaggtgctgcaggccaagtgcaatgagcagaccaaggtgattgacaacttcaccagccagctgaaggccacagaggagaagctgctggacctggatgccctgaggaaggccagcagcgagggcaagtctgagatgaagaagctgcggcagcagctggaggccgctgagaagcagatcaagcacctggagattgagaagaatgctgagagcagcaaggccagcagcatcacccgggagctgcagggccgggagctgaagctgaccaacctgcaggagaacctgtctgaggtgtcccaggtgaaggagaccctggagaaggagctgcagatcctgaaggagaagtttgctgaggccagcgaggaggccgtgtctgtgcagaggtccatgcaggagaccgtgaacaagctgcaccagaaggaggagcagttcaacatgctgagcagtgacctggagaagctgcgggagaacctggccgacatggaggccaagttccgggagaaggatgagcgggaggagcagctgatcaaggccaaggagaagctggagaatgacattgctgagatcatgaagatgtctggggacaacagcagccagctgaccaagatgaatgatgagctgcggctgaaggagagagatgtggaggagctgcagctgaagctgaccaaggccaatgaaaatgccagcttcctgcagaagagcattgaggacatgacagtgaaggccgagcagagccagcaggaggccgccaagaagcatgaggaggagaagaaggagctggagaggaagctgagtgacctggagaagaagatggagaccagccacaaccagtgccaggagctgaaggcccgctatgaaagagccaccagcgagaccaagaccaagcatgaggagatcctgcagaacctgcagaagaccctgctggacacagaggacaagctgaagggggcccgggaggagaacagcggcctgctgcaggagctggaggagctgaggaagcaggccgacaaggccaaggccgcccagacagcagaagatgccatgcagatcatggagcagatgaccaaggagaagacagagaccctggccagcctggaggacaccaagcagaccaatgccaagctgcagaatgagctggacaccctgaaggagaacaacctgaagaatgtggaggagctgaacaagagcaaggagctgctgactgtggagaaccagaagatggaggagttcaggaaggagattgagaccctgaagcaggccgccgcccagaagagccagcagctgagcgccctgcaggaggagaatgtgaagctggccgaggagctgggccgcagcagagatgaggtgaccagccaccagaagctggaggaggagaggtctgtgctgaacaaccagctgctggagatgaagaagcgggagagcaagttcatcaaggatgctgatgaggagaaggccagcctgcagaagagcatcagcatcaccagcgccctgctgacagagaaggatgctgagctggagaagctgagaaatgaggtgacagtgctgcggggagaaaatgccagcgccaagagcctgcacagcgtggtgcagaccctggagagtgacaaggtgaagctggagctgaaggtgaagaacctggagctgcagctgaaggagaacaagaggcagctgagcagcagcagcggcaacacagacacccaggctgatgaagatgagcgggcccaggagagccagattgacttcctgaacagcgtgattgtggacctgcagaggaagaaccaggacctgaagatgaaggtggagatgatgtctgaggccgccctgaatggaaatggagatgacctgaacaactatgacagtgatgaccaggagaagcagagcaagaagaagcccaggctcttctgtgacatctgtgactgctttgacctgcatgacacagaggactgccccacccaggcccagatgtctgaggaccccccccacagcacccaccacggcagcagaggagaggagcggccctactgtgagatctgtgagatgtttggccactgggccaccaactgcaatgatgatgagaccttctag

SEQ ID NO: 18773 - DNA, 975 bp, synthetic construct
  source 1..975: mol_type = other DNA; note = Synthetic coding sequence
atggccagcagcaacacagtgctgatgaggctggtggccagcgcctacagcatcgcccagaaggccggcatgattgtgagaagagtgattgctgagggggacctgggcatcgtggagaagacctgtgccacagacctgcagaccaaggctgaccggctggcccagatgagcatctgcagcagcctggccaggaagttccccaagctgaccatcatcggggaggaggacctgcccagcgaggaggtggaccaggagctgattgaggacagccagtgggaggagatcctgaagcagccctgccccagccagtacagcgccatcaaggaggaggacctggtggtgtgggtggaccccctggatggcaccaaggagtacacagagggcctgctggacaacgtgacagtgctgattggaattgcctatgagggcaaggccatcgccggggtcatcaaccagccctactacaactatgaagctggcccagatgctgtgctgggccgcaccatctggggcgtgctgggcctgggcgccttcggcttccagctgaaggaggtgcctgctgggaagcacatcatcaccaccaccaggagccacagcaacaagctggtgacagactgtgtggccgccatgaacccagatgctgtgctgcgggtgggcggggccggcaacaagatcatccagctgattgagggcaaggccagcgcctacgtgtttgccagccctggctgcaagaagtgggacacctgtgcccctgaggtgatcctgcatgctgtgggcggcaagctgacagacatccacggcaatgtgctgcagtaccacaagggcgtgagccacaggacctggcccaagccagacttcttccgggcccagttcttcctggagagccacagctgcttcagcaacttcaagaatgtgtccacccccatcaagaacatctatgatgtgatcatctatgcctatgaaacagacctgtag

SEQ ID NO: 18774 - DNA, 270 bp, synthetic construct
  source 1..270: mol_type = other DNA; note = Synthetic coding sequence
atgggcaccaagcgggaggccatcctgaaggtgctggagaacctgaccccagaggagctgaagaagttcaagatgaagctgggcaccgtgcccctgcgggagggctttgagcgcatccccaggggggccctgggccagctggacatcgtggacctgacagacaagctggtggccagctactatgaggactatgctgctgagctggtggtggccgtgctgcgggacatgaggatgctggaggaggccgcccggctgcagagagctgcctag

SEQ ID NO: 18775 - DNA, 867 bp, synthetic construct
  source 1..867: mol_type = other DNA; note = Synthetic coding sequence
atgacagtgggcaagagcagcaagatgctgcagcacatcgactacaggatgcgctgcatcctgcaggacggccgcatcttcatcggcaccttcaaggcctttgacaagcacatgaacctgatcctgtgtgactgtgatgagttcaggaagatcaagcccaagaacagcaagcaggccgagcgggaggagaagagggtgctgggcctggtgctgctgcggggggagaacctggtgtccatgacagtggagggccccccacccaaggacaccggcatcgcccgggtgcccctggccggggctgctgggggccctggcatcggccgggccgccggccggggcatcccagctggggtgcccatgccccaggccccagctggcctggccggccctgtgcggggcgtgggcggccccagccagcaggtgatgaccccccagggccggggcaccgtggccgctgctgctgctgctgccacagccagcattgctggggcccccacccagtacccacctggccggggcggccccccaccacccatgggccgcggggcccctcctcctggcatgatgggccccccacctggcatgaggcctcccatgggcccccccatgggcatccccccaggccggggcacccccatgggcatgcctcctcctggcatgaggcctcctcctcctggctgtgaggccttctttgacccctggccccagagcatggaggtggccccccagaggcggggcctggacagcagcggcccccgctaccacaggcctgtgtgcttcctgtgctgctgctcctggagcctgatgggcctgagcggcttcctgaccggccccccacctcctggcatgaggcctccccggccctag

SEQ ID NO: 18776 - DNA, 3300 bp, synthetic construct
  source 1..3300: mol_type = other DNA; note = Synthetic coding sequence
atgcacatcaagagcatcatcctggagggcttcaagagctatgcccagaggacagaggtgaatggatttgaccccctcttcaatgccatcaccggcctgaatggcagcggcaagagcaacatcctggacagcatctgcttcctgctgggcatcagcaacctgagccaggtgcgggccagcaacctgcaggacctggtgtacaagaatggccaggccggcatcaccaaggcctctgtgtccatcacctttgacaacagcgacaagaagcagagccccctgggctttgaggtgcatgatgagatcaccgtgacccggcaggtggtgattggaggcaggaacaagtacctgatcaacggggtgaatgccaacaacaccagggtgcaggacctcttctgcagcgtgggcctgaatgtgaacaacccccacttcctgatcatgcagggccgcatcaccaaggtgctgaacatgaagcccccagagatcctgtccatgattgaggaggccgccggcaccaggatgtatgagtacaagaagattgctgcccagaagaccatcgagaagaaggaggccaagctgaaggagatcaagaccatcctggaggaggagatcacccccaccatccagaagctgaaggaggagaggagcagctacctggagtaccagaaggtgatgagagaaattgagcacctgagccggctgtacatcgcctaccagttcctgctggccgaggacaccaaggtgcgctctgctgaggagctgaaggagatgcaggacaaggtgatcaagctgcaggaggagctgtctgaaaatgacaagaagatcaaggccctgaaccatgaaattgaggagctggagaagaggaaggacaaggagaccggcggcatcctgcggagcctggaggatgccctggccgaggcccagagggtgaacaccaagagccagagcgcctttgacctgaagaagaagaacctggcctgtgaggagagcaagaggaaggagctggagaagaacatggtggaggacagcaagaccctggccgccaaggagaaggaggtgaagaagatcacagatggcctgcacgccctgcaggaggccagcaacaaggatgctgaggccctggccgccgcccagcagcacttcaatgctgtgtctgctggcctgagcagcaatgaagatggagctgaggccaccctggccggccagatgatggcctgcaagaatgacatcagcaaggcccagacagaggccaagcaggcccagatgaagctgaagcacgcccagcaggagctgaagaacaagcaggccgaggtgaagaagatggacagcggctacaggaaggaccaggaggccctggaggccgtgaagaggctgaaggagaagctggaggccgagatgaagaagctgaactatgaggagaacaaggaggagagcctgctggagaagaggcggcagctgagccgggacatcggccgcctgaaggagacctatgaggccctgctggcccgcttccccaacctgcgctttgcctacaaggaccctgagaagaactggaacagaaactgtgtgaagggcctggtggccagcctcatctctgtgaaggacaccagcgccaccacagccctggagctggtggccggggagcggctgtacaacgtggtggtggacacagaggtgacaggcaagaagctgctggagcggggggagctgaagaggcgctacaccatcatccccctgaacaagatcagcgcccgctgcatcgcccctgagaccctgcgggtggcccagaacctggtgggccctgacaacgtgcacgtggccctgagcctggtggagtacaagccagagctgcagaaggccatggagtttgtgtttggcaccacctttgtgtgtgacaacatggacaatgccaagaaggtggcctttgacaagaggatcatgaccaggacagtgaccctgggcggagatgtgtttgacccccacggcaccctgagcggcggggcccggagccaggccgccagcatcctgaccaagttccaggagctgaaggatgtgcaggatgagctgcgcatcaaggaaaatgagctgcgggccctggaggaggagctggccggcctgaagaacacagctgagaagtaccggcagctgaagcagcagtgggagatgaagacagaggaggccgacctgctgcagaccaagctgcagcagagcagctaccacaagcagcaggaggagctggatgccctgaagaagaccatcgaggagagcgaggagaccctgaagaacaccaaggagatccagaggaaggccgaggagaagtatgaggtgctggagaacaagatgaagaatgctgaggccgagcgggagcgggagctgaaggatgcccagaagaagctggactgtgccaagaccaaggcagatgccagcagcaagaagatgaaggagaagcagcaggaggtggaggccatcaccctggagctggaggagctgaagcgggagcacaccagctacaagcagcagctggaggccgtgaatgaggccatcaagagctatgagagccagatcgaggtgatggctgctgaggtggccaagaacaaggagagcgtgaacaaggcccaggaggaggtgaccaagcagaaggaggtgatcacagcccaggacaccgtcatcaaggccaagtatgcagaggtggccaagcacaaggagcagaacaatgacagccagctgaagatcaaggagctggaccacaacatcagcaagcacaagcgggaggctgaagatggagctgccaaggtgtccaagatgctgaaggactatgactggatcaatgctgagcggcacctgtttggccagcccaacagcgcctatgacttcaagaccaacaaccccaaggaggccggccagaggctgcagaagctgcaggagatgaaggagaagctgggcagaaatgtgaacatgagggccatgaatgtgctgacagaggccgaggagcgctacaatgacctgatgaagaagaagagaattgtggagaatgacaagagcaagatcctgaccaccatcgaggacctggaccagaagaagaaccaggccctgaacatcgcctggcagaaggtgaacaaggactttggcagcatcttcagcaccctgctgcccggggccaatgccatgctggcccctcctgagggccagacagtgctggatggcctggagttcaaggtggccctgggcaacacctggaaggagaacctgacagagctgagcggcggccagaggcagaagcagcagaaccacaccaccggctag

SEQ ID NO: 18777 - DNA, 381 bp, synthetic construct
  source 1..381: mol_type = other DNA; note = Synthetic coding sequence
atgttccagaaggatgagtactgcatcctgatcctgggcctggacaatgccggcaagaccaccttcctggagcagagcaagacccgcttcaacaagaactacaagggcatgagcctgagcaagatcaccaccaccgtgggcctgaacatcggcaccgtggatgtgggcaaggcccggctgatgttctgggacctgggcggccaggaggagctgcagagcctgtgggacaaggacaagaccaagtgtggggacctgggcaccctgcacagcagcaaggtgtctgccagcttccggctgcgggacctggccgctgaccaccacaggacccagaagtggcagaggccagatgtgggcacagctggctggctgcccctgccctag

SEQ ID NO: 18778 - DNA, 1119 bp, synthetic construct
  source 1..1119: mol_type = other DNA; note = Synthetic coding sequence
atgaccttccagttcaacttcaccatcgaggaccacctggagaatgagctgacccccatcagagatggagccctgaccctggacagcagcaaggagctgtctgtgtctgagagccagaagggggaggagcgggacagaaaatgttctgctgagcagtttgacctgccccaggaccacctgtgggagcacaagtccatggagaatgctgcccccagccaggacacagacagccccctgtctgctgccagcagcagcaggaacctggagccccacggcaagcagcccagcctgcgggccgccaaggagcacgccatgcccaaggacctgaagaagatgctggagaacaaggtgattgagaccctgcccggcttccagcacgtgaagctgtctgtggtgaagaccatcctgctgaaggagaacttccctggagagaacatcgtgtccaagagcttcagcagccacagcgacctgatcactggagtgtatgagggcggcctgaagatctgggagtgcacctttgacctgctggcctacttcaccaaggccaaggtgaagtttgctgggaagaaggtgctggacctgggctgcggcagcggcctgctgggcatcacagccttcaagggcggcagcaaggagatccacttccaggactacaacagcatggtgattgatgaggtgaccctgcccaacgtggtggccaacagcaccctggaggatgaagaaaatgatgtgaatgaaccagatgtgaagcgctgcaggaagcccaaggtgacccagctgtacaagtgccgcttcttctctggagagtggagcgagttctgcaagctggtgctgagcagcgagaagctgtttgtgaagtatgacctgatcctgaccagcgagaccatctacaacccagactactacagcaacctgcaccagaccttcctgcggctgctgagcaagaatggccgggtgctgctggccagcaaggcccactactttggagtgggcggcggcgtgcacctgttccagaagtttgtggaggagagagatgtgttcaagacccgcatcctgaagatcattgatgagggcctgaagcgcttcatcatcgagatcaccttcaagtttcctggatag

SEQ ID NO: 18779 - DNA, 1635 bp, synthetic construct
  source 1..1635: mol_type = other DNA; note = Synthetic coding sequence
atgaagtgccactatgaggccctgggcgtgagaagagatgccagcgaggaggagctgaagaaggcctacaggaagctggccctgaagtggcacccagacaagaacctggacaatgctgctgaggccgctgagcagttcaagctgatccaggccgcctatgatgtgctgagtgacccccaggagcgggcctggtatgacaaccaccgggaggccctgctgaagggcggctttgatggagagtaccaggatgacagcctggacctgctgcgctacttcaccgtgacctgctacagcggctatggagatgatgagaagggcttctacacagtgtacagaaatgtgtttgagatgattgccaaggaggagctggagagcgtgctggaggaggaggtggatgacttccccacctttggagacagccagagcgactatgacacagtggtgcaccccttctacgcctactggcagagcttctgcacccagaagaactttgcctggaaggaggagtatgacacccggcaggccagcaaccgctgggagaagagggccatggagaaggagaacaagaagatccgggacaaggccaggaaggagaagaatgagctggtgcggcagctggtggccttcatcaggaagagggacaagagggtgcaggcccacaggaagctggtggaggagcagaatgctgagaaggccaggaaggccgaggagatgaggcggcagcagaagctgaagcaggccaagctggtggagcagtaccgggagcagagctggatgaccatggccaacctggagaaggagctgcaggagatggaggcccgctatgagaaggagtttggagatggcagtgatgaaaatgagatggaggagcacgagctgaaggatgaagaagatggcaaggacagtgatgaagcagaagatgctgagctgtatgatgacctgtactgcccagcctgtgacaagagcttcaagacagagaaggccatgaagaaccacgagaagagcaagaagcaccgggagatggtggccctgctgaagcagcagctggaggaggaggaggagaacttcagccggccccagattgatgagaaccccctggatgacaacagcgaggaggagatggaggatgcccccaagcagaaggtgaagtacctgaccttccgcttcatctttgccctgcggctgagcaagaagcagaagaagaagaagcagaagccagcccagaactatgatgacaacttcaacgtgaatggacctggagagggcgtgaaggtggaccctgaggacaccaacctgaaccaggacagcgccaaggagctggaggacagcccccaggagaatgtgtctgtgacagagatcatcaagccctgtgatgaccccaagtctgaggccaagtctgtgcccaagcccaagggcaagaagaccaaggacatgaagaagcctgtgcgggtgcctgctgagccccagaccatgtctgtgctgatcagctgcaccacctgccacagcgagttccccagcaggaacaagctgtttgaccacctgaaggccactggacatgcccgggcccccagcagcagcagcctgaacagcgccaccagcagccagagcaagaaggagaagaggaagaacagatag

SEQ ID NO: 18780 - DNA, 945 bp, synthetic construct
  source 1..945: mol_type = other DNA; note = Synthetic coding sequence
atgcctggcttcacctgctgcgtgcccggctgctacaacaacagccaccgggacaaggccctgcacttctacaccttccccaaggatgctgagctgcggcggctgtggctgaagaatgtgtccagagctggggtgtctggctgcttcagcaccttccagcccaccaccggccaccggctgtgcagcgtgcacttccagggcggcaggaagacctacacagtgcgggtgcccaccatcttccccctgcggggcgtgaatgaaaggaaggtggcccggcggcctgctggagctgctgctgcccggcggcggcagcagcagcagcagcagcagcagcagcagcagcagcagcagcagcagcagcagcagcagcagcagcagcagcagcagcagcagcagagcagccccagcgccagcacagcccagacagcccagctgcagcccaacctggtgtctgccagcgctgctgtgctgctgaccctgcaggccaccgtggacagcagccaggcccctggctctgtgcagcctgcccccatcacccccactggagaagatgtgaagcccatcgacctgactgtgcaggtggagtttgctgctgctgagggcgctgctgctgctgctgctgccagcgagctgcaggccgccacagctggcctggaggccgctgagtgccccatgggcccccagctggtggtggtgggggaggagggcttcccagacaccggcagtgaccacagctacagcctgagcagcggcaccacagaggaggagctgctgaggaagctgaatgagcagagggacatcctggccctgatggaggtgaagatgaaggagatgaagggcagcatccgccacctgcggctgacagaggccaagctgcgggaggagctgcgggagaaggaccggctgctggccatggccgtcatcaggaagaagcacggcatgtag

SEQ ID NO: 18781 - DNA, 645 bp, synthetic construct
  source 1..645: mol_type = other DNA; note = Synthetic coding sequence
atggccggggagaactttgccacccccttccacggccacgtgggccgcggggccttcagtgatgtgtatgagcctgctgaggacaccttcctgctgctgaatgccctggaggccgctgctgctgagctggccggcgtggagatctgcctggaggtgggcagcggcagcggcgtggtgtctgccttcctggcctccatgattggcccccaggccctgtacatgtgcacagacatcaaccctgaggccgccgcctgcaccctggagacagcccgctgcaacaaggtgcacatccagcctgtgatcacagacctggtgaagggcctgctgccccggctgacagagaaggtggacctgctggtgttcaaccccccctacgtggtgaccccaccccaggaggtgggcagccacggcatcgaggccgcctgggccggcggcaagaatggccgggaggtgatggaccgcttcttccccctggtgcctgacctgctgagccccaagggcctcttctacctggtgaccatcaaggagaacaaccctgaggagatcctgaagatcatgaagaccaagggcctgcagggcaccacagccctgagccggcaggccggccaggagaccctgtctgtgctgaagttcaccaagagctag

SEQ ID NO: 18782 - DNA, 1536 bp, synthetic construct
  source 1..1536: mol_type = other DNA; note = Synthetic coding sequence
atgtctgggggctttgagctgcagcccagagatggcggcccccgggtggccctggcccctggagaaacagtgattggccggggccccctgctgggcatcacagacaagagggtgtccagaagacatgccatcctggaggtggccggcggccagctgcgcatcaagcccatccacaccaacccctgcttctaccagagcagcgagaagagccagctgctgcccctgaagcccaacctgtggtgctacctgaaccctggggacagcttcagcctgctggtggacaagtacatcttccgcatcctgagcatccccagcgaggtggagatgcagtgcaccctgaggaacagccaggtgctggatgaggacaacatcctgaatgagacccccaagagccctgtgatcaacctgccccatgagaccactggagccagccagctggagggcagcacagagatcgccaagacccagatgacccccaccaacagcgtgtccttcctgggggagaacagagactgcaacaagcagcagcccatcctggccgagaggaagaggatcctgcccacctggatgctggccgagcacctgagtgaccagaacctgtctgtgcctgccatcagcggcggcaatgtcatccagggcagcggcaaggaggagatctgcaaggacaagagccagctgaacaccacccagcagggccggcggcagctgatcagcagcggcagcagcgagaacaccagcgctgagcaggacacaggagaggagtgcaagaacacagaccaggaggagagcaccatcagcagcaaggagatgccccagagcttcagcgccatcaccctgagcaacacagagatgaacaacatcaagaccaatgcccagaggaacaagctgcccatcgaggagctgggcaaggtgtccaagcacaagatcgccaccaagaggaccccccacaaggaggatgaggccatgagctgcagcgagaactgcagcagcgcccagggcgacagcctgcaggatgagagccagggcagccacagcgagagcagcagcaaccccagcaaccctgagaccctgcacgccaaggccacagacagcgtgctgcagggcagcgagggcaacaaggtgaagaggaccagctgcatgtatggagccaactgctacaggaagaaccctgtgcacttccagcacttcagccaccctggggacagcgactatggaggagtgcagatcgtgggccaggatgaaacagatgacaggcctgagtgcccctacggccccagctgctacaggaagaacccccagcacaagattgagtaccgccacaacaccctgcctgtgagaaatgtgctggatgaagataatgacaacgtgggccagcccaatgaatatgacctgaatgacagcttcctggatgatgaggaggaggactatgagcccacagatgaagattctgactgggagcccgggaaggaggatgaggagaaggaggatgtggaggagctgctgaaggaggccaagcgcttcatgaagaggaagtag

SEQ ID NO: 18783 - DNA, 984 bp, synthetic construct
  source 1..984: mol_type = other DNA; note = Synthetic coding sequence
atggctgctgctgctgctgctgctgctgccaccaacggcaccggcggcagcagcggcatggaggtggatgctgctgtggtgcccagcgtgatggcctgtggggtgacaggctctgtgtctgtggccctgcaccccctggtgatcctgaacatcagtgaccactggatccgcatgaggagccaggagggccggcctgtgcaggtgattggagccctgattggcaagcaggagggcagaaatattgaggtgatgaacagctttgagctgctgagccacacagtggaggagaagatcatcatcgacaaggagtactactacaccaaggaggagcagttcaagcaggtgttcaaggagctggagttcctgggctggtacaccactggaggccccccagaccccagcgacatccacgtgcacaagcaggtgtgtgagatcatcgagagccccctcttcctgaagctgaaccccatgaccaagcacacagacctgcctgtgtctgtgtttgagagcgtcatcgacatcatcaacggggaggccaccatgctgtttgctgagctgacctacaccctggccacagaggaggccgagcgcatcggcgtggaccacgtggccaggatgacagccactggaagtggagagaacagcacagtggccgagcacctgattgcccagcacagcgccatcaagatgctgcacagccgggtgaagctgatcctggagtatgtgaaggccagcgaggccggggaggtgcccttcaaccacgagatcctgcgggaggcctatgccctgtgccactgcctgcctgtgctgagcacagacaagttcaagacagacttctatgaccagtgcaatgatgtgggcctgatggcctacctgggcaccatcaccaagacctgcaacaccatgaaccagtttgtgaacaagttcaacgtgctgtatgaccggcagggcatcggccgcaggatgaggggcctcttcttctag

SEQ ID NO: 18784 - DNA, 2574 bp, synthetic construct
  source 1..2574: mol_type = other DNA; note = Synthetic coding sequence
atgaactaccagcagcagctggccaacagcgctgccatccgggcagagatccagagatttgagagcgtgcaccccaacatctacagcatctatgagctgctggagcgggtggaggagcctgtgctgcagaaccagatccgggagcacgtgattgccattgaagatgcctttgtgaacagccaggagtggaccctgagccgctctgtgcctgagctgaaggtgggcatcgtgggcaacctggccagcggcaagagcgccctggtgcaccgctacctgaccggcacctacgtgcaggaggagagccctgagggcggccgcttcaagaaggagatcgtggtggatggccagagctacctgctgctgatcagagatgagggcggccccccagaggcccagtttgccatgtgggtggatgctgtgatctttgtgttcagcctggaggatgagatctccttccagacagtgtaccactactacagcaggatggccaactacagaaacaccagcgagatccccctggtgctggtgggcacccaggatgccatcagcagcgccaacccccgggtgattgatgatgcccgggccaggaagctgagcaatgacctgaagcgctgcacctactatgagacctgtgccacctacggcctgaatgtggagagggtcttccaggatgtggcccagaagatcgtggccaccaggaagaagcagcagctgagcatcggcccctgcaagagcctgcccaacagccccagccacagctctgtgtgcagcgcccaggtgtctgctgtgcacatcagccagaccagcaatggaggcggcagcctgagtgactacagcagctctgtgcccagcacccccagcaccagccagaaggagctgagaattgatgtgcccccaacagccaacacccccacccctgtgaggaagcagagcaagagaagaagcaacctcttcaccagcaggaagggcagtgaccctgacaaggagaagaagggcctggagagcagagctgacagcatcggcagcggccgggccatccccatcaagcagggcatgctgctgaagaggtctgggaagagcctgaacaaggagtggaagaagaagtatgtgaccctgtgtgacaatggagtgctgacctaccaccccagcctgcatgactacatgcagaatgtgcacggcaaggagattgacctgctgcggaccaccgtgaaggtgcctgggaagaggcctccccgggccaccagcgcctgtgcccccatcagcagccccaagaccaacggcctgagcaaggacatgagcagcctgcacatcagccccaacagcggaaatgtgaccagcgccagcggcagccagatggccagcggcatcagcctggtgtccttcaacagcaggccagatggcatgcaccagaggagctacagcgtgtcctctgctgaccagtggagcgaggccaccgtgattgccaacagcgccatcagcagtgacaccggcctgggggacagcgtgtgcagcagccccagcatcagcagcaccaccagccccaagctggaccccccacccagcccccacgccaacaggaagaagcacaggaggaagaagagcaccagcaacttcaaggcagatggcctgagcggcacagctgaggagcaggaggagaactttgagttcatcatcgtgtccctgaccggccagacctggcactttgaggccaccacctatgaggagagagatgcctgggtgcaggccatcgagagccagatcctggccagcctgcagagctgtgagagcagcaagaacaagagccggctgaccagccagagcgaggccatggccctgcagagcatccggaacatgaggggcaacagccactgtgtggactgtgagacccagaaccccaactgggccagcctgaacctgggcgccctgatgtgcatcgagtgcagcggcatccacaggaacctgggcacccacctgagccgggtgcgcagcctggacctggatgactggcctgtggagctgatcaaggtgatgagcagcattggaaatgagctggccaacagcgtgtgggaggagagcagccagggccgcaccaagcccagcgtggacagcacccgggaggagaaggagcgctggatccgggccaagtatgagcagaagctgttcctggcccccctgccctgcacagagctgagcctgggccagcacctgctgcgggccacagcagatgaggacctgaggacagccatcctgctgctggcccacggcagcagagatgaggtgaatgagacctgtggggagggagatggccgcacagccctgcacctggcctgcaggaaaggaaatgtggtgctggcccagctgctgatctggtatggagtggatgtgacagccagagatgcccacggcaacacagccctggcctatgcccggcaggccagcagccaggagtgcattgatgtgctgctgcagtatggctgcccagatgaaagatttgtgctgatggccacccccaacctgagcagaagaaacaacaacagaaacaacagcagcggccgggtgcccaccatcatctag

SEQ ID NO: 18785 - DNA, 1653 bp, synthetic construct
  source 1..1653: mol_type = other DNA; note = Synthetic coding sequence
atgagccagaccagcctgaagcagaagaagaatgaacctggcatgaggagcagcaaggagagcctggaggccgagaagaggaaggagagtgacaagacaggagtgcggctgagcaaccagggcagccaggagagcagcctgaggaagacagacagccggggctacctggtgcgcagccagtggagccgcatcagccgcagccccagcaccaaggcccccagcattgatgagcccaggagcaggaacaccagcgccaagctgcccagcagcagcaccagcagcaggacccccagcaccagccccagcctgcatgacagcagccccccacccctgagcggccagcccagcctgcagcccccagccagcccccagctgcccaggagcctggacagcaggcctcccaccccacctgagccagaccccggcagccgccgcagcaccaagatgcaggagaaccctgaggcctgggcccagggcatcgtgcgggagatccggcagacccgggacagccagcccctggagtacagcaggaccagccccacagagtggaagagcagcagccagaggcggggcatctacccagccagcacccagctggacaggaacagcctgtctgagcagcagcagcagcagagagaagatgaagatgattatgaggccgcctactgggcctccatgaggagcttctatgagaagaaccccagctgcagccggccctggccacccaagcccaagaatgccatcaccatcgccctgagcagctgtgccctcttcaacatggtggatggcaggaagatctatgagcaggagggcctggagaagtacatggagtaccagctgaccaatgaaaatgtcatcctgaccccaggccctgccttccgctttgtgaaggccctgcagtatgtgaatgcccggctgcgggacctgtacccagatgagcaggacctgtttgatattgtgctgatgaccaacaaccacgcccaggtgggcgtgcggctcatcaacagcgtgaaccactacggcctgctgattgaccgcttctgcctgaccggcggcaaggaccccatcggctacctgaaggcctacctgaccaacctgtacatcgctgctgacagcgagaaggtgcaggaggccatccaggagggcatcgccagcgccaccatgtttgatggagccaaggacatggcctactgtgacacccagctgcgggtggcctttgatggagatgctgtgctcttcagtgatgaaagtgagcacttcaccaaggagcacggcctggacaagttcttccagtatgacaccctgtgtgagagcaagcccctggcccagggccccctgaagggcttcctggaggacctgggccgcctgcagaagaagttctacgccaagaatgaaaggctgctgtgccccatccgcacctacctggtgacagcccggtctgctgccagcagcggggcccgggtgctgaagaccctgcggcgctggggcctggagattgatgaggccctcttcctggccggggcccccaagagccccatcctggtgaagatccggccccacatcttctttgatgaccacatgttccacatcgagggcgcccagaggctgggcagcattgctgcctacggcttcaacaagaagttcagcagctag

SEQ ID NO: 18786 - DNA, 888 bp, synthetic construct; identical to SEQ ID NO: 18344
  source 1..888: mol_type = other DNA; note = Synthetic coding sequence

SEQ ID NO: 18787 - DNA, 549 bp, synthetic construct
  source 1..549: mol_type = other DNA; note = Synthetic coding sequence
atgagcggccgctctgtgccccacgcccacccagccacagcagaatatgaatttgccaaccccagccggctgggggagcagagatttggagagggcctgctgcctgaggagatcctgacccccaccctgtaccacggctactacgtgcggcccagggctgccccagctggggagggcagccgggccggggccagcgagctgcggctgtctgagggcaagttccaggccttcctggatgtgagccacttcaccccagatgaggtgacagtgaggacagtggacaacctgctggaggtgtctgcccggcacccccagaggctggacagacatggctttgtgtcccgggagttctgcaggacctacgtgctgcctgcagatgtggacccctggagggtgcgggccgccctgagccatgatggcatcctgaacctggaggccccccggggcggccgccacctggacacagaggtgaatgaggtgtacatcagcctgctgcctgcccccccagaccctgaggaggaggaggaggccgccatcgtggagccctag

SEQ ID NO: 18788 - DNA, 636 bp, synthetic construct
  source 1..636: mol_type = other DNA; note = Synthetic coding sequence
atgagcacagctgctgtgcctgagctgaagcagatcagccgggtggaggccatgaggctgggccctggctggagccacagctgccacgccatgctgtatgctgccaaccctggccagctgtttggccgcatccccatgaggttctctgtgctgatgcagatgagatttgatggcctgctgggcttccctgggggctttgtggaccggcgcttctggagcctggaggatggcctgaacagagtgctgggcctgggcctgggctgcctgcggctgacagaggccgactacctgagcagccacctgacagagggcccccaccgggtggtggcccacctgtatgcccggcagctgaccctggagcagctgcatgctgtggagatctctgctgtgcacagccgggaccacggcctggaggtgctgggcctggtgcgggtgcccctgtacacccagaaggacagagtgggcggcttccccaacttcctgagcaatgcctttgtgtccacagccaagtgccagctgctgtttgccctgaaggtgctgaacatgatgcctgaggagaagctggtggaggccctggccgccgccacagagaagcagaagaaggccctggagaagctgctgcctgccagcagctag

SEQ ID NO: 18789 - DNA, 2622 bp, synthetic construct
  source 1..2622: mol_type = other DNA; note = Synthetic coding sequence
atgcaccccccacctcctgctgctgccatggacttcagccagaacagcctgtttggctacatggaggacctgcaggagctgaccatcatcgagaggcctgtgagaagaagcctgaagaccccagaggagattgaaaggctgactgtggatgaggacctgagtgacatcgagagagctgtgtacctgctgtctgctggccaggatgtgcagggcacctctgtgattgccaacctgcccttcctgatgaggcagaaccccacagagaccctgcggcgggtgctgcccaaggtgcgggaggccctgcacgtggccggcgtggagatgcagctgacagctgccatgtccttcctgaccatcctgcaggatgagagcgtgtccatccacgcctacacccacagcttcctgcaggtgatcctgctgcacctggagcaccgggacacaggagtgtccaatgcctggctggagaccctgctgtctgtgattgaggtgctgcccaaggagaccctgcggcatgagatcctgaaccccctggtgtccaaggcccagctgagccagacagtgcagagccggctggtgtcctgcaagatcctgggcaagctgaccaacaagtttgatgcccacaccatcaagcgggagatcctgcccctggtgaagagcctgtgccaggatgtggagtatgaggtgcgcagctgcatgtgccggcagctggagaacatcgcccagggcattggaacagagctgaccaagtctgtggtgctgcctgagctgattgagctgagcagagatgagggcagctctgtgcggctggccgcctttgagaccctggtgaacctgctggacatctttgacacagatgacaggagccagaccatcctgcccctggtgaagagcttctgtgagaagagcttcaaggcagatgagagcatcctgatcagcctgtccttccacctgggcaagctgtgccacggcctgtatggcatcttcaccccagaccagcacctgcgcttcctggagttctacaagaagctgtgcaccctgggcctgcagcaggagaatggccacaatgaaaaccagatccccccccagatcctggagcaggagaagaagtacatctctgtgaggaagaactgtgcctacaacttccctgccatgattgtgtttgtggaccccaagaacttccacatggagctgtacagcaccttcttctgcctgtgccacgaccctgaggtgcctgtgcgctacaccatcgccatctgcttctatgaggtgtccaagctgctgaacagcggcgtgtacctgatccacaaggagctgatcaccctgctgcaggatgagagcctggaggtgctggatgccctgattgaccacctgcctgagatcctggagctgatgagcactggaggagagagctctgtgcaggagaacaagctgagcagcctgcctgacctgatcccagccctgacagctgctgagcagagagctgctgccagcctgaagtggaggacccatgagaagctgctgcagaagtatgcctgcctgccccacgtgatcagcagtgaccagatctactaccgcttcctgcagaggatgttcaccatcatgatgaccaacaacgtgctgcctgtgcagaaggccgccagcaggaccctgtgcatcttcctgcgctacaacaggaagcaggagcagagacatgaggtgatccagaagctgattgagcagctgggccagggcaagagctactggaaccggctgcgcttcctggacacctgtgagttcatcatcgagatcttcagcaagagcttcttctgcaagtacttcttcctgcctgccatcgagctgacccatgaccctgtggccaacgtgaggatgaagctgtgctacctgctgcccaaggtgaagagcaccctgaagatcccagctgacaagcacctgctgcagcagctggagatgtgtgtgaggaagctgctgtgccaggagaaggacaaggatgtgctggccatcgtgaagaggacagtgctggagctggacaggatggagatgtccatggatgccttccagaagaagttctatgagaaggacctgctggaccaggagaaggagcgggaggagctgctgctgctggagatggagcagctggagaaggagaagcagcagaatgatggccggcccatgtctgacaagatgtttgagaagaagagaagagacaccaagacccccacccagagcctgcccaagaacatccccatctctgtgcccggccccagctctgtgacccccagcaccagcaaggagatcaagaagagcaagctgatccgcagccagagcttcaacaaccaggccttccacgccaagtatggcaacctggagaagtgtgccagcaagagcagcaccaccggctacaccacctctgtgtctggcctgggcaagacctctgtgctgagcctggctgatgacagcttccgcaccagaaatgccagctctgtgcccagcagcttcagccccaacacccccctgcccagcaccagccggggcactggaaacagcgtggaccccaagagcagcggcagcaaggacacccagcccaggaaggccaccctgaagagcaggaagagcaacccctag

SEQ ID NO: 18790 - DNA, 951 bp, synthetic construct
  source 1..951: mol_type = other DNA; note = Synthetic coding sequence
atgaggcagcccctgtcctggggccgctggagggccatgctggcccggacctacggccctggccccagcgctggctaccgctgggccagcggggcccagggctacgtgagaaatcctcctgtgggcgcctgtgacctgcagggcgagctggacagatttggaggcatctctgtgcggctggcccggctggatgccctggaccggctggatgctgctgccttccagaagggcctgcaggccgctgtgcagcagtggaggtctgagggccgcacagctgtgtggctgcacatccccatcctgcagagccgcttcatcgccccagctgccagcctgggcttctgcttccaccacgccgagagtgacagcagcaccctgaccctgtggctgcgggagggccccagccggctgcccggctacgccagccaccaggtgggcgtggccggggctgtgtttgatgagagcaccaggaagatcctggtggtgcaggacaggaacaagctgaagaacatgtggaagtttcctgggggcctgtctgagcctgaggaggacatcggggacacagctgtgcgggaggtgtttgaggagaccggcatcaagtctgagttccgctctgtgctgagcatccggcagcagcacaccaaccctggggccttcggcaagagtgacatgtacatcatctgccgcctgaagccctacagcttcaccatcaacttctgccaggaggagtgcctgcgctgtgagtggatggacctgaatgacctggccaagacagagaacaccacccccatcaccagccgggtggcccggctgctgctgtatggctaccgggagggctttgacaagattgacctgactgtggaggagctgcctgctgtgtacacaggcctcttctacaagctgtaccacaaggagctgcctgagaactacaagaccatgaagggcattgattag

SEQ ID NO: 18791 - DNA, 537 bp, synthetic construct
  source 1..537: mol_type = other DNA; note = Synthetic coding sequence
atgggagagacctggaagaacatctgcagcacagtgcgccacggctggtggctgcgggaccacaggatggccggcctgcccatccccccagagatcgtgaaggaggccgaggtgccccaggccgccctgggcgtgcctgcccagggcaccggggacaatggccacacccctgtggaggaggaggtgggcggcatccctgtgcctgcccctggcctgctgcaggtgacagagcggcggcagcccctgagctctgtgagcagcctggaggtgcactttgacctgctggacctgacagagctgacagacatgtctgaccaggagctggccgaggtgtttgctgacagtgatgatgagaacctgaacacagagagccctgctggcctgcaccccctgccccgggccggctacctgcggagccccagctggaccaggaccagggctgagcagagccatgagaagcagcccctgggggaccctgagcggcaggccaccgtgctggacaccttcctgactgtggagcggccccaggaggactag

SEQ ID NO: 18792 - DNA, 741 bp, synthetic construct
  source 1..741: mol_type = other DNA; note = Synthetic coding sequence
atggccgagcaggagcagaggaagatccccctggtgcctgagaacctgctgaagaagaggaaggcctaccaggccctgaaggccacccaggccaagcaggccctgctggccaagaaggagcagaagaagggcaagggcctgcgcttcaagaggctggagagcttcctgcatgacagctggaggcagaagagggacaaggtgcggctgcggcggctggaggtgaagccccacgccctggagctgcctgacaagcacagcctggcctttgtggtgagaattgaaagaattgatggagtgtccctgctggtgcagaggaccatcgcccggctgcggctgaagaagatcttctctggagtgtttgtgaaggtgaccccccagaacctgaagatgctgagaattgtggagccctacgtgacctggggcttccccaacctgaagtctgtgcgggagctgatcctgaagaggggccaggccaaggtgaagaacaagaccatccccctgacagacaacacagtgattgaggagcacctgggcaagtttggagtcatctgcctggaggacctgatccacgagatcgccttccctgggaagcacttccaggagatctcctggttcctgtgccccttccacctgtctgtggcccggcatgccaccaagaacagagtgggcttcctgaaggagatgggcaccccaggctacagaggagagcgcatcaaccagctgatccggcagctgaactag

SEQ ID NO: 18793 - DNA, 2442 bp, synthetic construct
  source 1..2442: mol_type = other DNA; note = Synthetic coding sequence
atggcctggccctgcatcacccgggcctgctgcatcgcccgcttctggaaccagctggacaaggctgacattgctgtgcccctggtgttcaccaagtacagcgaggccacagagcaccctggggccccaccccagcccccaccaccccagcagcaggcccagcctgccctggcccctccttctgcccgggctgtggccatcgagacccagcctgcccagggcgagctggatgctgtggcccgggccactggacctgcccctggccccaccggggagcgggagcctgctgctggccctggccgcagcggccctggccctggcctgggcagcggcagcaccagcggccctgctgacagcgtgatgaggcaggactaccgggcctggaaggtgcagaggcctgagcccagctgccggcccaggtctgagtaccagcccagtgatgccccctttgagcgggagacccagtaccagaaggacttccgggcctggcccctgcccaggagaggagaccacccctggatccccaagcctgtgcagatctctgctgccagccaggccagcgcccccatcctgggcgcccccaagaggcggccccagagccaggagcgctggcctgtgcaggccgctgctgaggcccgggagcaggaggccgcccctggaggagctgggggcctggccgccggcaaggccagcggggctgatgagcgggacaccaggaggaaggccggccctgcctggatcgtgagaagagctgagggcctgggccacgagcagacccccctgcctgctgcccaggcccaggtgcaggccactggacctgaggccggccggggccgggctgctgctgatgccctgaaccggcagatccgggaggaggtggccagcgctgtgagcagcagctacagaaatgagttccgggcctggacagacatcaagcctgtgaagcccatcaaggccaagccccagtacaagcccccagatgacaagatggtgcatgagaccagctacagcgcccagttcaagggggaggccagcaagcccaccacagctgacaacaaggtgattgacagaagacgcatccgcagcctgtacagcgagcccttcaaggagccccccaaggtggagaagcccagcgtgcagagcagcaagcccaagaagaccagcgccagccacaagcccaccaggaaggccaaggacaagcaggccgtgtctggccaggccgccaagaagaagtctgctgagggccccagcaccaccaagccagatgacaaggagcagagcaaggagatgaacaacaagctggccgaggccaaggagagcctggcccagcctgtgtctgacagcagcaagacccagggccctgtggccacagagccagacaaggaccagggctctgtggtgcccggcctgctgaagggccagggccccatggtgcaggagcccctgaagaagcagggctctgtggtgcccggcccccccaaggacctgggccccatgatccccctgcctgtgaaggaccaggaccacacagtgcctgagcccctgaagaatgaaagccctgtgatcagcgcccctgtgaaggaccagggccccagcgtgcctgtgccccccaagaaccagagccccatggtgcctgccaaggtgaaggaccagggctctgtggtgcctgagagcctgaaggaccagggcccccgcatccctgagcctgtgaagaaccaggcccccatggtgcctgcccctgtgaaggatgagggccccatggtgtctgcctctgtgaaggaccagggccccatggtgtctgcccctgtgaaggaccagggccccatcgtgcctgcccctgtgaagggggagggccccatcgtgcctgcccctgtgaaggatgagggccccatggtgtctgcccccatcaaggaccaggaccccatggtgcctgagcaccccaaggatgaaagtgccatggccacagcccccatcaagaaccagggctccatggtgtctgagcctgtgaagaaccagggcctggtggtgtctggccctgtgaaggaccaggatgtggtggtgcctgagcacgccaaggtgcatgacagcgctgtggtggcccctgtgaagaaccagggccctgtggtgcctgagagcgtgaagaaccaggaccccatcctgcctgtgctggtgaaggaccagggccccaccgtgctgcagccccccaagaaccagggcagaattgtgcctgagcccctgaagaaccaggtgcccatcgtgcctgtgcccctgaaggaccaggaccccctggtgcctgtgcctgccaaggaccagggccctgctgtgcctgagcccctgaagacccagggcccccgggacccccagctgcccaccgtgagccccctgccccgggtgatgatccccacagccccccacacagagtacatcgagagcagcccctag

SEQ ID NO: 18794 - DNA, 261 bp, synthetic construct
  source 1..261: mol_type = other DNA; note = Synthetic coding sequence
atgccccagtaccagacctgggaggagttcagcagagctgctgagaagctgtacctggccgaccccatgaaggcccgggtggtgctgaagtaccgccacagtgatggcaacctgtgtgtgaaggtgacagatgacctggtgtgcctggtgtacaagacagaccaggcccaggatgtgaagaagattgagaagttccacagccagctgatgaggctgatggtggccaaggaggccagaaatgtgaccatggagacagaatag

SEQ ID NO: 18795 - DNA, 1206 bp, synthetic construct
  source 1..1206: mol_type = other DNA; note = Synthetic coding sequence
atggcccacgtgagcagcgagacccaggatgtgagccccaaggatgagctgacagccagcgaggccagcaccaggagccccctgtgtgagcacaccttccctggggacagcgacctgcgctccatgattgaggagcacgccttccaggtgctgagccagggcagcctgctggagagccccagctacacagtgtgtgtgtctgagccagacaaggatgatgacttcctgagcctgaacttccccaggaagctgtggaagatcgtggagagtgaccagttcaagagcatctcctgggatgaaaatggcacctgcatcgtcatcaatgaggagctgttcaagaaggagatcctggagaccaaggccccctaccgcatcttccagacagatgccatcaagagctttgtgcggcagctgaacctgtatggcttcagcaagatccagcagaacttccagaggtctgccttcctggccaccttcctgtctgaggagaaggagagctctgtgctgagcaagctgaagttctactacaaccccaacttcaagaggggctacccccagctgctggtgcgggtgaagagaagaattggagtgaagaatgccagccccatcagcaccctcttcaatgaagacttcaacaagaagcacttccgggccggggccaacatggagaaccacaacagcgccctggccgctgaggccagcgaggagagcctcttcagcgccagcaagaacctgaacatgcccctgacccgggagagctctgtgcggcagatcatcgccaacagctctgtgcccatccgcagcggcttccccccacccagccccagcacctctgtgggccccagcgagcagatcgccacagaccagcacgccatcctgaaccagctgaccaccatccacatgcacagccacagcacctacatgcaggcccggggccacatcgtgaacttcatcaccaccaccaccagccagtaccacatcatcagccccctgcagaatggctacttcggcctgactgtggagcccagcgctgtgcccacccgctaccccctggtgtctgtgaatgaggccccctacagaaacatgctgcctgctggcaacccctggctgcagatgcccaccatcgctgacagatctgctgccccccacagccggctggccctgcagcccagccccctggacaagtaccaccccaactacaactag

SEQ ID NO: 18796 - DNA, 4302 bp, synthetic construct
  source 1..4302: mol_type = other DNA; note = Synthetic coding sequence
atgtggagcctgacagccagcgagggggagagcaccacagcccacttcttcctgggcgctggagatgagggcctgggcacccggggcatcggcatgaggcctgaggagagtgacagcgagctgctggaggatgaggaggatgaggtgcccccagagccccagatcatcgtgggcatctgtgccatgaccaagaagagcaagagcaagcccatgacccagatcctggagcggctgtgccgctttgactacctgactgtggtgatcctgggagaagatgtgatcctgaatgaacctgtggagaactggcccagctgccactgcctgatctccttccacagcaagggcttccccctggacaaggctgtggcctacagcaagctgaggaaccccttcctgatcaatgacctggccatgcagtactacatccaggacagaagagaggtgtaccgcatcctgcaggaggagggcatcgacctgcccaggtatgctgtgctgaacagagatcctgcccggcctgaggagtgcaacctgattgaaggagaggaccaggtggaggtgaatggagctgtgttccccaagccctttgtggagaagcctgtgtctgctgaggaccacaacgtgtacatctactaccccagcagcgctgggggcggcagccagaggctcttcaggaagattggcagccgcagctctgtgtacagccctgagagctctgtgaggaagacaggcagctacatctatgaggagttcatgcccacagatggaacagatgtgaaggtgtacacagtgggccctgactatgcccacgccgaggccaggaagagccctgccctggatggcaaggtggagcgggacagcgagggcaaggagatccgctaccctgtgatgctgacagccatggagaagctggtggccaggaaggtgtgtgtggccttcaagcagacagtgtgtggctttgacctgctgcgggccaacggccacagctttgtgtgtgatgtgaatggcttctcctttgtgaagaacagcatgaagtactatgatgactgtgccaagatcctgggcaacaccatcatgagggagctggccccccagttccagatcccctggagcatccccacagaagctgaggacatccccatcgtgcccaccaccagcggcaccatgatggagctgcgctgtgtgattgccatcatccgccacggggacaggacccccaagcagaagatgaagatggaggtgaagcacccccgcttctttgccctgtttgagaagcatggaggctacaagacaggcaagctgaagctgaagaggcctgagcagctgcaggaggtgctggacatcacccggctgctgctggccgagctggagaaggagcctggaggagaaattgaggagaagacaggcaagctggagcagctgaagtctgtgctggagatgtatggccacttcagcggcatcaacaggaaggtgcagctgacctactacccccatggagtgaaggccagcaatgaaggccaggacccccagcgggagaccctggcccccagcctgctgctggtgctgaagtggggcggggagctgaccccagctggccgggtgcaggccgaggagctgggccgggccttccgctgcatgtacccaggcggccagggcgactatgccggcttccctggctgcggcctgctgcggctgcacagcaccttcagacatgacctgaagatctatgccagtgatgagggccgggtgcagatgacagctgctgcctttgccaagggcctgctggccctggagggggagctgacccccatcctggtgcagatggtgaagagcgccaacatgaatggcctgctggacagtgatggagacagcctgagcagctgccagcaccgggtgaaggcccggctgcaccacatcctgcagcaggatgccccctttggacctgaggactatgaccagctggcccccaccaggagcaccagcctgctgaacagcatgaccatcatccagaaccctgtgaaggtgtgtgaccaggtgtttgccctgattgagaacctgacccaccagatccgggagaggatgcaggaccccaggtctgtggacctgcagctgtaccacagcgagaccctggagctgatgctgcagcgctggagcaagctggagcgggacttccggcagaagagcggccgctatgacatcagcaagatcccagacatctatgactgtgtgaagtatgatgtgcagcacaacggcagcctgggcctgcagggcacagctgagctgctgcggctgagcaaggccctggctgatgtggtgatcccccaggagtatggcatcagccgggaggagaagctggagattgctgtgggcttctgcctgcccctgctgaggaagatcctgctggacctgcagaggacccatgaagatgagagcgtgaacaagctgcaccccctgtgctacctgcgctacagcagaggagtgctgagccctggccgccacgtgaggacccggctgtacttcaccagcgagagccacgtgcacagcctgctgagcgtcttccgctatggaggcctgctggatgagacccaggatgcccagtggcagagggccctggactacctgagcgccatcagcgagctgaactacatgacccagatcgtcatcatgctgtatgaggacaacacccaggaccccctgtctgaggagcgcttccacgtggagctgcacttcagccctggggtgaagggcgtggaggaggagggcagcgccccagctggctgcggcttccggcctgccagcagtgaaaatgaggagatgaagaccaaccagggctccatggagaacctgtgccctgggaaggccagtgatgagccagaccgggccctgcagaccagcccccagcccccagagggccctggcctgcccaggaggagccccctcatccggaacaggaaggccggctccatggaggtgctgtctgagaccagcagcagcaggcctgggggctaccgcctcttcagcagcagccggcccccaacagagatgaagcagagcggcctgggcagccagtgcaccggcctcttcagcaccaccgtgctgggcggcagcagcagcgcccccaacctgcaggactatgcccggagccacggcaagaagctgcccccagccagcctgaagcacagagatgagctgctgtttgtgcctgctgtgaagcgcttctctgtgtcctttgccaagcaccccaccaacggctttgagggctgcagcatggtgcccaccatctaccccctggagaccctgcacaatgccctgagcctgcggcaggtgtctgagttcctgagccgggtgtgccagaggcacacagatgcccaggcccaggccagcgctgccctgtttgacagcatgcacagcagccaggccagtgacaaccccttcagcccccccaggaccctgcacagcccccccctgcagctgcagcagaggtctgagaagccaccctggtacagcagcggccccagcagcacagtgtcctctgctggccccagcagccccaccaccgtggatggcaacagccagtttggcttcagtgaccagcccagcctgaacagccacgtggccgaggagcaccagggcctgggcctgctgcaggagaccccaggcagcggggcccaggagctgagcattgaaggagagcaggagctgtttgagcccaaccagagcccccaggtgccccccatggagaccagccagccctatgaggaggtgtcccagccctgccaggaggtgcctgacatcagccagccctgccaggacatcagcgaggccctgagccagccctgccagaaggtgcctgacatcagccagcagtgccaggagaaccacgacaatggaaaccacacctgccaggaggtgccccacatcagccagccctgccagaagagcagccagctgtgccagaaggtgtctgaggaggtgtgccagctgtgcctggagaacagcgaggaggtgtcccagccctgccagggcgtgtctgtggaggtgggcaagctggtgcacaagttccacgtgggcgtgggcagcctggtgcaggagaccctggtggaggtgggcagccctgctgaggagatccctgaggaggtgatccagccctaccaggagttctctgtggaggtgggccgcctggcccaggagaccagcgccatcaacctgctgagccagggcatccctgagattgacaagcccagccaggagttccctgaggagattgacctgcaggcccaggaggtgcctgaggagatcaactag

SEQ ID NO: 18797 - DNA, 1137 bp, synthetic construct
  source 1..1137: mol_type = other DNA; note = Synthetic coding sequence
atggattctgtgcgcagcggggccttcggccacctgttccggccagacaacttcatcttcggccagagcggggccggcaacaactgggccaagggccactacacagaaggagctgagctggtggacagcgtgctggatgtggtgaggaaagaatgtgagaactgtgactgcctgcagggcttccagctgacccacagcctgggcggcggcactggaagtggcatgggcaccctgctgatcagcaaggtgcgggaggagtacccagaccgcatcatgaacaccttctctgtggtgcccagccccaaggtgtctgacacagtggtggagccctacaatgccaccctgagcatccaccagctggtggagaacacagatgagacctactgcatcgacaatgaggccctgtatgacatctgcttccgcaccctgaagctggccacccccacctacggggacctgaaccacctggtgtctgccaccatgtctggagtgaccaccagcctgcgcttccctggccagctgaatgctgacctgaggaagctggccgtgaacatggtgcccttcccccggctgcacttcttcatgcctggctttgcccccctgacagcccggggcagccagcagtaccgggccctgactgtgcctgagctgacccagcagatgtttgatgccaagaacatgatggccgcctgtgaccccaggcatggccgctacctgactgtggccaccgtcttccggggccgcatgtccatgaaggaggtggatgagcagatgctggccatccagagcaagaacagcagctactttgtggagtggatccccaacaacgtgaaggtggccgtgtgtgacatccccccccggggcctgaagatgagcagcaccttcatcggcaacagcacagccatccaggagctgttcaagaggatcagcgagcagttcaccgccatgttccggaggaaggccttcctgcactggtacacaggagagggcatggatgagatggagttcacagaagctgagagcaacatgaatgacctggtgtctgagtaccagcagtaccaggatgccacagctgaggaggagggggagatgtatgaagatgatgaggaggagagcgaggcccagggccccaagtag

SEQ ID NO: 18798 - DNA, 1161 bp, synthetic construct
  source 1..1161: mol_type = other DNA; note = Synthetic coding sequence
atgtgtgaaagagctgcccggctgtgcagagctggggcccaccggctgctgcgggagcccccccagcagggccgggccctgggcggcctgctgcgctgggtgggcgccaggatgggagagccccgggagagcctggccccagctgccccagctgaccccggccctgccagcccccggggcggcacagctgtgatcctggacatcttccggcgggctgacaagaatgatgatggcaagctgagcctggaggagttccagctgttctttgctgatggagtgctgaatgagaaggagctggaggacctcttccacaccatcgacagcgacaacaccaaccacgtggacaccaaggagctgtgtgactactttgtggaccacatgggagactatgaagatgtgctggccagcctggagaccctgaaccacagcgtgctgaaggccatgggctacaccaagaaggtgtatgaaggaggcagcaatgtggaccagtttgtgacccgcttcctgctgaaggagacagccaaccagatccagagcctgctgagctctgtggagagcgctgtggaggccatcgaggagcagaccagccagctgcggcagaaccacatcaagcccagccacagcgctgcccagacctggtgtggcagccccaccccagccagcgcccccaaccacaagctgatggccatggagcagggcaagaccctgcccagcgccacagaagatgccaaggaggagggcctggaggcccagatcagccggctggccgagctgattggccgcctggagagcaaggccctgtggtttgacctgcagcagaggctgagtgatgaagatggcaccaacatgcacctgcagctggtgcggcaggagatggctgtgtgcccagagcagctgtctgagttcctggacagcctgcggcagtacctgcggggcaccaccggggtgaggaactgcttccacatcacagctgtgcggctgagtgatggcttcacctttgtgatctatgagttctgggagacagaggaggcctggaagaggcacctgcagagccccctgtgcaaggccttcagacatgtgaaggtggacaccctgagccagcctgaggccctgagccgcatcctggtgcctgctgcctggtgcaccgtgggccgggactag

SEQ ID NO: 18799 - DNA, 1482 bp, synthetic construct
  source 1..1482: mol_type = other DNA; note = Synthetic coding sequence
atggagaggagcccagatgtgtccccaggccccagccgctccttcaaggaggagctgctgtgtgctgtgtgctatgaccccttcagagatgctgtgaccctgcgctgtggccacaacttctgccggggctgtgtgagccgctgctgggaggtgcaggtgagccccacctgccctgtgtgcaaggaccgggccagccctgctgacctgcggaccaaccacaccctgaacaacctggtggagaagctgctgcgggaggaggccgagggcgcccgctggaccagctaccgcttcagccgggtgtgccgcctgcaccggggccagctgagcctcttctgcctggaggacaaggagctgctgtgctgcagctgccaggccgaccccaggcaccagggccaccgggtgcagcctgtgaaggacacagcccatgacttccgggccaagtgcaggaacatggagcacgccctgcgggagaaggccaaggccttctgggccatgaggaggagctatgaggccatcgccaagcacaaccaggtggaggccgcctggctggagggccgcatccggcaggagtttgacaagctgcgggagttcctgcgggtggaggagcaggccatcctggatgccatggccgaggagacccggcagaagcagctgctggctgatgagaagatgaagcagctgacagaggagacagaggtgctggcccacgagattgaaaggctgcagatggagatgaaggaggatgatgtgtccttcctgatgaagcacaagagcaggaagagaagactcttctgcaccatggagcctgagcctgtgcagcccggcatgctgattgatgtgtgcaagtacctgggcagcctgcagtacagagtgtggaagaagatgctggcctctgtggagagcgtgcccttctcctttgaccccaacacagctgctggctggctgtctgtgtctgatgacctgacctctgtgaccaaccacggctacagagtgcaggtggagaaccctgagcgcttcagcagcgccccctgcctgctgggcagcagggtcttcagccagggcagccacgcctgggaggtggccctgggcggcctgcagagctggagggtgggcgtggtgcgggtgcggcaggacagcggggctgagggccacagccacagctgctaccatgacaccaggagcggcttctggtacgtgtgcaggacccagggcgtggagggggaccactgtgtgaccagtgaccctgccaccagccccctggtgctggccatcccccggcggctgcgggtggagctggagtgtgaggagggggagctgtccttctatgatgctgagcggcactgccacctgtacaccttccacgccaggtttggagaggtgcggccctacttctacctgggcggggcccggggggccggccccccagagcccctgcgcatctgccccctgcacatctctgtgaaggaggagctggatggatag

SEQ ID NO: 18800 - DNA, 2262 bp, synthetic construct
  source 1..2262: mol_type = other DNA; note = Synthetic coding sequence
atggccccagacagcgaccccttccctgagggccccctgctgaagctgctgcccctggatgcccgggaccggggcacccagcgctgccgcctgggccctgctgccctgcacgccctgggcgcccggctgggcagcgctgtgaagatcagcctgcctgatggcggcagctgcctgtgcacagcctggcccaggagagatggagcagatggctttgtgcagctggaccccctgtgtgccagccctggagctgctgtgggcgccagccgcagcagaagaagcctgagcctgaaccggctgctgctggtgccctgcccccccctgcggcgggtggccgtgtggcctgtgctgcgggagcgggccggggcccctggggccaggaacacagctgctgtgctggaggccgcccaggagctgctgaggaaccggcccatcagcctgggccacgtggtggtggcccctcctggggcccctggcctggtggccgccctgcacatcgtgggcggcacccccagcccagaccctgctggcctggtgacccccaggaccagggtgtccctgggcggggagccccccagcgaggcccagccccagcctgaggtgcccctgggcggcctgtctgaggccgctgacagcctgcgggagctgctgcggctgcccctgcgctacccccgggccctgacagccctgggcctggccgtgccccggggcgtgctgctggccggccccccaggagtgggcaagacccagctggtgcgggctgtggcccgggaggccggggctgagctgctggccgtgtctgccccagccctgcagggcagcaggcctggagaaacagaggagaatgtgagaagagtcttccagagggcccgggagctggccagccggggccccagcctgctcttcctggatgagatggatgccctgtgcccccagaggggcagccgggcccctgagagccgggtggtggcccaggtgctgaccctgctggatggagccagcggggaccgggaggtggtggtggtgggcgccaccaacagaccagatgccctggaccctgccctgcggcggcccggccgctttgaccgggaggtggtgattggcacccccaccctgaagcagaggaaggagatcctgcaggtgatcaccagcaagatgcccatcagcagccacgtggacctgggcctgctggccgagatgacagtgggctacgtgggcgctgacctgacagccctgtgccgggaggccgccatgcacgccctgctgcacagcgagaagaaccaggacaaccctgtgattgatgaaattgacttcctggaggccttcaagaacatccagcccagcagcttccgctctgtgattggcctgatggacatcaagcctgtggactgggaggagatcggcggcctggaggatgtgaagctgaagctgaagcagagcattgagtggcccctgaagttcccctgggagtttgtgaggatgggcctgacccagcccaagggcgtgctgctgtatggccccccaggctgtgccaagaccaccctggtgcgggccctggccaccagctgccactgcagctttgtgtctgtgtctggagctgacctcttcagcccctttgtgggggacagcgagaaggtgctgagccagatcttccggcaggcccgggccagcaccccagccatcctcttcctggatgaaattgacagcatcctgggcgcccggagcgccagcaagacaggctgtgatgtgcaggagcgggtgctgtctgtgctgctgaatgagctggatggagtgggcctgaagaccatcgagcggcggggcagcaagagcagccagcaggagttccaggaggtgttcaacagatctgtgatgatcatcgccgccaccaacagaccagatgtgctggacacagccctgctgcggcccggccgcctggacaagatcatctacatccccccaccagaccacaagggccgcctgagcatcctgaaggtgtgcaccaagaccatgcccatcggcccagatgtgtccctggagaacctggccgctgagacctgcttcttcagcggggctgacctgaggaacctgtgcacagaagctgccctgctggccctgcaggagaatggcctggatgccaccaccgtgaagcaggagcacttcctgaagagcctgaagacagtgaagcccagcctgagctgcaaggacctggccctgtatgaaaatctcttcaagaaggagggcttcagcaatgtggagggcatctag

SEQ ID NO: 18801 - DNA, 1026 bp, synthetic construct
  source 1..1026: mol_type = other DNA; note = Synthetic coding sequence
atgcccaagaggaaggtgaccttccagggcgtgggagatgaagaagatgaagatgagatcatcgtgcccaagaagaagctggtggaccctgtggccggcagcggcggccctggcagccgcttcaagggcaagcacagcctggacagtgatgaggaggaggatgatgatgatggcggcagcagcaaatatgacatcctggcctctgaagatgtggagggccaggaggccgccaccctgcccagcgagggcggcgtgcgcatcacccccttcaacctgcaggaggagatggaggagggccactttgatgctgatggcaactacttcctgaacagagatgcccagatccgggacagctggctggacaacatcgactgggtgaagatccgggagcggcccccaggccagaggcaggccagtgacagcgaggaggaggacagcctgggccagacctccatgtctgcccaggccctgctggagggcctgctggagctgctgctgccccgggagaccgtggccggggccctgcggcggctgggcgcccggggcggcggcaaaggaaggaagggccctggccagcccagcagcccccagaggctggaccggctgagcggcctggccgaccagatggtggcccggggcaacctgggcgtgtaccaggagacccgggagcggctggccatgaggctgaagggcctgggctgccagaccctgggcccccacaaccccaccccaccacccagcctggacatgtttgctgaggagctggccgaggaggagctggagacccccacccccacccagagaggagaggccgagagcagaggagatggcctggtggatgtgatgtgggagtacaagtgggagaacacaggagatgctgagctgtatggccccttcaccagcgcccagatgcagacctgggtgtctgagggctacttcccagatggagtgtactgcaggaagctggaccccccaggcggccagttctacaacagcaagagaattgactttgacctgtacacctag

SEQ ID NO: 18802 - DNA, 690 bp, synthetic construct
  source 1..690: mol_type = other DNA; note = Synthetic coding sequence
atggccgaggagatggagagcagcctggaggccagcttcagcagcagcggggctgtgtctggggccagcggcttcctgcccccagcccggagccgcatcttcaagatcatcgtgattggagacagcaatgtgggcaagacctgcctgacctaccgcttctgtgccggccgcttcccagacagaacagaggccaccatcggcgtggacttccgggagagagctgtggagattgatggagagcgcatcaagatccagctgtgggacacagctggccaggagcgcttcaggaagtccatggtgcagcactactacagaaatgtgcatgctgtggtgtttgtgtatgacatgaccaacatggccagcttccacagcctgcccagctggattgaggagtgcaagcagcacctgctggccaatgacatcccccgcatcctggtgggcaacaagtgtgacctgcggagcgccatccaggtgcccacagacctggcccagaagtttgctgacacccacagcatgcccctgtttgagaccagcgccaagaaccccaatgacaatgaccacgtggaggccatcttcatgaccctggcccacaagctgaagagccacaagcccctgatgctgagccagcccccagacaatggcatcatcctgaagccagagcccaagccagccatgacctgctggtgctag

SEQ ID NO: 18803 - DNA, 2352 bp, synthetic construct
  source 1..2352: mol_type = other DNA; note = Synthetic coding sequence
atgctgctgggcttccggcggggcagaagaagccacttcaagcacatcatccacggcctgctgcctgctgcctctgtggcccccaaggctgctgtgcccaggaccccaccacccaggagccccaaccccagccctgagcggcccaggtctgccctggccgccgccatcctggccaccaccctgaccggccgcacagtggccatcccccagccccggcagaggagccgctctgagagtgatgtgtcctctgtggagcaggacagcttcatcgagccctatgccaccaccagccagctgcggccccggcccaactggcagagcgagatgggcagaagaagcagcctgcccagctttgagaccctggactatggagatgaagaagatattgagacccagctgagcagcagcggcaaggagctgggagatgtgtctgccagagaagatcggggcggccacagtgatgacctgtatgctgtgccccacaggaaccaggtgcccctgctgcacgaggtgaacagtgaagatgatgagaacatcagccaccaggacggcttccctggcagccccccagccccccagaggacccagcagaaggatggcaagcaccctgtgctgaacctgaaggatgagaagccacccctgtgtgagaagcccccacccagcccagacatcaccggccgggcccggcagcgctacacagagatcacccgggagaagtttgaggccctgaaggaggagaacatggacctgaacaacatgaaccagagcctgaccctggagctgaacaccatgaagcaggccatgaaggagctgcagctgaagctgaagggcatggagaaggagaagaggaagctgaaggaggccgagaaggccagcagccaggaggtggccgcccctgagctgctgtacctgaggaagcaggcccaggagctggtggatgaaaatgatggcctgaagatgacagtgcaccggctgaatgtggagctgagccgctaccagaccaagttccgccacctgagcaaggaggagagcctgaacatcgagggcctgcccagcaagggccccatccccccctggctgctggacatcaagtacctgagccccctgctgctggcctatgaggacatgatgaaggagaaggatgagctgaatgccaccctgaaggaggagatgaggatgttcaggatgagggtgcaggaggtggtgaaggaaaatgaggagctgcaccaggagctgaacaagagcagcgctgtgaccagcgaggagtggaggcagctgcagacccaggccaagctggtgctggaggagaacaagctgctgctggagcagctggagatccagcagaggaaggccaaggacagccaccaggagcggctgcaggaggtgtccaagctgaccaagcagctgatgctgctggaggccaagacccacggccaggagaaggagctggctgaaaatcgggagcagctggagatcctgcgggccaagtgccaggagctgaagacccacagtgatggcaagattgctgtggaggtgcacaagagcatcgtgaatgagctgaagagccagctgcagaaggaggaggagaaggagagagctgagatggaggagctgatggagaagctgactgtgctgcaggcccagaagaagagcctgctgctggagaagaacagcctgacagagcagaacaaggccctggaggccgagctggagcgggcccagaagatcaacaggaagagccagaagaagattgaggtgctgaagaagcaggtggagaaggccatgggaaatgagatgtctgcccaccagtacctggccaacctggtgggcctggccgagaacatcacccaggagcgggacagcctgatgtgcctggccaagtgcctggagagcgagaaggatggagtgctgaacaaggtgatcaagagcaacatccggctgggcaagctggaggagaaggtgaagggctacaagaagcaggccgccctgaagctgggggacatcagccaccggctgctggagcagcaggaggactttgctgggaagacagcccagtaccggcaggagatgaggcacctgcaccaggtgctgaaggacaagcaggaggtgctggaccaggccctgcagcagaaccgggagatggagggggagctggaggtgatctgggagagcaccttccgggagaacagacgcatccgggagctgctgcaggacaccctgaccaggactggagtgcaggacaacccccgggccctggtggcccccagcctgaatggagtgtcccaggccgacctgctggatggctgtgatgtgtgcagctatgacctgaagagccacgcccccacctgctag

SEQ ID NO: 18804 - DNA, 639 bp, synthetic construct
  source 1..639: mol_type = other DNA; note = Synthetic coding sequence
atggccgcccggcggggggccctgattgtgctggagggcgtggacagagctgggaagagcacccagagcaggaagctggtggaggccctgtgtgccgccggccacagagctgagctgctgcgcttccctgagaggagcacagaaattggcaagctgctgagcagctacctgcagaagaagagtgatgtggaggaccacagcgtgcacctgctcttcagcgccaaccgctgggagcaggtgcccctcatcaaggagaagctgagccagggcgtgaccctggtggtggacagatatgccttctctggagtggccttcaccggggccaaggagaacttcagcctggactggtgcaagcagccagatgtgggcctgcccaagccagacctggtgctcttcctgcagctgcagctggctgatgctgccaagagaggagccttcggccacgagagatatgaaaatggagccttccaggagcgggccctgcgctgcttccaccagctgatgaaggacaccaccctgaactggaagatggtggatgccagcaagagcattgaggccgtgcatgaggacatccgggtgctgtctgaagatgccatcagaacagccacagagaagcccctgggggagctgtggaagtag

SEQ ID NO: 18805 - DNA, 504 bp, synthetic construct
  source 1..504: mol_type = other DNA; note = Synthetic coding sequence
atggaggagacctacacagacagcctggaccctgagaagctgctgcagtgcccctatgacaagaaccaccagatccgggcctgccgcttcccctaccacctgatcaagtgcaggaagaaccacccagatgtggccagcaagctggccacctgccccttcaatgcccggcaccaggtgcccagggctgagatcagccaccacatcagcagctgtgatgacaggagctgcatcgagcaggatgtggtgaaccagaccaggagcctgcggcaggagaccctggccgagagcacctggcagtgccccccctgtgatgaggactgggacaaggacctgtgggagcagaccagcaccccatttgtgtggggcaccacccactacagcgacaacaacagccctgccagcaacatcgtgacagagcacaagaacaacctggccagcggcatgagggtgcccaagagcctgccctacgtgctgccctggaagaacaatggaaatgcccagtag

SEQ ID NO: 18806 - DNA, 381 bp, synthetic construct
  source 1..381: mol_type = other DNA; note = Synthetic coding sequence
atggctgctggccctgagcccccagagtgggagccccgctggaggaaggccctgcggggcaaggagaacaagggctctgtggagatcatgaggaaggacctgaatgatgcccgggacctgcacggccaggccgagagcgctgctgctgtgtggaagggccacgtgatggacaggaggaagaaggccctgacagactacaagaagctgcgggccttctttgtggaggaggaggagcacttcctgcaggaggccgagaaggaggagggcctgcctgaagatgagctggccgaccccacagagcgcttccgcagcctgctgcaggccgtgtctgagctggagaagaagcacaggaacctgggcctgtccatgctgctgcagtag

SEQ ID NO: 18807 - DNA, 1668 bp, synthetic construct
  source 1..1668: mol_type = other DNA; note = Synthetic coding sequence
atgcagagctgtgagagcagcggggacagcgcagatgaccccctgagccggggcctgcggcggcggggccagccccgggtggtggtgattggagctggcctggccggcctggccgccgccaaggccctgctggagcagggcttcacagatgtgacagtgctggaggccagcagccacatcggcggccgggtgcagagcgtgaagctgggccacgccacctttgagctgggcgccacctggatccacggcagccacggcaaccccatctaccacctggccgaggccaacggcctgctggaggagaccacagatggagagaggtctgtgggccgcatcagcctgtacagcaagaatggagtggcctgctacctgaccaaccacggccgccgcatccccaaggatgtggtggaggagttcagtgacctgtacaatgaggtgtacaacctgacccaggagttcttcagacatgacaagcctgtgaatgctgagagccagaacagcgtgggcgtcttcacccgggaggaggtgaggaaccgcatcagaaatgaccctgatgatcctgaggccaccaagaggctgaagctggccatgatccagcagtacctgaaggtggagagctgtgagagcagcagccacagcatggatgaggtgtccctgagcgccttcggggagtggacagagatccctggggcccaccacatcatccccagcggcttcatgagggtggtggagctgctggccgagggcatcccagcccacgtgatccagctgggcaagcctgtgcgctgcatccactgggaccaggccagcgcccggccccggggccctgagattgagcccagaggagagggggaccacaaccacgacaccggggagggcggccagggcggggaggagccccggggcggccgctgggatgaagatgagcagtggagcgtggtggtggagtgtgaggactgtgagctgatcccagctgaccacgtgattgtgacagtgtccctgggcgtgctgaagaggcagtacaccagcttcttccggcccggcctgcccacagagaaggtggccgccatccaccggctgggcatcggcaccacagacaagatcttcctggagtttgaggagcccttctggggccctgagtgcaacagcctgcagtttgtgtgggaggatgaggccgagagccacaccctgacctacccacctgagctgtggtacaggaagatctgtggctttgatgtgctgtacccacctgagagatatggccacgtgctgagcggctggatctgtggggaggaggccctggtgatggagaagtgtgatgatgaagctgtggccgagatctgcacagagatgctgcggcagttcaccggcaaccccaacatccccaagccccggcgcatcctgcggagcgcctggggcagcaacccctacttccggggcagctacagctacacccaggtgggcagcagcggggctgatgtggagaagctggccaagcccctgccctacacagagagcagcaagacagcccccatgcaggtgctcttctctggagaggccacccacaggaagtactacagcaccacccacggggccctgctgagcggccagcgggaggccgcccggctcatcgagatgtacagagacctcttccagcagggcacctag

SEQ ID NO: 18808 - DNA, 3153 bp, synthetic construct
  source 1..3153: mol_type = other DNA; note = Synthetic coding sequence
atggccctgtatgatgaggacctgctgaagaaccccttctacctggccctgcagaagtgcaggccagacctgtgcagcaaggtggcccagatccacggcatcgtgctggtgccctgcaagggcagcctgagcagcagcatccagagcacctgccagtttgagagctacatcctgatccctgtggaggagcacttccagaccctgaatggcaaggatgtgttcatccagggcaaccgcatcaagctgggcgccggctttgcctgcctgctgtctgtgcccatcctgtttgaggagaccttctacaatgagaaggaggagagcttcagcatcctgtgcatcgcccaccccctggagaagcgggagagcagcgaggagcccctggcccccagcgaccccttcagcctgaagaccattgaagatgtgcgggagttcctgggccgccacagcgagagatttgacaggaacatcgccagcttccacaggaccttcagagaatgtgagaggaagagcctgcggcaccacattgattctgccaatgccctgtacaccaagtgcctgcagcagctgctgcgggacagccacctgaagatgctggccaagcaggaggcccagatgaacctgatgaagcaggccgtggagatctacgtgcaccacgagatctacaacctgatcttcaagtatgtgggcaccatggaggcctctgaagatgctgccttcaacaagatcaccaggagcctgcaggacctgcagcagaaggacatcggcgtgaagccagagttctccttcaacatcccccgggccaagcgggagctggcccagctgaacaagtgcaccagcccccagcagaagctggtgtgcctgaggaaggtggtgcagctgatcacccagagccccagccagagggtgaacctggagaccatgtgtgctgatgacctgctgtctgtgctgctgtacctgctggtgaagacagagatccccaactggatggccaacctgagctacatcaagaacttccgcttcagcagcctggccaaggatgagctgggctactgcctgaccagctttgaagctgccatcgagtacatccggcagggcagcctgagcgccaagcccccagagagcgagggctttggagacaggctcttcctgaagcagaggatgagcctgctgagccagatgaccagcagccccacagactgcctcttcaagcacatcgccagcggcaaccagaaggaggtggagcggctgctgagccaggaggaccatgacaaggacacagtgcagaagatgtgccaccccctgtgcttctgtgatgactgtgagaagctggtgtctggccgcctgaatgaccccagcgtggtgacccccttcagcagagatgaccggggccacacccccctgcacgtggccgctgtgtgtggccaggccagcctgattgacctgctggtgtccaaaggagccatggtgaatgccacagactaccatggagccacccccctgcacctggcctgccagaagggctaccagagcgtgaccctgctgctgctgcactacaaggccagcgctgaggtgcaggacaacaacggcaacacccccctgcacctggcctgcacctacggccacgaggactgtgtgaaggccctggtgtactatgatgtggagagctgccgcctggacattggaaatgagaagggggacacccccctgcacatcgccgcccgctggggctaccagggcgtgattgagaccctgctgcagaatggagccagcacagagatccagaaccggctgaaggagacccccctgaagtgtgccctgaacagcaagatcctgtctgtgatggaggcctaccacctgagctttgaaagacggcagaagagcagcgaggcccctgtgcagagcccccagaggtctgtggacagcatcagccaggagagcagcaccagcagcttcagctccatgtctgccagcagccggcaggaggagaccaagaaggactaccgggaggtggagaagctgctgcgggctgtggctgatggagacctggagatggtgcgctacctgctggagtggacagaggaggacctggaggatgctgaggacacagtgtctgctgctgaccctgagttctgccaccccctgtgccagtgccccaagtgtgccccagcccagaagaggctggccaaggtgcctgccagcggcctgggcgtgaatgtgaccagccaggacggcagcagccccctgcacgtggccgccctgcacggccgggctgacctgatccccctgctgctgaagcacggggccaatgctggggccagaaatgctgaccaggccgtgcccctgcacctggcctgccagcagggccacttccaggtggtgaagtgcctgctggacagcaatgccaagcccaacaagaaggacctgagcggcaacacccccctcatctatgcctgcagcggcggccaccacgagctggtggccctgctgctgcagcacggggccagcatcaatgccagcaacaacaagggcaacacagccctgcacgaggccgtcatcgagaagcacgtgtttgtggtggagctgctgctgctgcatggagcctctgtgcaggtgctgaacaagaggcagaggacagctgtggactgtgccgagcagaacagcaagatcatggagctgctgcaggtggtgcccagctgtgtggccagcctggatgatgtggccgagacagacaggaaggagtatgtgacagtgaagatcaggaagaagtggaacagcaagctgtatgacctgcctgatgagcccttcacccggcagttctactttgtgcacagcgctggccagttcaagggcaagaccagccgggagatcatggcccgggacagatctgtgcccaacctgacagagggcagcctgcacgagcccggccggcagagcgtgaccctgcggcagaacaacctgcctgcccagagcggcagccacgccgctgagaagggcaacagcgactggccagagcggcccggcctgacccagacaggccctggccacaggaggatgctgcggcggcacacagtggaggatgctgtggtgtcccagggccctgaggccgccggccccctgagcaccccccaggaggtgtctgccagccgctcctag

SEQ ID NO: 18809 - DNA, 1662 bp, synthetic construct
  source 1..1662: mol_type = other DNA; note = Synthetic coding sequence
atggatgtggacaaggagctgggcatggagagcgtgaaggccggggccagcggcaagccagagatgaggctgggcacccaggaggagaccagtgaaggagatgccaatgaaagcagcctgctggtgctgagcagcaatgtgcccctgctggccctggagttcctggagatcgcccaggccaaggagaaggccttcctgcccatggtgagccacaccttccacatgaggacagaggagagtgatgccagccaggagggagatgacctgcccaagagcagcgccaacaccagccaccccaagcaggatgacagccccaagagcagcgaggagaccatccagcccaaggagggggacatccccaaggcccctgaggagaccatccagagcaagaaggaggacctgcccaagagcagcgagaaggccatccagcccaaggagagcaacatccccaagagcagcgccaagcccatccagcccaagctgggcaacatccccaaggcctctgtgaagcccagccagcccaaggagggggacatccccaaggcccctgaggagaccatccagagcaagaaggaggacctgcccaagagcagcgaggaggccatccagcccaaggagggggacatccccaagagcagcgccaagcccatccagcccaagctgggcaacatcgccaagacctctgtgaagcccagccagcccaaggagagtgacatccccaagagccctgaggagaccatccagcccaaggagggggacatccccaagagcagcgccaagcccatccagcccaagctgggcaacatccccaaggcctctgtgaagcccagccagcccaaggagggggacatcagcaagagccctgaggaggccatccagcccaaggagggggacctgcccaagagcctggaggaggccatccagcccaaggagggggacatccccaagagccctgaggaggccatccagcccaaggagggggacatccccaagagcctggaggaggccatccagcccaaggagggggacatccccaagagccctgaggagaccatccagcccaagaagggggacatccccaagagccctgaggaggccatccagcccaaggagggggacatccccaagagccccaagcaggccatccagcccaaggagggggacatccccaagagcctggaggaggccatcccccccaaggagattgacatccccaagagccctgaggagaccatccagcccaaggaggatgacagccccaagagcctggaggaggccacccccagcaaggagggggacatcctgaagccagaggaggagaccatggagttccctgagggggacaaggtgaaggtgatcctgagcaaagaagattttgaggccagcctgaaggaggccggggagcggctggtggccgtggacttcagcgccacctggtgtggcccctgcaggaccatccggcccttcttccacgccctgtctgtgaagcatgaagatgtggtgttcctggaggtggatgctgacaactgtgaggaggtggtgcgggagtgtgccatcatgtgtgtgcccaccttccagttctacaagaaggaggagaaggtggatgagctgtgtggggccctgaaggagaagctggaggccgtgattgctgagctgaagtag

SEQ ID NO: 18810 - DNA, 2268 bp, synthetic construct
  source 1..2268: mol_type = other DNA; note = Synthetic coding sequence
atggtgagccacggcagcagccccagcctgctggaggccctgagcagtgacttcctggcctgcaagatctgcctggagcagctgcgggcccccaagaccctgccctgcctgcacacctactgccaggactgcctggcccagctggctgatggcggccgggtgcgctgcccagagtgccgggagaccgtgcctgtgcccccagagggcgtggccagcttcaagaccaacttctttgtgaatggcctgctggacctggtgaaggcccgggcctgtggggacctgcgggccggcaagccagcctgtgccctgtgccccctggtgggcggcaccagcactggaggccctgccacagcccgctgcctggactgtgctgatgacctgtgccaggcctgtgctgatggccaccgctgcacccggcagacccacacccaccgggtggtggacctggtgggctaccgggccggctggtatgatgaggaggcccgggagcggcaggccgcccagtgcccccagcaccctggagaggccctgcgcttcctgtgccagccctgcagccagctgctgtgcagagaatgtcggctggacccccacctggaccacccctgcctgcccctggccgaggccgtgcgggcccggcggcccggcctggagggcctgctggccggcgtggacaacaacctggtggagctggaggccgcccggcgggtggagaaggaggccctggcccggctgcgggagcaggccgcccgggtgggcacccaggtggaggaggccgctgagggcgtgctgcgggccctgctggcccagaagcaggaggtgctgggccagctgcgggcccacgtggaggccgctgaggaggccgcccgggagcggctggccgagctggagggccgggagcaggtggcccgggctgctgctgcctttgcccggcgggtgctgagcctgggccgggaggccgagatcctgagcctggagggcgccatcgcccagaggctgcggcagctgcagggctgcccctgggcccctggccctgccccctgcctgctgccccagctggagctgcaccctggcctgctggacaagaactgccacctgctgcggctgagctttgaggagcagcagccccagaaggatggcggcaaggatggagctggcacccagggcggggaggagagccagagcagaagagaagatgagcccaagacagagcggcagggcggcgtgcagccccaggccggagatggagcccagacccccaaggaggagaaggcccagaccacccgggaggagggcgcccagaccctggaggaggaccgggcccagacccctcatgaagatggcggcccccagccccaccggggcggccggcccaacaagaagaagaagttcaagggccgcctgaagagcatcagccgggagcccagccctgccctgggccccaacctggatggcagcggcctgctgccccggcccatcttctactgcagcttccccaccaggatgcctggggacaagaggagcccccgcatcaccggcctgtgccccttcggcccccgggagatcctggtggctgatgagcagaacagagccctgaagcgcttcagcctgaatggagactacaagggcaccgtgcctgtgcctgagggctgcagcccctgcagcgtggccgccctgcagagcgctgtggccttcagcgccagcgcccggctgtacctgatcaaccccaacggggaggtgcagtggaggcgggccctgagcctgagccaggccagccatgctgtggccgccctgcccagcggggacagagtggccgtgtctgtggccggccacgtggaggtgtacaacatggagggcagcctggccacccgcttcatccctgggggcaaggccagccggggcctgcgggccctggtgttcctgaccaccagcccccagggccactttgtgggcagtgactggcagcagaacagcgtggtgatctgtgatggcctgggccaggtggtgggggagtacaagggccctggcctgcacggctgccagcccggctctgtgtctgtggacaagaagggctacatcttcctgaccctgcgggaggtgaacaaggtggtgatcctggaccccaagggcagcctgctgggggacttcctgacagcctaccacggcctggagaagccccgggtgaccaccatggtggatggccgctacctggtggtgtccctgagcaatggcaccatccacatcttccgggtgcgcagcccagacagctag

SEQ ID NO: 18811 - DNA, 1467 bp, synthetic construct
  source 1..1467: mol_type = other DNA; note = Synthetic coding sequence
atggctgctggcagcgaggccaccacccctgtgattgtggccgccggggccggcggggaggagggggagcacgtgaagcccttcaagccagagaaggccaaggagatcatcatgagcctgcagcagcctgccatcttctgcaacatggtgtttgactggccagcccggcactggaatgccaagtacctgagccaggtgctgcacggcaagcagatccgcttcaggatgggcatgaagtccatgagcacagtgccccagtttgagaccacctgcaactacgtggaggccaccctggaggagttcctgacctggaactgtgaccagagcagcatcagcggccccttccgggactatgaccacagcaagttctgggcctatgctgactacaagtactttgtgtccctgtttgaggacaagacagacctcttccaggatgtgaagtggagcgactttggcttccctggaagaaatggccaggagagcaccctgtggattggcagcctgggcgcccacaccccctgccacctggacagctatggctgcaacctggtgttccaggtgcagggcaggaagcgctggcacctgtttcctcctgaggacacccccttcctgtaccccacccgcatcccctatgaggagagctctgtgttcagcaagatcaacgtggtgaacccagacctgaagcgcttcccccagttcaggaaggcccagagacatgctgtgaccctgagccctggccaggtgctgtttgtgcccaggcactggtggcactacgtggagagcattgatcctgtgacagtgtccatcaacagctggattgagctggaggaggaccacctggcccgggtggaggaggccatcaccaggatgctggtgtgtgccctgaagacagctgagaacccccagaacacccgggcctggctgaaccccacagaggtggaggagaccagccatgctgtgaactgctgctacctgaatgctgctgtgtctgccttctttgaccgctgcaggaccagcgaggtggtggagatccaggccctgaggacagatggagagcacatgaagaaggaggagctgaatgtgtgcaaccacatggaggtgggccagacaggcagccagaacctgaccactggaacagacaagccagaggccgccagccccttcggccctgacctggtgcctgtggcccagaggtctgaggagccccccagcgagcggggcggcatcttcggcagtgatggcaaggactttgtggacaaggatggagagcactttgggaagctgcactgtgccaagaggcagcagatcatgagcaacagtgaaaatgccatcgaggagcagatcgccagcaacaccaccaccaccccccagaccttcatcagcacagatgacctgctggactgcctggtgaacccccaggtgaccagaattgtggcccagctgctgatccagggccgcagcctgtag

SEQ ID NO: 18812 - DNA, 579 bp, synthetic construct
  source 1..579: mol_type = other DNA; note = Synthetic coding sequence
atggcccccaagccaggagctgagtggagcacagccctgagccacctggtgctgggcgtggtgtccctgcatgctgctgtgtccacagctgaggccagcagaggagctgctgctggcttcctgctgcaggtgctggccgccaccaccaccctggcccctggcctgagcacccatgaggactgcctggccggggcctgggtggccaccgtgattggcctgcccctgctggcctttgacttccactgggtgaatggagacaggagcagcgccaacctgctgctgggcggcggcatggtgctggccgtggccggcggccacctgggccctgagggccgctctgtggccggccaggccatgctgctggtggtggccgtgaccatcctgattgtggccgtgttcaccgccaacacctacggcatgtggggcggggccatgctgggcgtggccggcctgctgagccggctggaggaggaccggctgctgctgctgcccaaggaggatgtgtgccgctgggccctggccgtgggctcctgggcctactgccgggccctgcacacccagaggctgcagtgggagtag

SEQ ID NO: 18813 - DNA, 462 bp, synthetic construct
  source 1..462: mol_type = other DNA; note = Synthetic coding sequence
atgaccagcgagagcaccagcccccctgtggtgccccccctgcacagccccaagagccctgtgtggcccaccttccccttccaccgggagggcagccgggtgtgggagcggggcggcgtgcccccccgggacctgcccagccccctgcccaccaagaggaccaggacctacagcgccacagcccgggccagcgctggccctgtgttcaagggcgtgtgcaagcagttcagccgcagccagggccacggcttcatcaccccagaaaatggaagtgaggacatctttgtgcacgtgtctgacattgaaggagaatatgtgcctgtggagggagatgaggtgacctacaagatgtgccccatcccccccaagaaccagaagttccaggccgtggaggtggtgctgacccagctggccccccacacccctcatgagacctggagcggccaggtggtgggcagctag

SEQ ID NO: 18814 - DNA, 537 bp, synthetic construct
  source 1..537: mol_type = other DNA; note = Synthetic coding sequence
atgagcagcttcagccgggccccccagcagtgggccacctttgcccgcatctggtacctgctggatggcaagatgcagcccccaggcaagctggccgccatggccagcatccggctgcagggcctgcacaagcctgtgtaccacgccctgagtgactgtggggaccacgtggtgatcatgaacaccaggcacatcgccttcagcggcaacaagtgggagcagaaggtgtacagcagccacacaggctacccaggcggcttccggcaggtgacagctgcccagctgcacctgcgggaccctgtggccatcgtgaagctggccatctacggcatgctgcccaagaacctgcacaggaggaccatgatggagcggctgcacctgttcccagatgagtacatccctgaggacatcctgaagaacctggtggaggagctgccccagcccaggaagatccccaagaggctggatgagtacacccaggaggagattgatgccttcccccggctgtggaccccacctgaggactaccgcctgtag

SEQ ID NO: 18815 - DNA, 8763 bp, synthetic construct
  source 1..8763: mol_type = other DNA; note = Synthetic coding sequence
atgaggggccggcggggccggccccccaagcagcctgctgccccagctgctgagcgctgtgccccagcccctcctcctcctcctcctccacccaccagcggccccatcggcggcctgcggagccgccaccggggcagcagccggggccgctgggccgccgcccaggccgaggtggcccccaagacccggctgagcagcccccggggcggcagcagcagcaggaggaagcccccacctcctcctccagccccacccagcaccagcgcccctggccggggcggccggggcggcggcggcggccgcactggaggcggcggcggcggcggccacctggcccggaccacagctgcccggcgggctgtgaacaaggtggtgtatgatgaccatgaaagtgaggaggaggaggaggaggaggacatggtgtctgaggaggaggaggaggaggatggagatgctgaggagacccaggacagtgaagatgatgaagaagatgagatggaggaggatgatgatgacagcgactacccagaggagatggaggatgatgatgatgatgccagctactgcacagagagcagcttccgcagccacagcacctacagcagcaccccaggccgcaggaagccccgggtgcaccggcccaggagccccatcctggaggagaaggacatcccccccctggagttccccaagagcagcgaggacctgatggtgcccaatgagcacatcatgaatgtgattgccatctatgaggtgctgaggaactttggcaccgtgctgcggctgagccccttccgctttgaggacttctgtgccgccctggtgtcccaggagcagtgcaccctgatggccgagatgcacgtggtgctgctgaaggctgtgctgcgggaggaggacaccagcaacaccacctttggacctgctgacctgaaggacagcgtgaacagcaccctgtacttcattgatggcatgacctggccagaggtgctgcgggtgtactgtgagagtgacaaggagtaccaccacgtgctgccctaccaggaggccgaggactacccctacggccctgtggagaacaagatcaaggtgctgcagttcctggtggaccagttcctgaccaccaacatcgcccgggaggagctgatgtctgaaggagtcatccagtatgatgaccactgccgggtgtgccacaagctgggggacctgctgtgctgtgagacctgcagcgctgtgtaccacctggagtgtgtgaagccacccctggaggaggtgcctgaagatgagtggcagtgtgaggtgtgtgtggcccacaaggtgcctggggtgacagactgtgtggccgagatccagaagaacaagccctacatcagacatgagcccatcggctatgacaggagcaggaggaagtactggttcctgaacagaagactcatcatcgaggaggacacagaaaatgaaaatgagaagaagatctggtactacagcaccaaggtgcagctggccgagctgattgactgcctggacaaggactactgggaggccgagctgtgcaagatcctggaggagatgagggaggagatccaccgccacatggacatcacagaggacctgaccaacaaggcccggggcagcaacaagagcttcctggccgccgccaatgaggagatcctggagagcatccgggccaagaagggggacatcgacaacgtgaagagccctgaggagacagagaaggacaagaatgaaacagaaaatgacagcaaggatgctgagaagaaccgggaggagtttgaggaccagagcctggagaaggacagtgatgacaagaccccagatgatgatcctgagcagggcaagtctgaggtgggggacttcaagtctgagaagagcaatggagagctgtctgagagccctggggccggcaagggggccagcggcagcacccgcatcatcacccggctgagaaatccagacagcaagctgagccagctgaagagccagcaggtggccgccgccgcccacgaggccaacaagctgttcaaggagggcaaggaggtgctggtggtgaacagccagggcgagatcagccggctgagcaccaagaaggaggtgatcatgaagggcaacatcaacaactacttcaagctgggccaggagggcaagtacagagtgtaccacaaccagtacagcaccaacagctttgccctgaacaagcaccagcacagagaagatcatgacaagaggaggcacctggcccacaagttctgcctgaccccagctggggagttcaagtggaatggatctgtgcacggcagcaaggtgctgaccatcagcaccctgcggctgaccatcacccagctggagaacaacatccccagcagcttcctgcaccccaactgggccagccaccgggccaactggatcaaggctgtgcagatgtgcagcaagccccgggagtttgccctggccctggccatcctggagtgtgctgtgaagcctgtggtgatgctgcccatctggagggagagcctgggccacacccggctgcacaggatgaccagcattgagcgggaggagaaggagaaggtgaagaagaaggagaagaagcaggaggaggaggagaccatgcagcaggccacctgggtgaagtacaccttccctgtgaagcaccaggtgtggaagcagaagggggaggagtacagagtgacaggctatggaggctggagctggatcagcaagacccacgtgtacagatttgtgcccaagctgcccggcaacaccaacgtgaactacaggaagagcctggagggcaccaagaacaacatggatgagaacatggatgaaagtgacaagaggaagtgcagccgcagccccaagaagatcaagattgaaccagattctgagaaggatgaggtgaagggcagtgatgctgccaagggagctgaccagaatgagatggacatcagcaagatcacagagaagaaggaccaggatgtgaaggagctgctggacagcgacagcgacaagccctgcaaggaggagcccatggaggtggatgatgacatgaagacagagagccacgtgaactgccaggagagcagccaggtggatgtggtgaatgtgtctgagggcttccacctgcggaccagctacaagaagaagaccaagagcagcaagctggatggcctgctggagcggcgcatcaagcagttcaccctggaggagaagcagaggctggagaagatcaagctggagggcggcatcaagggcatcggcaagaccagcaccaacagcagcaagaacctgtctgagagccctgtgatcaccaaggccaaggagggctgccagagcgacagcatgaggcaggagcagagccccaatgccaacaatgaccagcctgaggacctgatccagggctgcagcgagagtgacagctctgtgctgaggatgtctgaccccagccacaccaccaacaagctgtaccccaaggacagagtgctggatgatgtgtccatccgcagccctgagaccaagtgccccaagcagaacagcattgaaaatgacatcgaggagaaggtgtctgacctggccagccggggccaggagcccagcaagagcaagaccaagggaaatgacttcttcattgatgacagcaagctggccagcgcagatgacatcggcaccctcatctgcaagaacaagaagcccctcatccaggaggagagtgacaccatcgtgagcagcagcaagagcgccctgcacagctctgtgcccaagagcaccaatgacagagatgccacccccctgagccgggccatggactttgagggcaagctgggctgtgacagcgagagcaacagcaccctggagaacagcagtgacacagtgtccatccaggacagcagcgaggaggacatgattgtgcagaacagcaatgaaagcatcagcgagcagttccgcacccgggagcaggatgtggaggtgctggagcccctgaagtgtgagctggtgtctggagagagcacaggcaactgtgaggaccggctgcctgtgaagggcacagaggccaacgggaagaagcccagccagcagaagaagctggaggagaggcctgtgaacaagtgcagcgaccagatcaagctgaagaacaccacagacaagaagaacaatgaaaatcgggagagcgagaagaagggccagaggaccagcaccttccagatcaacgggaaggacaacaagcccaagatctacctgaagggagaatgtctgaaggagatcagcgagagccgggtggtgtctggaaatgtggagcccaaggtgaacaacatcaacaagatcatcccagaaaatgacatcaagagcctgactgtgaaggagagcgccatccggcccttcatcaatggagatgtgatcatggaggacttcaatgaaagaaacagcagcgagaccaagagccacctgctgagcagcagtgatgctgagggcaactacagagacagcctggagaccctgcccagcaccaaggagagtgacagcacccagaccaccaccccatctgccagctgcccagagagcaacagcgtgaaccaggtggaggacatggagattgagaccagcgaggtgaagaaggtgaccagcagccccatcaccagcgaggaggagagcaacctgagcaatgacttcattgatgaaaatggcctgcccatcaacaagaatgaaaatgtgaatggagagagcaagaggaagacagtcatcacagaggtgaccaccatgaccagcacagtggccacagagagcaagacagtcatcaaggtggagaagggggacaagcagacagtggtgagcagcacagagaactgtgccaagagcacagtgaccaccaccaccaccaccgtgaccaagctgagcacccccagcactggaggctctgtggacatcatctctgtgaaggagcagagcaagacagtggtgaccaccaccgtgacagacagcctgaccaccaccggcggcaccctggtgacctccatgacagtgtccaaggagtacagcacccgggacaaggtgaagctgatgaagttcagccggcccaagaagaccaggtctggaacagccctgcccagctacaggaagtttgtgaccaagagcagcaagaagagcatctttgtgctgcccaatgatgacctgaagaagctggccaggaagggcggcatccgggaggtgccctacttcaactacaatgccaagccagccctggacatctggccctaccccagcccccggcccaccttcggcatcacctggagataccgcctgcagacagtgaagagcctggccggcgtgtccctgatgctgcggctgctgtgggccagcctgcgctgggatgacatggccgccaaggcccctcctgggggcggcaccaccaggacagagaccagcgagacagagatcaccaccacagagatcatcaagagaagagatgtgggcccctacggcatccgctctgagtactgcatcaggaagatcatctgccccatcggcgtgcctgagacccccaaggagacccccaccccccagaggaagggcctgcggagcagcgccctgcggcccaagaggcctgagacccccaagcagacaggccctgtgatcatcgagacctgggtggccgaggaggagctggagctgtgggagatccgggcctttgctgagcgggtggagaaggagaaggcccaggccgtggagcagcaggccaagaagaggctggagcagcagaagcccaccgtcatcgccaccagcaccaccagccccaccagcagcaccaccagcaccatcagccctgcccagaaggtgatggtggcccccatcagcggctctgtgaccaccggcaccaagatggtgctgaccaccaaggtgggcagccctgccaccgtgaccttccagcagaacaagaacttccaccagacctttgccacctgggtgaagcagggccagagcaacagcggcgtggtgcaggtgcagcagaaggtgctgggcatcatccccagcagcacaggcaccagccagcagaccttcaccagcttccagcccaggacagccaccgtgaccatccggcccaacaccagcggcagcggcggcaccaccagcaacagccaggtgatcaccggcccccagatccggcccggcatgaccgtcatccgcacccccctgcagcagagcaccctgggcaaggccatcatccgcacccctgtgatggtgcagcccggggccccccagcaggtgatgacccagatcatccggggccagcctgtgtccacagctgtgtctgcccccaacacagtgagcagcaccccaggccagaagagcctgaccagcgccaccagcaccagcaacatccagagcagcgccagccagcccccccggccccagcagggccaggtgaagctgaccatggcccagctgacccagctgacccagggccatggaggcaaccagggcctgactgtggtgatccagggccagggccagaccaccggccagctgcagctgatcccccagggcgtgacagtgctgcccggccctggccagcagctgatgcaggccgccatgcccaatggaacagtgcagcgcttcctgttcacccccctggccaccacagccaccacagccagcaccaccaccaccaccgtgtccaccacagctgctggcactggagagcagaggcagagcaagctgagcccccagatgcaggtgcaccaggacaagaccctgcccccagcccagagcagctctgtgggccctgctgaggcccagccccagacagcccagcccagcgcccagccccagccccagacccagccccagagccctgcccagcctgaggtgcagacccagcctgaggtgcagacccagaccaccgtgagcagccacgtgcccagcgaggcccagcccacccacgcccagagcagcaagccccaggtggccgcccagagccagccccagagcaatgtgcagggccagagccctgtgcgggtgcagagccccagccagacccgcatccggcccagcacccccagccagctgagccctggccagcagagccaggtgcagaccaccaccagccagcccatccccatccagccccacaccagcctgcagatccccagccagggccagccccagagccagccccaggtgcagagcagcacccagaccctgagcagcggccagaccctgaaccaggtgacagtgagcagccccagccggccccagctgcagatccagcagccccagccccaggtgattgctgtgccccagctgcagcagcaggtgcaggtgctgagccagatccagagccaggtggtggcccagatccaggcccagcagagcggcgtgccccagcagatcaagctgcagctgcccatccagatccagcagagcagcgctgtgcagacccaccagatccagaatgtggtgacagtgcaggccgcctctgtgcaggagcagctgcagagggtgcagcagctgcgggaccagcagcagaagaagaagcagcagcagatcgagatcaagcgggagcacaccctgcaggccagcaaccagagcgagatcatccagaagcaggtggtgatgaagcacaatgctgtgattgagcacctgaagcagaagaagtccatgaccccagctgagcgggaggagaaccagaggatgattgtgtgcaaccaggtgatgaagtacatcctggacaagattgacaaggaggagaagcaggccgccaagaagaggaagcgggaggagagcgtggagcagaagaggagcaagcagaatgccaccaagctgagcgccctgctcttcaagcacaaggagcagctgcgggcagagatcctgaagaagagggccctgctggacaaggacctgcagatcgaggtgcaggaggagctgaagagggacctgaagatcaagaaggagaaggacctgatgcagctggcccaggccacagctgtggccgccccctgcccccctgtgaccccagcccccccagcccccccagcccccccacccagccccccacctcctcctgctgtgcagcacacaggcctgctgagcacccccaccctgcctgctgccagccagaagaggaagcgggaggaggagaaggacagcagcagcaagagcaagaagaagaagatgatcagcaccaccagcaaggagaccaagaaggacaccaagctgtactgcatctgcaagaccccctatgatgagagcaagttctacatcggctgtgaccgctgccagaactggtaccacggccgctgtgtgggcatcctgcagagcgaggccgagctgattgatgaatatgtgtgcccccagtgccagagcacagaagatgccatgacagtgctgacccccctgacagagaaggactatgagggcctgaagagggtgctgcggagcctgcaggcccacaagatggcctggcccttcctggagcctgtggaccccaatgatgccccagactactatggagtcatcaaggagcccatggacctggccaccatggaggagcgggtgcagaggcgctactatgagaagctgacagaatttgtggccgacatgaccaagatctttgacaactgccgctactacaaccccagcgacagccccttctaccagtgtgccgaggtgctggagagcttctttgtgcagaagctgaagggcttcaaggccagccgcagccacaacaacaagctgcagagcacagccagctag

SEQ ID NO: 18816 - DNA, 390 bp, synthetic construct
  source 1..390: mol_type = other DNA; note = Synthetic coding sequence
atggctgacccccgggtgcggcagatcaagatcaagacaggagtggtgaagaggctggtgaaggagaaggtgatgtatgagaaggaggccaagcagcaggaggagaagattgagaagatgagagcagaagatggagagaactatgacatcaagaagcaggccgagatcctgcaggagagcaggatgatgatcccagactgccagaggcggctggaggccgcctacctggacctgcagaggatcctggtgtccaaggacttctgtgtgatgttcaagttcttcttcagcatccagtacatggagagccagaagttcaagtacctgaccctgcggacctcctggcagtacttcctgttcacctgccccctgtaccgctacatcctgaagtag

SEQ ID NO: 18817 - DNA, 582 bp, synthetic construct
  source 1..582: mol_type = other DNA; note = Synthetic coding sequence
atgtctgatgatgacagccgggccagcaccagcagcagcagcagcagcagcagcaaccagcagacagagaaggagaccaacacccccaagaagaaggagagcaaggtgtccatgagcaagaacagcaagctgctgagcaccagcgccaagaggatccagaaggagctggccgacatcaccctggaccccccacccaactgcagcgctggccccaagggggacaacatctatgagtggaggagcaccatcctgggccccccaggctctgtgtatgaaggaggagtcttcttcctggacatcaccttcaccccagagtaccccttcaagccacccaaggtgaccttccgcacccgcatctaccactgcaacatcaacagccagggcgtcatctgcctggacatcctgaaggacaactggagccctgccctgaccatcagcaaggtgctgctgagcatctgcagcctgctgacagactgcaacccagctgaccccctggtgggcagcatcgccacccagtacatgaccaacagagctgagcatgacaggatggcccggcagtggaccaagagatatgccacctag

SEQ ID NO: 18818 - DNA, 1395 bp, synthetic construct
  source 1..1395: mol_type = other DNA; note = Synthetic coding sequence
atgagcctgcagttcagcaatggcagcagacatgtgtgcctgcggagcggggccggctctgtgcggcccctgaatggaggagctggctttgctggcagcagcgcctgtggcggctctgtggccggcagcgagttcagctgtgccctgggcggcggcctgggctctgtgcctgggggcagccacgccggcggggccctgggcaatgctgcctgcatcggctttgctggcagcgagggcggcctgctgtctggaaatgagaaggtgaccatgcagaacctgaatgaccggctggccagctacctggacaacgtgcgggccctggaggaggccaatgctgagctggagaggaagatcaagggctggtatgagaagtatggccctggcagctgccggggcctggaccatgactacagccgctaccacctgaccatcgaggacctgaagaacaagatcatcagcagcaccaccaccaatgccaacgtcatcctgcagattgacaatgcccggctggccgcagatgacttccggctgaagtatgaaaatgagctgaccctgcaccagaatgtggaggccgacatcaatggcctgcggcgggtgctggatgagctgaccctgtgcaggacagaccaggagctgcagtatgagagcctgtctgaggagatgacctacctgaagaagaaccacgaggaggagatgaaggccctgcagtgtgccgccggcggcaatgtgaatgtggagatgaatgctgcccctggggtggacctggccgtgctgctgaacaacatgagagcagaatatgaggccctggccgagcagaacaggaaggatgctgaggcctggttcaatgagaagagcgccagcctgcagcagcagatcagccatgacagcggggccgccacctttgcccggagccagctgacagagatgaggaggaccctgcagaccctggagatccagctgcagagcctgatggccaccaagcacagcctggagtgcagcctgacagaaacagagagcaactactgcacccagctggcccagatccaggcccagatcggggccctggaggagcagctgcaccaggtgaggacagaaacagagggccagaagctggagtatgagcacctgctggatgtgaaggtgcacctggagaaggagattgagacctactgccgcctgattgatggagatggcaacagctgcagcaagagcaaaggatttggaagtggcagccctggcaacagcagcaaggacctgagcaagaccaccctggtgaagacagtggtggaggagctggaccagaggggcaaggtgctgagcagccgcatccacagcattgaggagaagaccagcaagatgaccaacgggaagacagagcagagggtgcccttctag

SEQ ID NO: 18819 - DNA, 2013 bp, synthetic construct
  source 1..2013: mol_type = other DNA; note = Synthetic coding sequence
atggaggagttcagaagaagctacagccggctgtgccgggagagcggggctgagccccaggaggccgtgctgcagcagctgcaccagctgccccggggccgcctggacctggccacccagagcctgactgtggagacctgccgggccctgggcaagctgctgccccgggagaccctgtgcacagagctggtgctgagtgactgcatgctgtctgaggagggcgccaccctgctgctgcggggcctgtgtgccaacacagtgctgcgcttcctggacctgaagggcaacaacctgcgggctgctggagctgaggccctgggcaagctgctgcagcagaacaagagcatccagagcctgaccctggagtggaacagcctgggcacctgggatgatgcctttgccaccttctgtggcggcctggccgccaatggagccctgcagaggctggacctgaggaacaaccagatcagccacaagggagctgaggagctggccctggccctgaagggcaacaccaccctgcagcagctggacctgcgctggaacaacgtgggcctgctgggcggccgggccctgatgaactgcctgcccagcaacagaaccctgtggaggctggacctggccggcaacaacatccctggagatgtgctgcgggctgtggagcaggccatgggccacagccaggaccggctgaccaccttccaggagaaccaggcccggacccacgtgctgagcaaggaggtgcagcacctgcgggaggagaagagcaagcagttcctggacctgatggagaccatcgacaagcagcgggaggagatggccaagagcagccgggccagcgctgcccgggtgggccagctgcaggaggccctgaatgaaagacacagcatcatcaatgccctgaaggccaagctgcagatgacagaggccgccctggccctgtctgagcagaaggcccaggacctgggggagctgctggccacagctgagcaggagcagctgagcctgagccagaggcaggccaaggagctgaagctggagcagcaggaggccgctgagcgggagagcaagctgctgcgggacctgtctgctgccaatgagaagaacctgctgctgcagaaccaggtggatgagctggagaggaagttccgctgccagcaggagcagctgttccagacccggcaggagatgacctccatgtctgctgagctgaagatgagggccatccaggccgaggagcggctggacatggagaagaggcgctgccggcagagcctggaggacagcgagagcctgcgcatcaaggaggtggagcacatgaccaggcacctggaggagagcgagaaggccatgcaggagcgggtgcagaggctggaggccgcccggctgagcctggaggaggagctgagccgggtgaaggctgctgccctgtctgagcggggccaggccgaggaggagctgatcaaggccaagagccaggcccggctggaggagcagcagaggctggcccacctggaggacaagctgcggctgctggcccaggccagagatgaggcccagggcgcctgcctgcagcagaagcaggtggtggccgaggcccagaccagggtgtcccagctgggcctgcaggtggagggcctgcggcggcggctggaggagctgcagcaggagctgagcctgaaggaccaggagcgggtggccgaggtgtcccgggtgcgggtggagctgcaggagcagaatggccgcctgcaggccgagctggccgcccaggaggccctgcgggagaaggccgccgccctggagcggcagctgaaggtgatggccagtgaccaccgggaggccctgctggaccgggagagtgaaaatgccagcctgcgggagaagctgcggctgcgggaggccgagatcgcccgcatcagagatgaggaggcccagagggccagcttcctgcagaatgctgtgctggcctacgtgcaggccagccctgtgaggaccctgagcccccccaagtag

SEQ ID NO: 18820 - DNA, 1782 bp, synthetic construct
  source 1..1782: mol_type = other DNA; note = Synthetic coding sequence
atggagcccgccacagcccccaggccagacatggcccctgagctgaccccagaggaggagcaggccaccaagcagttcctggaggagatcaacaagtggacagtgcagtacaacgtgagccccctgtcctggaatgtggccgtgaagttcctgatggccaggaagtttgatgtgctgcgggccatcgagctgttccacagctaccgggagaccaggaggaaggagggcatcgtgaagctgaagccccatgaggagcccctgcggtctgagatcctgagcggcaagttcaccatcctgaatgtgcgggaccccactggagccagcatcgccctcttcaccgcccggctgcaccacccccacaagtctgtgcagcacgtggtgctgcaggccctcttctacctgctggacagagctgtggacagctttgagacccagagaaatggcctggtgttcatctatgacatgtgtggcagcaactatgccaactttgagctggacctgggcaagaaggtgctgaacctgctgaagggggccttccctgcccggctgaagaaggtgctgattgtgggcgcccccatctggttccgggtgccctacagcatcatcagcctgctgctgaaggacaaggtgcgggagcgcatccagatcctgaagaccagcgaggtgacccagcacctgcccagagaatgtctgcctgagaacctgggcggctacgtgaagattgacctggccacctggaacttccagttcctgccccaggtgaatggccacccagacccctttgatgagatcatcctcttcagcctgcccccagccctggactgggacagcgtgcacgtgcccggcccccacgccatgaccatccaggagctggtggactatgtgaatgcccggcagaagcagggcatctatgaggagtatgaggacatcagaagagaaaatcctgtgggcaccttccactgcagcatgagccctggcaacctggagaagaacagatatggagatgtgccctgcctggaccagaccagggtgaagctgaccaagaggagcggccacacccagacagactacatcaatgccagcttcatggatggctacaagcagaagaatgcctacatcggcacccagggccccctggagaacacctacagagacttctggctgatggtgtgggagcagaaggtgctggtgattgtgatgaccaccaggtttgaggagggcggcagaagaaaatgtggccagtactggcccctggagaaggacagccgcatccgcttcggcttcctgactgtgaccaacctgggcgtggagaacatgaaccactacaagaagaccaccctggagatccacaacacagaggagcggcagaagaggcaggtgacccacttccagttcctgtcctggccagactatggagtgcccagcagcgctgccagcctgattgacttcctgcgggtggtgaggaaccagcagagcctggccgtgagcaacatgggcgcccggagcaagggccagtgcccagagccccccatcgtggtgcactgcagcgctggcattggaagaacaggcaccttctgcagcctggacatctgcctggcccagctggaggagctgggcaccctgaatgtgttccagacagtgtccaggatgaggacccagagggccttcagcatccagaccccagagcagtactacttctgctacaaggccatcctggagtttgctgagaaggagggcatggtgagcagcggccagaacctgctggccgtggagagccagtag

SEQ ID NO: 18821 - DNA, 1884 bp, synthetic construct
  source 1..1884: mol_type = other DNA; note = Synthetic coding sequence
atggagggcctggccggctacgtgtacaaggccgccagcgagggcaaggtgctgaccctggccgccctgctgctgaacagaagtgaaagtgacatccgctacctgctgggctacgtgtcccagcagggcggccagaggagcacccccctcatcatcgccgccagaaatggccacgccaaggtggtgcggctgctgctggagcactacagagtgcagacccagcagacaggcaccgtgcgctttgatggctacgtgattgatggagccacagccctgtggtgtgccgccggggccggccactttgaggtggtgaagctgctggtgagccacggggccaacgtgaaccacaccaccgtgaccaacagcacccccctgcgggccgcctgctttgatggccgcctggacatcgtgaagtacctggtggagaacaatgccaacatcagcatcgccaacaagtatgacaacacctgcctgatgattgctgcctacaagggccacacagatgtggtgcgctacctgctggagcagagagctgaccccaatgccaaggcccactgtggggccacagccctgcactttgctgctgaggccggccacatcgacatcgtgaaggagctgatcaagtggagggctgccatcgtggtgaatggccacggcatgacccccctgaaggtggccgctgagagctgcaaggcagatgtggtggagctgctgctgagccacgccgactgtgaccggcgcagccgcatcgaggccctggagctgctgggcgccagctttgccaatgacagagaaaattatgacatcatcaagacctaccactacctgtacctggccatgctggagcgcttccaggatggagacaacatcctggagaaggaggtgctgccccccatccacgcctacggcaacagaacagaatgtagaaacccccaggagctggagagcatccggcaggacagagatgccctgcacatggagggcctcatcgtgcgggagcgcatcctgggcgctgacaacattgatgtgagccaccccatcatctacagaggagctgtgtatgctgacaacatggagtttgagcagtgcatcaagctgtggctgcacgccctgcacctgcggcagaagggcaacagaaacacccacaaggacctgctgcgctttgcccaggtgttcagccagatgatccacctgaatgaaacagtgaaggccccagacattgaatgtgtgctgcgctgcagcgtgctggagattgagcagagcatgaacagagtgaagaacatcagtgatgctgatgtgcacaatgccatggacaactatgagtgcaacctgtacaccttcctgtacctggtgtgcatcagcaccaagacccagtgcagcgaggaggaccagtgcaagatcaacaagcagatctacaacctgatccacctggaccccaggacccgggagggcttcaccctgctgcacctggccgtgaacagcaacacccctgtggatgacttccacaccaatgatgtgtgcagcttccccaatgccctggtgaccaagctgctgctggactgtggggctgaggtgaatgctgtggacaatgaaggcaacagcgccctgcacatcatcgtgcagtacaaccggcccatcagtgacttcctgaccctgcacagcatcatcatcagcctggtggaggccggggcccacacagacatgaccaacaagcagaacaagacccccctggacaagagcaccaccggggtgtctgagatcctgctgaagacccagatgaagatgagcctgaagtgcctggccgcccgggctgtgcgggccaatgacatcaactaccaggaccagatccccaggaccctggaggagtttgtgggcttccactag

SEQ ID NO: 18822 - DNA, 378 bp, synthetic construct
  source 1..378: mol_type = other DNA; note = Synthetic coding sequence
atgcccagcgagaagaccttcaagcagaggaggacctttgagcagagggtggaggatgtgcggctcatccgggagcagcaccccaccaagatccctgtgatcatcgagcgctacaagggggagaagcagctgcctgtgctggacaagaccaagttcctggtgcctgaccacgtgaacatgtctgagctgatcaagatcatcagaagaaggctgcagctgaatgccaaccaggccttcttcctgctggtgaatggccacagcatggtgtctgtgtccacccccatcagcgaggtgtatgaaagtgagaaggatgaagatggcttcctgtacatggtgtgtgccagccaggagaccttcggcatgaagctgtctgtgtag

SEQ ID NO: 18823 - DNA, 3786 bp, synthetic construct
  source 1..3786: mol_type = other DNA; note = Synthetic coding sequence
atgggcactggagacttcatctgcatctccatgactggaggagccccctggggcttccggctgcagggcggcaaggagcagaagcagcccctgcaggtggccaagatccggaaccagagcaaggccagcggcagcggcctgtgtgaaggagatgaggtggtgtccatcaatggaaacccctgtgccgacctgacctacccagaggtgatcaagctgatggagagcatcacagacagcctgcagatgctgatcaagaggcccagcagcggcatcagcgaggccctgatcagtgaaaatgaaaacaagaacctggagcacctgacccatggaggctacgtggagagcaccaccctgcagatccggcctgccaccaagacccagtgcacagagttcttcctggcccctgtgaagacagaggtgcccctggccgagaaccagaggagcggccctgactgtgccggcagcctgaaggaggagaccggccccagctaccagagggccccccagatgccagacagccagaggggccgggtggccgaggagctgatcctgcgggagaaggtggaggccgtgcagcccggccctgtggtggagctgcagctgagcctgagccaggagcggcacaagggggccagcggccccctggtggccctgcctggagctgagaagagcaagagcccagaccctgaccccaacctgagccatgaccgcatcgtgcacatcaacagcatccccaccaatgagaaggctgaccccttcctgcggagcagcaagatcatccagatcagcagcggccgggagctgcgggtcatccaggagagcgaggccggagatgctggcctgccccgggtggaggtgatcctggactgcagcgaccggcagaagacagagggctgccgcctgcaggccggcaaggaatgtgtggacagccctgtggagggcggccagagcgaggccccacccagcctggtgtcctttgctgtgagcagcgagggcacagagcagggcgaggaccccaggtctgagaaggaccacagccggccccacaagcaccgggcccggcatgcccggctgcggcgctctgagagcctgtctgagaagcaggtgaaggaggccaagagcaagtgcaagagcatcgccctgctgctgacagatgcccccaaccccaacagcaagggcgtgctgatgttcaagaagagaagaagaagagccaggaagtacaccctggtgtcctatggcaccggggagctggagcgggaggctgatgaggaggaggagggggacaaggaggacacctgtgaggtggccttcctgggcgccagcgagagcgaggtggatgaggagctgctgagtgatgtggatgacaacacccaggtggtgaactttgactgggacagcggcctggtggacatcgagaagaagctgaacagaggagacaagatggagatgctgcctgacaccaccgggaagggggccctgatgtttgccaagaggcgggagaggatggaccagatcacagcccagaaggaggaggacaaggtgggcggcacccccagccgggagcaggatgctgcccagacagatggcctgcggaccaccaccagctaccagaggaaggaggaggagagcgtgaggacccagagctctgtgtccaagagctacatcgaggtgagccacggcctgggccacgtgccccagcagaatggcttcagcggcaccagcgagacagccaacatccagaggatggtgcccatgaacagaacagccaagcccttccctggctctgtgaaccagcctgccacccccttcagccccaccaggaacatgaccagccccatcgctgacttccctgcccccccaccctacagcgctgtgaccccacctccagatgccttcagcagaggagtgagcagccccatcgccggccctgcccagcccccaccctggccccagcctgccccctggagccagcctgccttctatgacagcagcgagagaattgccagcagagatgagcgcatctctgtgcctgccaagaggacaggcatcctgcaggaggccaagagaagaagcaccaccaagcccatgttcaccttcaaggagcccaaggtgagccccaaccctgagctgctgagcctgctgcagaacagcgagggcaagaggggcactggagctggaggagacagcggccctgaggaggactacctgagcctgggcgctgaggcctgcaacttcatgcagagcagcagcgccaagcagaagaccccacctcctgtggcccccaagccagctgtgaagagcagcagcagccagcctgtgacccctgtgtcccctgtgtggagccctggggtggcccccacccagcccccagccttccccaccagcaaccccagcaaaggaacagtggtgagcagcatcaagatcgcccagcccagctaccccccagcccggcctgccagcaccctgaatgtggccggccccttcaagggcccccaggccgctgtggccagccagaactacacccccaagcccaccgtgtccacccccaccgtgaatgctgtgcagcccggggctgtgggccccagcaatgagctgcccggcatgagcggccgcggggcccagctgtttgccaagaggcagagcaggatggagaagtatgtggtggacagcgacacagtgcaggcccatgctgcccgggcccagagccccacccccagcctgcctgcctcctggaagtacagcagcaatgtgcgggcccctcctcctgtggcctacaaccccatccacagccccagctaccccctggccgccctgaagagccagcccagcgctgcccagcccagcaagatgggcaagaagaagggcaagaagcccctgaatgccctggatgtgatgaagcaccagccctaccagctgaatgccagcctcttcaccttccagcccccagatgccaaggatggcctgccccagaagagctctgtgaaggtgaacagcgccctggccatgaagcaggccctgccccccaggcctgtgaatgctgccagccccaccaacgtgcaggccagctctgtgtacagcgtgcctgcctacaccagccccccatccttctttgctgaggccagcagccctgtgtctgccagccctgtgcctgtgggcatccccaccagccccaagcaggagagcgccagcagcagctactttgtggccccccggcccaagttcagcgccaagaagtctggagtgaccatccaggagagcggccgcagcctgagcctgcccggccgctctgtgcccccacccatcagcaccagcccctgggtgtaccagcccacctacagctacagcagcaagcccacagatggcctggagaaggccaacaagaggcccaccccctgggaggccgccgccaagagccccctgggcctggtggatgatgccttccagcccaggaacatccaggagagcatcgtggccaacgtggtgtctgctgcccggaggaaggtgctgcccggccccccagaggactggaatgaaaggctgagctacatcccccagacccagaaggcctacatgggcagctgtggccggcaggagtacaacgtgacagccaacaacaacatgagcaccaccagccagtatggcagccagctgccctatgcctactaccggcaggccagcagaaatgacagcgccatcatgtccatggagaccaggagtgactactgcctgcctgtggccgactacaactacaacccccacccccggggctggaggcggcagacctag

SEQ ID NO: 18824 - DNA, 1146 bp, synthetic construct
  source 1..1146: mol_type = other DNA; note = Synthetic coding sequence
atgtcctggacagtgcctgtggtgcgggccagccagagggtgtcctctgtgggcgccaacttcctgtgcctgggcatggccctgtgcccccggcaggccacccgcatccccctgaatggcacctggctgttcacccctgtgtccaagatggccaccgtgaagtctgagctgattgagcgcttcaccagcgagaagcctgtgcaccacagcaaggtgtccatcattggaactggatctgtgggcatggcctgtgccatcagcatcctgctgaagggcctgagtgatgagctggccctggtggacctggatgaggacaagctgaagggggagaccatggacctgcagcacggcagccccttcaccaagatgcccaacatcgtgtgcagcaaggactactttgtgacagccaacagcaacctggtgatcatcacagctggggcccggcaggagaagggggagacccggctgaacctggtgcagagaaatgtggccatcttcaagctgatgatcagcagcatcgtgcagtacagcccccactgcaagctgatcatcgtgagcaaccctgtggacatcctgacctacgtggcctggaagctgagcgccttccccaagaaccgcatcatcggcagcggctgcaacctggacacagcccgcttccgcttcctgattggccagaagctgggcatccacagcgagagctgccacggctggatcctgggggagcacggggacagctctgtgcctgtgtggagcggcgtgaacattgctggggtgcccctgaaggacctgaacagcgacattggaacagacaaggaccctgagcagtggaagaatgtgcacaaggaggtgacagccacagcctatgagatcatcaagatgaagggctacacctcctgggccatcggcctgtctgtggccgacctgacagagagcatcctgaagaacctgcggcgcatccaccctgtgtccaccatcatcaagggcctgtatggaattgatgaggaggtgttcctgagcatcccctgcatcctgggggagaatggcatcaccaacctgatcaagatcaagctgaccccagaggaggaggcccacctgaagaagagcgccaagaccctgtgggagatccagaacaagctgaagctgtag

SEQ ID NO: 18825 - DNA, 861 bp, synthetic construct
  source 1..861: mol_type = other DNA; note = Synthetic coding sequence
atgatggccacccccaaccagacagcctgcaatgctgagagccctgtggccctggaggaggccaagaccagcggggcccctggcagcccccagaccccacctgagagacatgattctgggggcagcctgcccctgacccccaggatggagagccacagtgaagatgaggacctggccggggctgtgggcggcctgggctggaacagccgcagccccaggacccagagccctgggggctgcagcgctgaggccgtgctggccaggaagaagcacagaagaagacccagcaagaggaagaggcactggaggccctacctggagctgtcctgggccgagaagcagcagagagatgagcggcagagccagagggccagccgggtgcgggaggagatgtttgccaagggccagcctgtggccccctacaacaccacccagttcctgatgaatgaccgggaccctgaggagcccaacctggatgtgccccacggcatcagccaccctggcagcagcggggagagcgaggccggggacagtgatggccggggccgggcccatggagagttccagaggaaggacttcagcgagacctatgagcgcttccacacagagagcctgcagggccgcagcaagcaggagctggtgcgggactacctggagctggagaagaggctgagccaggccgaggaggagacccggcggctgcagcagctgcaggcctgcaccggccagcagagctgccggcaggtggaggagctggccgctgaggtgcagaggctgaggacagagaaccagaggctgcggcaggagaaccagatgtggaaccgggagggctgccgctgtgatgaggagcccggcacctag

SEQ ID NO: 18826 - DNA, 1206 bp, synthetic construct; identical to SEQ ID NO: 18795
  source 1..1206: mol_type = other DNA; note = Synthetic coding sequence

SEQ ID NO: 18827 - DNA, 1728 bp, synthetic construct
  source 1..1728: mol_type = other DNA; note = Synthetic coding sequence
atggccatggcccccagccccagcctggtgcaggtgtacaccagccctgctgctgtggccgtgtgggagtggcaggacggcctgggcacctggcacccctacagcgccaccgtgtgcagcttcatcgagcagcagtttgtgcagcagaagggccagcgcttcggcctgggcagcctggcccacagcatccccctgggccaggccgaccccagcctggccccctacatcatcgacctgcccagctggacccagttccggcaggacaccggcaccatgagagctgtgcggcggcacctgttcccccagcacagcgcccctggccggggcgtggtgtgggagtggctgagtgatgatggctcctggacagcctatgaggcctctgtgtgtgactacctggagcagcaggtggcccggggcaaccagctggtggacctggcccccctgggctacaactacacagtgaactacaccacccacacccagaccaacaagaccagcagcttctgccgctctgtgcggcggcaggccggccccccctaccctgtgaccaccatcatcgcccctcctggccacactggagtggcctgcagctgccaccagtgcctgagcggcagcaggactggacctgtgtctggccgctaccgccacagcatgaccaacctgcctgcctaccctgtgccccagcaccccccccacaggacagcctctgtgtttggcacccaccaggcctttgccccctacaacaagcccagcctgagcggggcccggagcgccccccggctgaacaccaccaatgcctggggcgccgccccacccagcctgggcagccagcccctgtaccgcagcagcctgagccacctgggcccccagcacctgcccccaggcagcagcaccagcggggctgtgtctgccagcctgcccagcggccccagcagcagccctggctctgtgcctgccaccgtgcccatgcagatgcccaagcccagccgggtgcagcaggccctggccggggccacccccaagccagagcctgagcctgagcaggtgatcaagaactacacagaggagctgaaggtgcccccagatgaggactgcatcatctgcatggagaagctgagcacagccagcggctacagtgatgtgacagacagcaaggccatcggcagcctggccgtgggccacctgaccaagtgcagccacgccttccacctgctgtgcctgctggccatgtactgcaatggaaacaaggatggcagcctgcagtgccccagctgcaagaccatctatggagagaagacaggcacccagccccagggcaagatggaggtgctgcgcttccagatgagcctgcccggccacgaggactgtggcaccatcctgattgtgtacagcatcccccacggcatccagggccctgagcaccccaaccctgggaagcccttcaccgcccggggcttcccccggcagtgctacctgcctgacaatgcccagggcaggaaggtgctggagctgctgaaggtggcctggaagagaagactcatcttcaccgtgggcaccagcagcaccactggagaaacagacacagtggtgtggaatgagatccaccacaagacagagatggacaggaacatcactggacatggctacccagaccccaactacctgcagaatgtgctggccgagctggccgcccagggcgtgacagaggactgcctggagcagcagtag

SEQ ID NO: 18828 - DNA, 1095 bp, synthetic construct
  source 1..1095: mol_type = other DNA; note = Synthetic coding sequence
atggagcacaacggcagcgccagcaatgctgacaagatccaccagaaccggctgagctctgtgacagaagatgaggaccaggatgctgccctgaccatcgtgacagtgctggacaaggtggccagcatcgtggacagcgtgcaggccagccagaagagaattgaggagcggcaccgggagatggagaatgccatcaagtctgtgcagattgacctgctgaagctgagccagagccacagcaacacaggccacatcatcaacaagctgtttgagaagaccaggaaggtgtctgcccacatcaaggatgtgaaggcccgggtggagaagcagcagatccacgtgaagaaggtggaggtgaagcaggaggagatcatgaagaagaacaagttccgggtggtgatcttccaggagaagttccgctgccccaccagcctgtctgtggtgaaggacaggaacctgacagagaaccaggaggaggatgatgatgacatctttgatcctcctgtggacctgagcagtgatgaggagtactacgtggaggagagccgcagcgcccggctgaggaagagcggcaaggagcacatcgacaacatcaagaaggccttcagcaaagaaaacatgcagaagacccggcagaacctggacaagaaggtgaaccgcatccgcaccagaattgtgaccccagagcggcgggagcggctgcggcagagcggggagcggctgcggcagagcggggagcggctgcggcagagcggggagcgcttcaagaagagcatcagcaatgctgcccccagcaaggaggccttcaagatgaggagcctgaggaagggcaaggacagaacagtggccgagggggaggagtgtgcccgggagatgggcgtggacatcatcgcccggtctgagagcctgggccccatcagcgagctgtacagtgatgagctgtctgagcctgagcatgaagctgcccggcctgtgtacccacctcatgagggccgggagatccccaccccagagcccctgaaggtgaccttcaagagccaggtgaaggtggaggatgatgagagcctgctgctggacctgaagcacagcagctag

SEQ ID NO: 18829 - DNA, 1266 bp, synthetic construct
  source 1..1266: mol_type = other DNA; note = Synthetic coding sequence
atgcccaccctgtctgtgttcatggatgtgcccctggcccacaagctggagggcagcctgctgaagacctacaagcaggatgactaccccaacaagatcttcctggcctacagagtgtgcatgaccaatgaaggccacccctgggtgtccctggtggtgcagaagacccggctgcagatcagccaggaccccagcctgaactatgagtacctgcccaccatgggcctgaagagcttcatccaggccagcctggccctgctgtttgggaagcacagccaggccatcgtggagaacagagtgggcggcgtgcacacagtgggggacagcggggccttccagctgggcgtgcagttcctgcgggcctggcacaaggatgcccgcatcgtgtacatcatcagcagccagaaggagctgcacggcctggtgttccaggacatgggcttcaccgtgtatgagtacagcgtgtgggaccccaagaagctgtgcatggaccctgacatcctgctgaatgtggtggagcagatcccccacggctgtgtgctggtgatgggcaacatcatcgactgcaagctgacccccagcggctgggccaagctgatgtccatgatcaagagcaagcagatcttccccttctttgacatcccctgccagggcctgtacaccagtgacctggaggaggacacccgcatcctgcagtactttgtgtcccagggctttgagttcttctgcagccagagcctgagcaagaactttggcatctatgatgaaggagtgggcatgctggtggtggtggccgtgaacaaccagcagctgctgtgtgtgctgagccagctggagggcctggcccaggccctgtggctgaacccccccaacacaggagcccgggtcatcaccagcatcctgtgcaacccagccctgctgggggagtggaagcagagcctgaaggaggtggtggagaacatcatgctgaccaaggagaaggtgaaggagaagctgcagctgctgggcaccccaggctcctggggccacatcacagagcagagcggcacccacggctacctgggcctgaacagccagcaggtggagtacctggtgaggaagaagcacatctacatccccaagaatggccagatcaacttcagctgcatcaatgccaacaacatcaactacatcacagagggcatcaatgaggccgtgctgctgacagagagcagcgagatgtgcctgcccaaggagaagaagaccctgattggcatcaagctgtag

SEQ ID NO: 18830 - DNA, 576 bp, synthetic construct
  source 1..576: mol_type = other DNA; note = Synthetic coding sequence
atgggcaagagctgcaaggtggtggtgtgtggccaggcctctgtgggcaagaccagcatcctggagcagctgctgtatggcaaccacgtggtgggcagcgagatgattgagacccaggaggacatctacgtgggcagcattgaaacagaccggggcgtgcgggagcaggtgcgcttctatgacacccggggcctgagagatggagctgagctgcccaggcactgcttcagctgcacagatggctacgtgctggtgtacagcacagacagccgggagagcttccagagggtggagctgctgaagaaggagattgacaagagcaaggacaagaaggaggtgaccatcgtggtgctgggcaacaagtgtgacctgcaggagcagaggagagtggaccctgatgtggcccagcactgggccaagtctgagaaggtgaagctgtgggaggtgtctgtggccgaccggcgcagcctgctggagccctttgtgtacctggccagcaagatgacccagccccagagcaagagcgccttccccctgagcaggaagaacaagggcagcggcagcctggatggatag

SEQ ID NO: 18831 - DNA, 3207 bp, synthetic construct
  source 1..3207: mol_type = other DNA; note = Synthetic coding sequence
atggtgtccagtgacaggcctgtgtccctggaggatgaggtgagccacagcatgaaggagatgattggaggctgctgcgtgtgcagtgatgagcggggctgggccgagaaccccctggtgtactgtgatggccacggctgcagcgtggccgtgcaccaggcctgctacggcatcgtgcaggtgcccaccggcccctggttctgcaggaaatgtgagagccaggagagagctgcccgggtgcgctgtgagctgtgcccccacaaggatggagccctgaagaggacagacaatggaggctgggcccacgtggtgtgtgccctgtacatccctgaggtgcagtttgccaacgtgtccaccatggagcccatcgtgctgcagagcgtgccccatgaccgctacaacaagacctgctacatctgtgatgagcagggccgggagagcaaggccgccactggagcctgcatgacctgcaacaagcacggctgccggcaggccttccacgtgacctgtgcccagtttgctggcctgctgtgtgaggaggagggcaatggagctgacaacgtgcagtactgcggctactgcaagtaccacttcagcaagctgaagaagagcaagaggggcagcaacagaagctatgaccagagcctgagtgacagcagcagccacagccaggacaagcaccacgagaaggagaagaagaagtacaaggagaaggacaagcacaagcagaagcacaagaagcagcctgagcccagccctgccctggtgcccagcctgactgtgaccacagagaagacctacaccagcaccagcaacaacagcatcagcggcagcctgaagaggctggaggacaccacagcccgcttcaccaatgccaacttccaggaggtgtctgcccacaccagcagcggcaaggatgtgtctgagacccggggcagcgagggcaagggcaagaagagcagcgcccacagcagcggccagaggggcaggaagccaggcggcggcaggaaccctggcaccaccgtgtctgctgccagccccttcccccagggcagcttcagcggcaccccaggctctgtgaagagcagcagcggcagctctgtgcagagcccccaggacttcctgtccttcacagacagcgacctgagaaatgacagctacagccacagccagcagagcagcgccaccaaggatgtgcacaagggggagagcggcagccaggagggcggcgtgaacagcttcagcaccctcatcggcctgcccagcaccagcgctgtgaccagccagcccaagagctttgagaacagccctggggacctgggcaacagcagcctgcccacagctggctacaagagggcccagaccagcggcatcgaggaggagaccgtgaaggagaagaagaggaaaggaaacaagcagagcaagcacggccctggccggcccaagggcaacaagaaccaggagaatgtgagccacctgtctgtgtcctctgccagccccaccagctctgtggccagcgctgctggcagcatcaccagcagcagcctgcagaagagccccaccctgctgagaaatggcagcctgcagagcctgtctgtgggcagcagccctgtgggcagcgagatctccatgcagtacagacatgatggagcctgccccaccaccaccttcagcgagctgctgaatgccatccacaacggcatctacaacagcaatgatgtggccgtgtccttccccaacgtggtgtctggcagcggcagcagcacccctgtgagcagcagccacctgccccagcagagcagcggccacctgcagcaggtgggcgccctgagccccagcgctgtgtcctctgctgccccagctgtggccaccacccaggccaacaccctgagcggcagcagcctgagccaggcccccagccacatgtatggcaacagaagcaacagctccatggccgccctgattgcccagagcgagaacaaccagacagaccaggacctgggggacaacagcaggaacctggtgggccggggcagcagcccccggggcagcctgagccccaggagccctgtgagcagcctgcagatccgctatgaccagcccggcaacagcagcctggagaacctgccccctgtggccgccagcattgagcagctgctggagcggcagtggagcgagggccagcagttcctgctggagcagggcacccccagcgacatcctgggcatgctgaagagcctgcaccagctgcaggtggagaacagaaggctggaggagcagatcaagaacctgacagccaagaaggagcggctgcagctgctgaatgcccagctgtctgtgcccttccccaccatcacagccaaccccagccccagccaccagatccacaccttcagcgcccagacagcccccaccacagacagcctgaacagcagcaagagcccccacatcggcaacagcttcctgcctgacaacagcctgcctgtgctgaaccaggacctgaccagcagcggccagagcaccagcagcagcagcgccctgagcaccccacctcctgctggccagagccctgcccagcagggcagcggcgtgtctggagtgcagcaggtgaatggagtgacagtgggcgccctggccagcggcatgcagcctgtgaccagcaccatcccagctgtgtctgctgtgggcggcatcattggagccctgcccggcaaccagctggccatcaatggcatcgtgggcgccctgaatggagtgatgcagacccctgtgaccatgagccagaaccccacccccctgacccacaccaccgtgcccccaaatgccacccaccccatgcctgccaccctgaccaacagcgccagcggcctgggcctgctgagtgaccagcagaggcagatcctgatccaccagcagcagttccagcagctgctgaacagccagcagctgaccccagagcagcaccaggccttcctgtaccagctgatgcagcaccaccaccagcagcaccaccagcctgagctgcagcagctgcagatccctggccccacccagatccccatcaacaacctgctggccggcacccaggccccacccctgcacacagccaccaccaaccccttcctgaccatccatggagacaatgccagccagaaggtggcccggctgagtgacaagacaggccctgtggcccaggagaagagctag

SEQ ID NO: 18832 - DNA, 1353 bp, synthetic construct
  source 1..1353: mol_type = other DNA; note = Synthetic coding sequence
atgagctgcctgatggtggagcgctgtggggagatcctgtttgaaaatccagaccagaatgccaagtgtgtgtgcatgctgggggacatccggctgcggggccagacaggagtgcgggcagagcggcggggcagctaccccttcatcgacttccggctgctgaacagcaccacctacagcggggagatcggcaccaagaagaaggtgaagaggctgctgtccttccagcgctacttccacgccagccggctgctgcggggcatcatcccccaggcccccctgcacctgctggatgaggactacctgggccaggcccggcacatgctgagcaaggtgggcatgtgggactttgacatcttcctgtttgaccggctgaccaatggaaacagcctggtgaccctgctgtgccacctgttcaacacccacggcctcatccaccacttcaagctggacatggtgaccctgcaccgcttcctggtgatggtgcaggaggactaccacagccagaacccctaccacaatgctgtgcacgccgcagatgtgacccaggccatgcactgctacctgaaggagcccaagctggccagcttcctgacccccctggacatcatgctgggcctgctggccgctgctgcccatgatgtggaccaccctggggtgaaccagcccttcctgatcaagaccaaccaccacctggccaacctgtaccagaacatgtctgtgctggagaaccaccactggaggagcaccatcggcatgctgcgggagagccggctgctggcccacctgcccaaggagatgacccaggacatcgagcagcagctgggcagcctcatcctggccacagacatcaaccggcagaatgagttcctgacccggctgaaggcccacctgcacaacaaggacctgcggctggaggatgcccaggacagacacttcatgctgcagatcgccctgaagtgtgccgacatctgcaacccctgccgcatctgggagatgagcaagcagtggagcgagcgggtgtgtgaggagttctaccggcagggcgagctggagcagaagtttgagctggagatcagccccctgtgcaaccagcagaaggacagcatccccagcatccagatcggcttcatgagctacatcgtggagcccctcttccgggagtgggcccacttcaccggcaacagcaccctgtctgagaacatgctgggccacctggcccacaacaaggcccagtggaagagcctgctgccccggcagcacaggagccggggcagcagcggcagcggccctgaccatgaccacgccggccagggcacagagagcgaggagcaggagggggacagcccctag

SEQ ID NO: 18833 - DNA, 2268 bp, synthetic construct
  source 1..2268: mol_type = other DNA; note = Synthetic coding sequence
atggccggctgcatccctgaggagaagacctaccgccgcttcctggagctgttcctgggggagttccggggcccctgtggcggcggggagcctgagcctgagcctgagcctgagcctgagcctgagcctgagagcgagcctgagcctgagcctgagctggtggaggccgaggccgctgaggcctctgtggaggagcccggggaggaggccgccaccgtggccgccacagaggagggggaccaggagcaggaccctgagcctgaggaggaggccgctgtggagggggaggaggaggaggagggcgccgccacagctgctgctgcccctggccacagcgctgtgcccccacctccaccccagctgccccccctgccccccctgccccggcccctgtctgagcgcatcacccgggaggaggtggagggggagagcctggacctgtgcctgcagcagctgtacaagtacaactgccccagcttcctggccgccgccctggcccgggccaccagtgatgaggtgctgcagagcgacctgagcgcccactacatccccaaggagacagatggaacagagggcaccgtggagattgagaccgtgaagctggcccggagcgtcttcagcaagctgcacgagatctgctgctcctgggtgaaggacttccccctgcggcggcggccccagctgtactatgagaccagcatccacgccatcaagaacatgaggaggaagatggaggacaagcacgtgtgcatcccagacttcaacatgctgttcaacctggaggaccaggaggagcaggcctactttgctgtgtttgatggccatggaggagtggatgctgccatctatgccagcatccacctgcacgtgaacctggtgcggcaggagatgttcccccatgaccctgctgaggccctgtgccgggccttccgggtgacagatgaaagatttgtgcagaaggccgcccgggagagcctgcgctgtggcaccactggagtggtgaccttcatccggggcaacatgctgcacgtggcctgggtgggggacagccaggtgatgctggtgaggaagggccaggccgtggagctgatgaagccccacaagccagaccgggaggatgagaagcagagaattgaggccctgggcggctgtgtggtgtggtttggagcctggagggtgaatggcagcctgtctgtgtcccgggccatcggagatgctgagcacaagccctacatctgtggagatgctgacagcgccagcacagtgctggatggaacagaggactacctgatcctggcctgtgatggcttctatgacacagtgaacccagatgaggccgtgaaggtggtgtctgaccacctgaaggagaacaacggggacagctccatggtggcccacaagctggtggccagcgccagagatgctggcagcagtgacaacatcaccgtcatcgtggtgttcctgcgggacatgaacaaggctgtgaatgtgtctgaggagagtgactggacagaaaattccttccagggcggccaggaggatggaggagatgacaaggagaaccacggggagtgcaagaggccctggccccagcaccagtgcagcgccccagctgacctgggctatgatggccgggtggacagcttcacagacaggaccagcctgagccctggcagccagatcaacgtgctggaggaccccggctacctggacctgacccagatcgaggccagcaagccccacagcgcccagttcctgctgcctgtggagatgtttggacctggggcccccaagaaggccaacctgatcaatgagctgatgatggagaagaagtctgtgcagagcagcctgcctgagtggagcggggccggggagttccccacagccttcaacctgggcagcactggagagcagatctacaggatgcagagcctgagccctgtgtgcagcggcctggagaatgagcagttcaagagccctggcaacagagtgtcccggctgagccacctgcggcaccactacagcaagaagtggcaccgcttccgcttcaaccccaagttctacagcttcctgagcgcccaggagcccagccacaagattggcaccagcctgagcagcctgaccggcagcggcaagaggaaccgcatccgcagcagcctgccctggaggcagaacagctggaagggctacagcgagaacatgaggaagctgaggaagacccatgacatcccctgcccagacctgccctggagctacaagattgaatag

SEQ ID NO: 18834 - DNA, 771 bp, synthetic construct
  source 1..771: mol_type = other DNA; note = Synthetic coding sequence
atggccagccgctatgaccgggccatcaccgtcttctccccagatggccacctgttccaggtggagtatgcccaggaggccgtgaagaagggcagcacagctgtgggcatccggggcaccaacatcgtggtgctgggcgtggagaagaagtctgtggccaagctgcaggatgagaggacagtgaggaagatctgtgccctggatgaccacgtgtgcatggcctttgctgtgctgaccatcttcatcggcctgacagcagatgcccgggtggtgatcaacagagcccgggtggagtgccagagccacaagctgactgtggaggaccctgtgacagtggagtacatcacccgcttcatcgccaccctgaagcagaagtacacccagagcaatggccggcggcccttcggcatcagcgccctgattgtgggctttgatgatgatggcatcagccggctgtaccagacagaccccagcggcacctaccacgcctggaaggccaatgccatcggccgcagcgccaagacagtgcgggagttcctggagaagaactacacagaagatgccatcgccagtgacagcgaggccatcaagctggccatcaaggccctgctggaggtggtgcagagcggcggcaagaacatcgagctggccatcatcagaagaaaccagcccctgaagatgttttctgccaaggaggtggagctgtatgtgacagaaattgagaaggagaaggaggaggccgagaagaagaagagcaagaagtctgtgtag

SEQ ID NO: 18835 - DNA, 3108 bp, synthetic construct
  source 1..3108: mol_type = other DNA; note = Synthetic coding sequence
atggccccccggctgcagctggagaaggccgcctggcgctgggccgagaccgtgcggcctgaggaggtgtcccaggagcacatcgagacagcctaccgcatctggctggagccctgcatccggggcgtgtgcagaagaaactgcaagggcaaccccaactgcctggtgggcatcggggagcacatctggctgggggagattgatgaaaattccttccacaacattgatgaccccaactgtgagaggaggaagaagaacagctttgtgggcctgaccaacctgggcgccacctgctacgtgaacaccttcctgcaggtgtggttcctgaacctggagctgcggcaggccctgtacctgtgccccagcacctgcagcgactacatgctgggagatggcatccaggaggagaaggactatgagccccagaccatctgtgagcacctgcagtacctgtttgccctgctgcagaacagcaacagacgctacatcgaccccagcggctttgtgaaggccctgggcctggacaccggccagcagcaggatgcccaggagttcagcaagctgttcatgagcctgctggaggacaccctgagcaagcagaagaacccagatgtgaggaacatcgtgcagcagcagttctgtggggagtatgcctacgtgacagtgtgcaaccagtgtggccgggagagcaagctgctgagcaagttctatgagctggagctgaacatccagggccacaagcagctgacagactgcatcagcgagttcctgaaggaggagaagctggagggggacaaccgctacttctgtgagaactgccagagcaagcagaatgccaccaggaagatccggctgctgagcctgccctgcaccctgaacctgcagctgatgagatttgtgtttgaccggcagacaggccacaagaagaagctgaacacctacatcggcttcagcgagatcctggacatggagccctacgtggagcacaagggcggcagctatgtgtatgagctgtctgctgtgctgatccaccggggcgtgtctgcctacagcggccactacatcgcccacgtgaaggacccccagagcggggagtggtacaagttcaatgatgaggacatcgagaagatggagggcaagaagctgcagctgggcatcgaggaggacctggccgagcccagcaagagccagaccaggaagcccaagtgtgggaagggcacccactgcagcagaaatgcctacatgctggtgtaccgcctgcagacccaggagaagcccaacaccaccgtgcaggtgcctgccttcctgcaggagctggtggaccgggacaacagcaagtttgaggagtggtgcatcgagatggccgagatgaggaagcagagcgtggacaagggcaaggccaagcatgaggaggtgaaggagctgtaccagaggctgcctgctggagctgagccctatgaatttgtgtccctggagtggctgcagaagtggctggatgagagcacccccaccaagcccatcgacaaccacgcctgcctgtgcagccatgacaagctgcacccagacaagatcagcatcatgaagaggatcagtgaatatgctgctgacatcttctacagccgctatggaggcggcccccggctgactgtgaaggccctgtgcaaggaatgtgtggtggagcgctgccgcatcctgcggctgaagaaccagctgaatgaagactacaagacagtgaacaacctgctgaaggctgctgtgaagggcagtgatggcttctgggtgggcaagagcagcctgcgctcctggaggcagctggccctggagcagctggatgagcaggatggagatgctgagcagagcaatggcaagatgaatggcagcaccctgaacaaggatgagagcaaggaggagaggaaggaggaggaggagctgaacttcaatgaagacatcctgtgcccccacggggagctgtgcatcagtgaaaatgaaagaaggctggtgtccaaggaggcctggagcaagctgcagcagtacttccccaaggcccctgagttccccagctacaaggagtgctgcagccagtgcaagatcctggagcgggagggggaggagaatgaggccctgcacaagatgattgccaatgagcagaagaccagcctgcccaacctcttccaggacaagaaccggccctgcctgagcaactggccagaggacacagatgtgctgtacatcgtgtcccagttctttgtggaggagtggaggaagtttgtgaggaagcccacccgctgcagccctgtgtcctctgtgggcaacagcgccctgctgtgcccccacggcggcctgatgttcacctttgcctccatgaccaaggaggacagcaagctgattgccctgatctggcccagcgagtggcagatgatccagaagctgtttgtggtggaccacgtgatcaagatcacccgcatcgaggtgggagatgtgaaccccagcgagacccagtacatcagcgagcccaagctgtgcccagaatgtcgggagggcctgctgtgccagcagcagagggacctgcgggagtacacccaggccaccatctacgtgcacaaggtggtggacaacaagaaggtgatgaaggacagcgcccctgagctgaatgtgagcagcagcgagacagaggaggacaaggaggaggccaagccagatggagagaaggaccctgacttcaaccagagcaatggaggcaccaagaggcagaagatcagccaccagaactacatcgcctaccagaagcaggtgatcagaagatccatgaggcacaggaaggtgcggggggagaaggccctgctggtgtctgccaaccagaccctgaaggagctgaagatccagatcatgcacgccttctctgtggccccctttgaccagaacctgagcattgatggcaagatcctgagtgatgactgtgccaccctgggcaccctgggcgtcatccctgagagcgtcatcctgctgaaggcagatgagcccatcgctgactatgctgccatggatgatgtgatgcaggtgtgcatgcctgaggagggcttcaagggcaccggcctgctgggccactag

SEQ ID NO: 18836 - DNA, 2382 bp, synthetic construct
  source 1..2382: mol_type = other DNA; note = Synthetic coding sequence
atgctgatccagagcgagaagaagacccagctgagcaagacagagagcgtgaaggagagcgagagcctgatggagtttgcccagcctgagatccagccccaggagttcctgaacagacgctacatgacagaggtggactacagcaacaagcagggcgaggagcagccctgggaggccgactatgccaggaagcccaacctgcccaagcgctgggacatgctgacagagccagatggccaggagaagaagcaggagagcttcaagtcctgggaggccagcggcaagcaccaggaggtgtccaagccagctgtgtccctggagcagaggaagcaggacaccagcaagctgcggagcaccctgcctgaggagcagaagaagcaggagatcagcaagagcaagcccagccccagccagtggaagcaggacacccccaagagcaaggccggctacgtgcaggaggagcagaagaagcaggagacccccaagctgtggcctgtgcagctgcagaaggagcaggaccccaagaagcagacccccaagtcctggacccccagcatgcagagcgagcagaacaccaccaagtcctggaccacccccatgtgtgaggagcaggacagcaagcagcctgagacccccaagtcctgggagaacaacgtggagagccagaagcacagcctgaccagccagagccagatcagccccaagtcctggggcgtggccacagccagcctcatccccaatgaccagctgctgcccaggaagctgaacacagagcccaaggatgtgcccaagcctgtgcaccagcctgtgggcagcagcagcaccctgcccaaggaccctgtgctgaggaaggagaagctgcaggacctgatgacccagatccagggcacctgcaacttcatgcaggagagcgtgctggactttgacaagcccagcagcgccatccccaccagccagccccccagcgccaccccaggcagccctgtggccagcaaggagcagaacctgagcagccagagcgacttcctgcaggagcccctgcaggccaccagcagccctgtgacctgcagcagcaatgcctgcctggtgaccacagaccaggccagcagcggcagcgagacagagttcatgaccagcgagaccccagaggccgccatccccccaggcaagcagcccagcagcctggccagccccaacccccccatggccaagggcagcgagcagggcttccagagccccccagccagcagcagctctgtgaccatcaacacagcccccttccaggccatgcagaccgtcttcaacgtgaatgcccccctgccccccaggaaggagcaggagatcaaggagagcccctacagccctggctacaaccagagcttcaccacagccagcacccagaccccaccccagtgccagctgcccagcatccacgtggagcagacagtgcacagccaggagacagccaactaccacccagatggcaccatccaggtgtccaatggcagcctggccttctacccagcccagaccaacgtgttcccccggcccacccagccctttgtgaacagccggggctctgtgcggggctgcacccggggcggccgcctcatcaccaacagctaccgcagccctgggggctacaagggctttgacacctaccggggcctgcccagcatcagcaatggaaactacagccagctgcagttccaggcccgggagtacagcggggccccctacagccagagggacaacttccagcagtgctacaagagaggaggcaccagcggcggcccccgggccaacagcagagctggctggagcgacagcagccaggtgagcagccctgagcgggacaatgagaccttcaacagcggggacagcggccagggcgacagccgctccatgacccctgtggatgtgcctgtgaccaacccagctgccaccatcctgcctgtgcacgtgtaccccctgccccagcagatgagggtggccttctctgctgcccggaccagcaacctggcccctggcaccctggaccagcccatcgtgtttgacctgctgctgaacaacctgggggagacctttgacctgcagctgggccgcttcaactgccctgtgaatggcacctacgtgttcatcttccacatgctgaagctggccgtgaatgtgcccctgtatgtgaacctgatgaagaatgaggaggtgctggtgtctgcctatgccaatgatggagccccagaccatgaaacagccagcaaccacgccatcctgcagctgttccagggcgaccagatctggctgcggctgcacagaggagccatctacggcagctcctggaagtacagcaccttcagcggctacctgctgtaccaggactag

SEQ ID NO: 18837 - DNA, 1083 bp, synthetic construct
  source 1..1083: mol_type = other DNA; note = Synthetic coding sequence
atggaggagctgagccaggccctggccagcagcttctctgtgtcccaggacctgaacagcacagctgccccccacccccggctgagccagtacaagagcaagtacagcagcctggagcagagcgagaggagaagaaggctgctggagctgcagaagagcaagaggctggactatgtgaaccacgcccggcggctggctgaagatgactggacaggcatggagagcgaggaggagaacaagaaggatgatgaggagatggacatcgacacagtgaagaagctgcccaagcactacgccaaccagctgatgctgtctgagtggctgattgatgtgcccagcgacctgggccaggagtggatcgtggtggtgtgccctgtgggcaagagggccctgattgtggccagccggggcagcaccagcgcctacaccaagagcggctactgtgtgaaccgcttcagcagcctgctgcccggcggcaacagaagaaacagcacagccaaggactacaccatcctggactgcatctacaatgaggtgaaccagacctactacgtgctggatgtgatgtgctggaggggccaccccttctatgactgccagacagacttccgcttctactggatgcacagcaagctgcctgaggaggagggcctgggggagaagaccaagctgaaccccttcaagtttgtgggcctgaagaacttcccctgcaccccagagagcctgtgtgatgtgctgtccatggacttcccctttgaggtggatggcctgctcttctaccacaagcagacccactacagccctggcagcacccccctggtgggctggctgcggccctacatggtgtctgatgtgctgggcgtggccgtgcctgctggccccctgaccaccaagccagactatgccggccaccagctgcagcagatcatggagcacaagaagagccagaaggagggcatgaaggagaagctgacccacaaggcctctgaaaatggccactatgagctggagcacctgagcacccccaagctgaagggcagcagccacagcccagaccaccctggctgcctgatggagaactag

SEQ ID NO: 18838 - DNA, 525 bp, synthetic construct
  source 1..525: mol_type = other DNA; note = Synthetic coding sequence
ctcatccacaagcccctgaagagggccatcaccaccctgatggccggcatcctgcggctggtggtgcagtggcccccaggccgcctgcagacagtgaccaagggcgtggagagcctcatctgcacagactggatccgccacaagttcaccaggagccgcatccctgagaaggtgttccaggccagccctgaggaccacgagaagtatggaggagacccccagaacccccacaagctgcacatcgtgacccgcatcaagagcacccggcggcggccctactgggagaaggacatcatcaagatgctgggcctggagaaggcccacaccccccaggtgcacaagaacatccccagcgtgaatgccaagctgaaggtggtgaagcacctgatccgcatcaagcccctgaagctgccccagggcctgcctgctgaggagaacatgagcaacacctgcctgaagagcactggagagctggtggtgcagtggcacctgaagcctgtggagcagaaggcccacgagagctag

SEQ ID NO: 18839 - DNA, 1434 bp, synthetic construct
  source 1..1434: mol_type = other DNA; note = Synthetic coding sequence
atggccacctacacctgcatcacctgccgggtggccttcagagatgctgacatgcagagggcccactacaagacagactggcaccgctacaacctgcggaggaaggtggcctccatggcccctgtgacagctgagggcttccaggagcgggtgcgggcccagagagctgtggccgaggaggagagcaaaggaagtgccacctactgcaccgtgtgcagcaagaagtttgccagcttcaatgcctatgagaaccacctgaagagcagaagacatgtggagctggagaagaaggctgtgcaggccgtgaacaggaaggtggagatgatgaatgagaagaacctggagaagggcctgggcgtggacagcgtggacaaggatgccatgaatgctgccatccagcaggccatcaaggcccagcccagcatgagccccaagaaggcccccccagccccagccaaggaggccagaaatgtggtggccgtgggcactggaggccggggcacccatgaccgggaccccagcgagaagccaccccggctgcagtggtttgagcagcaggccaagaagctggccaagcagcaggaggaggacagcgaggaggaggaggaggacctggatggagatgactgggaggacatcgacagtgatgaggagctggagtgtgaggacacagaggccatggatgatgtggtggagcaggatgctgaggaggaggaggccgaggagggcccccccctgggcgccatccccatcacagactgcctcttctgcagccaccacagcagcagcctgatgaagaatgtggcccacatgaccaaggaccacagcttcttcatcccagacatcgagtacctgagtgacatcaagggcctcatcaagtacctgggggagaaggtgggcgtgggcaagatctgcctgtggtgcaatgagaagggcaagagcttctacagcacagaggccgtgcaggcccacatgaatgacaagagccactgcaagctgttcacagatggagatgctgccctggagtttgctgacttctatgacttccgcagcagctacccagaccacaaggagggggaggaccccaacaaggccgaggagctgcccagcgagaagaacctggagtatgatgatgagaccatggagctgatcctgcccagcggggcccgggtgggccacaggagcctgatgagatactacaagcagcgcttcggcctgagcagagctgtggccgtggccaagaacaggaaggctgtgggccgggtgctgcagcagtaccgggccctgggctggacaggcagcactggagctgccctgatgagggagcgggacatgcagtatgtgcagaggatgaagagcaagtggatgctgaagacaggcatgaagaacaatgccaccaagcagatgcacttccgggtgcaggtgcgcttctag

SEQ ID NO: 18840 - DNA, 2862 bp, synthetic construct
  source 1..2862: mol_type = other DNA; note = Synthetic coding sequence
atgatcaccagcgctgctggcatcatcagcctgctggatgaagatgagccccagctgaaggagtttgccctgcacaagctgaatgctgtggtgaatgacttctgggccgagatcagcgagagcgtggacaagattgaggtgctgtatgaagatgagggcttccgcagccggcagtttgctgccctggtggccagcaaggtgttctaccacctgggcgcctttgaggagagcctgaactatgccctgggcgctggggacctcttcaacgtgaatgacaacagtgaatatgtggagaccatcatcgccaagtgcatcgaccactacaccaagcagtgtgtggagaatgctgacctgcctgagggggagaagaagcccatcgaccagaggctggagggcatcgtgaacaagatgttccagcgctgcctggatgaccacaagtacaagcaggccatcggcatcgccctggagacccggcggctggatgtgtttgagaagaccatcctggagagcaatgatgtgcccggcatgctggcctacagcctgaagctgtgcatgagcctgatgcagaacaagcagttcaggaacaaggtgctgcgggtgctggtgaagatctacatgaacctggagaagccagacttcatcaacgtgtgccagtgcctgatcttcctggatgacccccaggccgtgtctgacatcctggagaagctggtgaaggaggacaacctgctgatggcctaccagatctgctttgacctgtatgaaagtgccagccagcagttcctgagcagcgtcatccagaacctgaggacagtgggcacccccatcgcctctgtgcccggcagcaccaacacaggcaccgtgcccggcagcgagaaggacagcgacagcatggagacagaggagaagaccagcagcgcctttgtgggcaagaccccagaggccagccctgagcccaaggaccagaccctgaagatgatcaagatcctgagcggggagatggccatcgagctgcacctgcagttcctgatccggaacaacaacacagacctgatgatcctgaagaacaccaaggatgctgtgagaaattctgtgtgccacacagccaccgtgattgccaacagcttcatgcactgcggcaccaccagtgaccagttcctgcgggacaacctggagtggctggcccgggccaccaactgggccaagttcaccgccacagccagcctgggcgtcatccacaagggccacgagaaggaggccctgcagctgatggccacctacctgcccaaggacaccagccctggcagcgcctaccaggagggcggcggcctgtatgccctgggcctcatccacgccaaccacggcggggacatcatcgactacctgctgaaccagctgaagaatgccagcaatgacatcgtgagacatggaggcagcctgggcctgggcctggccgccatgggcacagcccggcaggatgtgtatgacctgctgaagaccaacctgtaccaggatgatgctgtgactggagaggccgccggcctggccctgggcctggtgatgctgggcagcaagaatgcccaggccatcgaggacatggtgggctacgcccaggagacccagcacgagaagatcctgcggggcctggccgtgggcatcgccctggtgatgtatggccgcatggaggaggctgatgccctgattgagagcctgtgccgggacaaggaccccatcctgcggcgcagcggcatgtacacagtggccatggcctactgcggcagcggcaacaacaaggccatccggcggctgctgcacgtggccgtgtctgatgtgaatgatgatgtgagaagagctgctgtggagagcctgggcttcatcctcttccgcaccccagagcagtgccccagcgtggtgtccctgctgtctgagagctacaacccccacgtgcgctacggggccgccatggccctgggcatctgctgtgccggcactggaaacaaggaggccatcaacctgctggagcccatgaccaatgaccctgtgaactacgtgcggcagggcgccctgattgccagcgccctgatcatgatccagcagacagagatcacctgccccaaggtgaaccagttccggcagctgtacagcaaggtgatcaatgacaagcatgatgatgtgatggccaagtttggagccatcctggcccagggcatcctggatgctgggggccacaacgtgaccatcagcctgcagagcaggacaggccacacccacatgcccagcgtggtgggcgtgctggtgttcacccagttctggttctggttccccctgagccacttcctgagcctggcctacacccccacctgtgtgattggcctgaacaaggacctgaagatgcccaaggtgcagtacaagagcaactgcaagcccagcacctttgcctacccagcccccctggaggtgcccaaggagaaggagaaggagaaggtgtccacagctgtgctgagcatcacagccaaggccaagaagaaggagaaggagaaggagaagaaggaggaggagaagatggaggtggatgaagctgagaagaaggaggagaaggagaagaagaaggagcctgagcccaacttccagctgctggacaacccagcccgggtgatgcctgcccagctgaaggtgctgaccatgcctgagacctgccgctaccagcccttcaagcccctgagcatcggcggcatcatcatcctgaaggacaccagtgaagatattgaggagctggtggagcctgtggccgcccacggccccaagattgaggaggaggagcaggagcctgagcccccagagccctttgagtacattgatgactag

SEQ ID NO: 18841 - DNA, 984 bp, synthetic construct
  source 1..984: mol_type = other DNA; note = Synthetic coding sequence
atgtgcagcaccagcggctgtgacctggaggagatccccctggatgatgatgacctgaacaccatcgagttcaagatcctggcctactacaccaggcaccacgtgttcaagagcaccccagccctcttcagccccaagctgctgcggaccaggagcctgagccagaggggcctgggcaactgcagcgccaatgaatcctggacagaggtgtcctggccctgcaggaacagccagagcagcgagaaggccatcaacctgggcaagaagaagagctcctggaaggccttctttggagtggtggagaaggaggacagccagagcaccccagccaaggtgtctgcccagggccagaggaccctggagtaccaggacagccacagccagcagtggagccgctgcctgagcaatgtggagcagtgcctggagcatgaagctgtggaccccaaggtgatcagcatcgccaacagagtggccgagatcgtgtacagctggcccccaccccaggccacccaggccggcggcttcaagagcaaggagatctttgtgacagagggcctgtccttccagctgcagggccacgtgcctgtggccagcagcagcaagaaggatgaggaggagcagatcctggccaagatcgtggagctgctgaagtacagcggggaccagctggagaggaagctgaagaaggacaaggccctgatgggccacttccaggacggcctgagctacagcgtcttcaagaccatcacagaccaggtgctgatgggcgtggaccccagaggagagagcgaggtgaaggcccagggcttcaaggccgccctggtgattgatgtgacagccaagctgacagccatcgacaaccaccccatgaacagagtgctgggcttcggcaccaagtacctgaaggagaacttcagcccctggatccagcagcacggcggctgggagaagatcctgggcatcagccatgaggaggtggactag

SEQ ID NO: 18842 - DNA, 1086 bp, synthetic construct
  source 1..1086: mol_type = other DNA; note = Synthetic coding sequence
atgggcggcgctgtgtctgctggagaagataatgatgagctgattgacaacctgaaggaggcccagtacatcagaacagagctggtggagcaggccttccgggccatcgacagagctgactactacctggaggagttcaaggaaaatgcctacaaggacctggcctggaagcacggcaacatccacctgagcgccccctgcatctacagcgaggtgatggaggccctggacctgcagcccggcctgtccttcctgaacctgggcagcggcaccggctacctgagctccatggtgggcctcatcctgggcccctttggagtgaaccacggcgtggagctgcacagtgatgtgattgaatatgccaagcagaagctggacttcttcatccgcaccagtgacagctttgacaagtttgacttctgtgagcccagctttgtgactggaaactgcctggagatcagcccagactgcagccagtatgacagagtgtactgtggggccggcgtgcagaaggagcacgaggagtacatgaagaacctgctgaaggtgggcggcatcctggtgatgcccctggaggagaagctgaccaagatcaccaggacaggccccagcgcctgggagaccaagaagatcctggccgtgtcctttgcccccctcatccagccctgccacagcgagagcggcaagagccggctggtgcagctgccccctgtggccgtgcgcagcctgcaggacctggccagaattgccatccggggcaccatcaagaagatcatccaccaggagaccgtgtccaagaatggaaatggcctgaagaacaccccccgcttcaagagaagaagagtgagaagaagaaggatggagaccatcgtgttcctggacaaggaggtgtttgccagccgcatcagcaaccccagtgatgacaacagctgtgaggacctggaggaggagcggcgggaggaggaggagaagaccccacctgagaccaagccagacccccctgtgaacttcctgcggcagaaggtgctgagcctgcccctgcctgaccccctgaagtactacctgctgtactaccgggagaagtag

SEQ ID NO: 18843 - DNA, 780 bp, synthetic construct
  source 1..780: mol_type = other DNA; note = Synthetic coding sequence
atgaaggatgtggacaacctgaagagcatcaaggaggagtgggtgtgtgagaccggcagtgacaaccagcccctgggcaacaaccagcagagcaactgtgagtactttgtggacagcctgtttgaggaggcccagaaggtgagcagcaaatgtgtgtccccagctgagcagaagaagcaggtggatgtgaacatcaagctgtggaagaatggcttcaccgtgaatgatgacttccgcagctacagtgatggagccagccagcagttcctgaacagcatcaagaagggggagctgcccagcgagctgcagggcatctttgacaaggaggaggtggatgtgaaggtggaggacaagaagaatgagatctgcctgagcaccaagcctgtgttccagcccttcagcggccagggccaccggctgggcagcgccacccccaagatcgtgtccaaggccaagaacatcgaggtggagaacaagaacaacctgtctgctgtgcccctgaacaacctggagcccatcaccaacatccagatctggctggccaacgggaagagaattgtgcagaagttcaacatcacccaccgggtgagccacatcaaggacttcatcgagaagtaccagggcagccagaggagcccccccttcagcctggccacagccctgcctgtgctgcggctgctggatgagaccctgaccctggaggaggccgacctgcagaatgctgtgatcatccagaggctgcagaagacagccagcttccgggagctgtctgagcactag

SEQ ID NO: 18844 - DNA, 990 bp, synthetic construct
  source 1..990: mol_type = other DNA; note = Synthetic coding sequence
atggtgaggaccaagacctggaccctgaagaagcactttgtgggctaccccaccaacagcgactttgagctgaagacagctgagctgccccccctgaagaatggagaggtgctgctggaggccctcttcctgactgtggacccctacatgagggtggccgccaagaggctgaaggagggggacaccatgatgggccagcaggtggccaaggtggtggagagcaagaatgtggccctgcccaagggcaccatcgtgctggccagccctggctggaccacccacagcatcagtgatggcaaggacctggagaagctgctgacagagtggccagacaccatccccctgagcctggccctgggcaccgtgggcatgcctggcctgacagcctacttcggcctgctggagatctgtggggtgaagggcggggagaccgtgatggtgaatgctgctgctggagctgtgggctctgtggtgggccagatcgccaagctgaagggctgcaaggtggtgggcgctgtgggcagtgatgagaaggtggcctacctgcagaagctgggctttgatgtggtgttcaactacaagacagtggagagcctggaggagaccctgaagaaggccagcccagatggctatgactgctactttgacaacgtgggcggggagttcagcaacacagtgattggccagatgaagaagtttggccgcatcgccatctgtggggccatcagcacctacaacagaacaggccccctgcccccaggccccccacctgagatcgtcatctaccaggagctgaggatggaggcctttgtggtgtaccgctggcagggagatgcccggcagaaggccctgaaggacctgctgaagtgggtgctggagggcaagatccagtacaaggagtacatcatcgagggctttgagaacatgcctgctgccttcatgggcatgctgaagggggacaacctgggcaagaccatcgtgaaggcctag

SEQ ID NO: 18845 - DNA, 3006 bp, synthetic construct
  source 1..3006: mol_type = other DNA; note = Synthetic coding sequence
atgcagagcacagacctgggcaacaaggagagcggcaagatctggcacaggaagcccagccctgccaccagagatggcatcatcgtgaacatcatccacaacaccagtgactaccaccccaaggtgctgcgcttcctgaatgtggcctttgatggcactggagactgcctgattgctggggaccaccagggcaacatctacgtgtttgacctgcacggcaaccgcttcaacctggtgcagaggacagcccaggcctgcacagccctggccttcaacctgcggaggaagtctgagttcctggtggccctggccgactacagcatcaagtgctttgacacagtgaccaaggagctggtgtcctggatgaggggccacgagagcagcgtcttcagcatctctgtgcacgccagcggcaagtatgccatcaccaccagcagtgacacagcccagctgtgggacctggacaccttccagaggaagaggaagctgaacatccggcagagcgtgggcatccagaaggtgttcttcctgcccctgagcaacaccatcctgagctgcttcaaggacaacagcatctttgcctgggagtgtgacaccctcttctgcaagtaccagctgcctgcccctcctgagagcagcagcatcctgtacaaggtgtttgctgtgaccagagatggccgcatcctggccgccggcggcaagagcaaccacctgcacctgtggtgcctggaggcccggcagctgttccgcatcatccagatgcccaccaaggtgcgggccatccgccacctggagttcctgcctgacagctttgatgctggcagcaaccaggtgctgggcgtgctgagccaggacggcatcatgaggttcatcaacatgcagacctgcaagctgctgtttgagatcggcagcctggatgagggcatcagcagcagcgccatcagcccccacggccgctacatcgccagcatcatggagaatggcagcctgaacatctacagcgtgcaggccctgacccaggagatcaacaagcccccaccacccctggtgaaggtgattgaggacctgcccaagaacaagctgagcagcagtgacctgaagatgaaggtgaccagcggccgggtgcagcagcctgccaagagccgggagagcaagatgcagacccgcatcctgaagcaggacctgaccggggactttgagagcaagaagaatgagctgcctgatggcctgaacaagaagaggctgcagatcctgctgaagggctacggggagtaccccaccaagtacaggatgttcatctggaggagcctgctgcagctgcctgagaaccacacagccttcagcaccctgattgacaagggcacccacgtggccttcctgaacctgcagaagaagtaccccatcaagagcaggaagctgctgcgggtgctgcagaggaccctgagcgccctggcccactggagcgtcatcttcagtgacaccccctacctgcccctgctggccttcccctttgtgaagctgttccagaacaaccagctgatctgctttgaggtgattgccaccctcatcatcaactggtgccagcactggtttgagtacttccccaacccccccatcaacatcctgtccatgattgaaaatgtgctggccttccatgacaaggagctgctgcagcacttcatcgaccatgacatcaccagccagctgtatgcctggcccctgctggagaccgtcttcagcgaggtgctgacccgggaggagtggctgaagctgtttgacaacatcttcagcaaccaccccagcttcctgctgatgacagtggtggcctacaacatctgcagcaggacccccctgctgagctgcaacctgaaggatgactttgagttcttcttccaccacaggaacaacctggacatcaacgtggtgatccggcaggtgtaccacctgatggagaccacccccacagacatccacccagacagcatgctgaatgtgtttgtggccctgaccaagggccagtaccctgtgttcaaccagtaccccaagttcatcgtggactaccagacccaggagcgggagcgcatcagaaatgatgagctggactacctgcgggagcggcagacagtggaggacatgcaggccaaggtggaccagcagagggtggaggatgaggcctggtaccagaagcaggagctgctgaggaaggccgaggagacccggcgggagatgctgctgcaggaggaggagaagatgatccagcagaggcagaggctggccgctgtgaagcgggagctgaaggtgaaggagatgcacctgcaggatgctgcccggcggcgcttcctgaagctgcagcaggaccagcaggagatggagctgcggcggctggatgatgaaattggaaggaaggtgtacatgagggaccgggagattgctgccacagcccgggacctggagatgaggcagctggagctggagagccagaagaggctgtatgagaagaacctgacagagaaccaggaggccctggccaaggagatgagagcagatgctgatgcctacagaaggaaggtggacctggaggagcacatgttccacaagctgattgaggccggggagacccagagccagaagacccagaagtggaaggaggccgagggcaaggagttccggctgcggagcgccaagaaggccagcgccctgagtgatgccagcaggaagtggttcctgaagcaggagatcaatgctgctgtggagcacgccgagaacccctgccacaaggaggagccccgcttccagaatgagcaggacagcagctgcctgcccaggaccagccagctgaatgacagcagcgagatggaccccagcacccagatcagcctgaacagaagagctgtggagtgggacaccaccggccagaacctgatcaagaaggtgaggaacctgcggcagaggctgacagcccgggcccggcaccgctgccagaccccccacctgctggccgcctag

SEQ ID NO: 18846 - DNA, 651 bp, synthetic construct
  source 1..651: mol_type = other DNA; note = Synthetic coding sequence
atgtccttcctgtttggcagccgcagcagcaagaccttcaagcccaagaagaacatccctgagggcagccaccagtatgagctgctgaagcacgccgaggccaccctgggcagcggcaacctgaggatggctgtgatgctgcctgaaggagaggacctgaatgagtgggtggccgtgaacacagtggacttcttcaaccagatcaacatgctgtatggcaccatcacagacttctgcacagaggagagctgccctgtgatgtctgctggccccaagtatgagtaccactgggcagatggcaccaacatcaagaagcccatcaagtgcagcgcccccaagtacatcgactacctgatgacctgggtgcaggaccagctggatgatgagaccctcttccccagcaagattggagtgcccttccccaagaacttcatgtctgtggccaagaccatcctgaagaggctcttccgggtgtatgcccacatctaccaccagcactttgatcctgtgatccagctgcaggaggaggcccacctgaacaccagcttcaagcacttcatcttctttgtgcaggagttcaacctgattgaccggcgggagctggcccccctgcaggagctgattgagaagctgaccagcaaggacagatag

SEQ ID NO: 18847 - DNA, 477 bp, synthetic construct
  source 1..477: mol_type = other DNA; note = Synthetic coding sequence
atggccgcccagggcgtgggccctggccctggcagcgctgcccctcctggcctggaggccgcccggcagaagctggccctgcggaggaagaaggtgctgagcacagaggagatggagctgtatgagctggcccaggccgccggcggcggcattgatcctgatgtgttcaagatcctggtggacctgctgaagctgaatgtggcccccctggccgtgttccagatgctgaagtccatgtgtgccggccagaggctggccagcgagccccaggaccctgctgctgtgtccctgcccaccagctctgtgcctgagacccggggccgggacaagggcagcgctgccctgggcggcgtgctggccctggccgagaggagcaaccacgagggcagcagccagaggatgccccggcagcccagcgccacccggctgcccaagggcggcggccctgggaagagccccacccagggcagcacctag

SEQ ID NO: 18848 - DNA, 1425 bp, synthetic construct
  source 1..1425: mol_type = other DNA; note = Synthetic coding sequence
atgaacagcgtgtccccagctgctgcccagtaccgcagcagcagcccagaagatgccaggagaagacctgaggcccggcggccccggggcccccggggccctgaccccaacggcctgggccccagcggggccagcggccctgccctgggcagccctggggccggccccagcgagccagatgaggtggacaagttcaaggccaagttcctgacagcctggaacaacgtgaagtatggctgggtggtgaagagcaggaccagcttcagcaagatcagcagcatccacctgtgtggccgccgctacagatttgaaggagagggggacatccagcgcttccagagggactttgtgtcccggctgtggctgacctacagaagagacttcccccccctgcccggcggctgcctgaccagtgactgtggctggggctgcatgctgcggagcggccagatgatgctggcccagggcctgctgctgcacttcctgccccgggactggacctgggccgagggcatgggcctgggccccccagagctgagcggcagcgccagccccagccgctaccacggccctgcccgctggatgccaccccgctgggcccagggcgcccctgagctggagcaggagcggcggcaccggcagatcgtgtcctggtttgctgaccacccccgggcccccttcggcctgcaccggctggtggagctgggccagagcagcggcaagaaggccggggactggtacggccccagcctggtggcccacatcctgaggaaggctgtggagagctgcagtgatgtgacccggctggtggtgtatgtgtcccaggactgcaccgtgtacaaggcagatgtggcccggctggtggcccggccagaccccacagctgagtggaagtctgtggtgatcctggtgcctgtgcggctgggcggggagaccctgaaccctgtgtatgtgccctgtgtgaaggagctgctgcgctgtgagctgtgcctgggcatcatgggcggcaagcccaggcacagcctgtacttcatcggctaccaggatgacttcctgctgtacctggacccccactactgccagcccaccgtggatgtgtcccaggccgacttccccctggagagcttccactgcaccagccccaggaagatggcctttgccaagatggaccccagctgcaccgtgggcttctacgccggggacaggaaggagtttgagaccctgtgcagcgagctgaccagggtgctgagcagcagcagcgccacagagcgctaccccatgttcaccctggccgagggccacgcccaggaccacagcctggatgacctgtgcagccagctggcccagcccaccctgcggctgcccaggacaggccgcctgctgcgggccaagaggcccagcagtgaagattttgtgttcctgtag

SEQ ID NO: 18849 - DNA, 945 bp, synthetic construct
  source 1..945: mol_type = other DNA; note = Synthetic coding sequence
atggcctttgtgacccggcagttcatgaggtctgtgagcagcagcagcacagccagcgccagcgccaagaagatcatcgtgaagcacgtgacagtgattggaggcggcctgatgggcgccggcatcgcccaggtggccgccgccaccggccacacagtggtgctggtggaccagacagaggacatcctggccaagagcaagaagggcatcgaggagagcctgaggaaggtggccaagaagaagtttgctgagaacctgaaggctggagatgaatttgtggagaagaccctgagcaccatcgccaccagcacagatgctgcctctgtggtgcacagcacagacctggtggtggaggccatcgtggagaacctgaaggtgaagaatgagctgttcaagaggctggacaagtttgctgctgagcacaccatctttgccagcaacaccagcagcctgcagatcaccagcatcgccaatgccaccacccggcaggacagatttgctggcctgcacttcttcaaccctgtgcctgtgatgaagctggtggaggtgatcaagacccccatgaccagccagaagacctttgagagcctggtggacttcagcaaggccctgggcaagcaccctgtgtcctgcaaggacaccccaggcttcatcgtgaaccggctgctggtgccctacctgatggaggccatccggctgtatgaaagaggagatgccagcaaggaggacatcgacacagccatgaagctgggcgccggctaccccatgggcccctttgagctgctggactatgtgggcctggacaccaccaagttcatcgtggatggctggcatgagatggatgctgagaaccccctgcaccagcccagccccagcctgaacaagctggtggccgagaacaagtttgggaagaagacaggagagggcttctacaagtacaagtag

SEQ ID NO: 18850 - DNA, 810 bp, synthetic construct
  source 1..810: mol_type = other DNA; note = Synthetic coding sequence
atgggcaactgctgctggacccagtgcttcggcctgctgaggaaggaggccggccgcctgcagagggtgggcggcggcggcggcagcaagtacttccgcacctgcagcagaggagagcacctgaccattgaatttgagaacctggtggagagtgatgaaggagagagccctggcagcagccaccggcccctgacagaggaggagatcgtggacctgcgggagcggcactatgacagcattgctgagaagcagaaggacctggacaagaagatccagaaggagcaggagcggcagagaattgtgcagcagtaccaccccagcaacaatggagagtaccagagcagcggcccagaagatgactttgagagctgcctgaggaacatgaagagccagtatgaggtgttccgcagcagccggctgagcagtgatgccaccgtgctgacccccaacacagagagcagctgtgacctgatgaccaagaccaagagcaccagcggaaatgatgacagcaccagcctggacctggagtgggaggatgaggagggcatgaacaggatgctgcccatgagggagaggagcaagacagaggaggacatcctgcgggccgccctgaagtacagcaacaagaagacaggcagcaaccccaccagcgccagtgatgacagcaatggcctggagtgggagaatgactttgtgtctgctgagatggatgacaatggaaacagcgagtacagcggctttgtgaaccctgtgctggagctgagtgacagcggcatccgccacagcgacacagaccagcagaccaggtag

SEQ ID NO: 18851 - DNA, 1371 bp, synthetic construct
  source 1..1371: mol_type = other DNA; note = Synthetic coding sequence
atgaagtgtgagcactgcaccaggaaggagtgcagcaagaagaccaagacagatgaccaggagaatgtgtctgcagatgcccccagccctgcccaggagaatggagagaagggggagttccacaagctggctgatgccaagatcttcctgagtgactgcctggcctgtgacagctgcatgacagctgaggagggcgtgcagctgagccagcagaatgccaaggacttcttccgggtgctgaacctgaacaagaagtgtgacaccagcaagcacaaggtgctggtggtgtctgtgtgcccccagagcctgccctactttgctgccaagttcaacctgtctgtgacagatgccagccggcggctgtgtggcttcctgaagagcctgggcgtgcactacgtgtttgacaccaccatcgctgctgacttcagcatcctggagagccagaaggagtttgtgcggcgctaccggcagcacagcgaggaggagaggaccctgcccatgctgaccagcgcctgccccggctgggtgcgctatgcagagcgggtgctgggccggcccatcacagcccacctgtgcacagccaagagcccccagcaggtgatgggcagcctggtgaaggactactttgcccggcagcagaacctgagccctgagaagatcttccacgtgattgtggccccctgctatgacaagaagctggaggccctgcaggagagcctgcccccagccctgcacggcagcagaggagctgactgtgtgctgaccagcggggagatcgcccagatcatggagcagggcgacctgtctgtgagagatgctgctgtggacaccctgtttggagacctgaaggaggacaaggtgaccaggcatgatggagccagcagtgatggccacctggcccacatcttcagacatgctgccaaggagctgttcaatgaagatgtggaggaggtgacctaccgggccctgaggaacaaggacttccaggaggtgaccctggagaagaatggagaggtggtgctgcgctttgctgctgcctacggcttcaggaacatccagaacatgatcctgaagctgaagaagggcaagttccccttccactttgtggaggtgctggcctgtgccggcggctgcctgaatggccggggccaggcccagaccccagatggccacgccgacaaggccctgctgcggcagatggagggcatctatgctgacatccctgtgcggcggcctgagagcagcgcccacgtgcaggagctgtaccaggagtggctggagggcatcaacagccccaaggcccgggaggtgctgcacaccacctaccagagccaggagcggggcacccacagcctggacatcaagtggtag

SEQ ID NO: 18852 - DNA, 612 bp, synthetic construct
  source 1..612: mol_type = other DNA; note = Synthetic coding sequence
atggcccacgtgagcagcgagacccaggatgtgagccccaaggatgagctgacagccagcgaggccagcaccaggagccccctgtgtgagcacaccttccctggggacagcgacctgcgctccatgattgaggagcacgccttccaggtgctgagccagggcagcctgctggagagccccagctacacagtgtgtgtgtctgagccagacaaggatgatgacttcctgagcctgaacttccccaggaagctgtggaagatcgtggagagtgaccagttcaagagcatctcctgggatgaaaatggcacctgcatcgtcatcaatgaggagctgttcaagaaggagatcctggagaccaaggccccctaccgcatcttccagacagatgccatcaagagctttgtgcggcagctgaacctgtatggcttcagcaagatccagcagaacttccagaggtctgccttcctggccaccttcctgtctgaggagaaggagagctctgtgctgagcaagatccgcttcaccaagatgaagctgagccgcagcagcacctatgagaaccgctacctgtgctgcaacctgcacctgaaggatgagagcaactacagctag

SEQ ID NO: 18853 - DNA, 2052 bp, synthetic construct
  source 1..2052: mol_type = other DNA; note = Synthetic coding sequence
atgaacaccagcatcccctaccagcagaacccctacaacccccggggcagcagcaatgtcatccagtgctaccgctgtggggacacctgcaagggggaggtggtgcgggtgcacaacaaccacttccacatccgctgcttcacctgccaggtgtgtggctgcggcctggcccagagcggcttcttcttcaagaaccaggagtacatctgcacccaggactaccagcagctgtatggcacccgctgtgacagctgccgggacttcatcaccggggaggtgatcagcgccctgggccgcacctaccaccccaagtgctttgtgtgcagcctgtgcaggaagcccttccccatcggggacaaggtgaccttcagcggcaaggaatgtgtgtgccagacctgcagccagagcatggccagcagcaagcccatcaagatccggggccccagccactgtgccggctgcaaggaggagatcaagcacggccagagcctgctggccctggacaagcagtggcacgtgtcctgcttcaagtgccagacctgcagcgtcatcctgaccggggagtacatcagcaaggatggagtgccctactgtgagagtgactaccacgcccagtttggcatcaagtgtgagacctgtgaccgctacatcagcggccgggtgctggaggccggcggcaagcactaccaccccacctgtgcccgctgtgtgcgctgccaccagatgttcacagaaggagaggagatgtacctgaccggcagcgaggtgtggcaccccatctgcaagcaggccgcccgggcagagaagaagctgaagcacaggaggaccagcgagaccagcatcagccccccaggcagcagcatcggcagccccaacagagtcatctgtgccaaggtggacaatgagatcctgaactacaaggacctggccgccctgcccaaggtgaagagcatctatgaggtgcagaggccagacctgatctcctatgagccccacagccgctacatgtctgatgagatgctggagcgctgtggctacggggagagcctgggcaccctgagcccctacagccaggacatctatgagaacctggacctgcggcagaggcgggccagcagccctggctacatcgacagccccacctacagccggcagggcatgagccccaccttcagccgcagcccccaccactactacagaagtggccctgagagcggccgcagcagcccctaccacagccagctggatgtgcgcagcagcacccccaccagctaccaggcccccaagcacttccacatcccagctggggacagcaacatctacaggaagccacccatctacaagagacatggagacctgagcacagccaccaagagcaagaccagcgaggacatcagccagaccagcaagtacagccccatctacagcccagacccctactatgccagcgagagcgagtactggacctaccacggcagccccaaggtgccccgggcccggcgcttcagcagcggcggggaggaggatgactttgaccgctccatgcacaagctgcagagcggcatcggccgcctcatcctgaaggaggagatgaaggcccggagcagcagctatgctgacccctggaccccacccaggagcagcaccagcagccgggaggccctgcacacagctggctatgagatgagcctgaatggcagccccaggagccactacctggccgacagcgaccccctcatcagcaagagcgccagcctgcctgcctacagaagaaatggcctgcacaggaccccatctgctgacctcttccactatgacagcatgaatgctgtgaactggggcatgagggagtacaagatctacccctatgagctgctgctggtgaccacccggggcaggaaccggctgcccaaggatgtggacaggacccggctggagcggcacctgagccaggaggagttctaccaggtgtttggcatgaccatcagcgagtttgaccggctggccctgtggaagagaaatgagctgaagaagcaggcccggctcttctag

SEQ ID NO: 18854 - DNA, 2541 bp, synthetic construct
  source 1..2541: mol_type = other DNA; note = Synthetic coding sequence
atgctgttcaccgtgtcctgcagcaagatgagcagcatcgtggacagagatgacagcagcatctttgatggcctggtggaggaggatgacaaggacaaggccaagagggtgtccaggaacaagtctgagaagaagaggcgggaccagttcaacgtgctgatcaaggagctgggctccatgctgcctggaaatgccaggaagatggacaagagcacagtgctgcagaagagcattgacttcctgaggaagcacaaggagatcacagcccagagtgatgccagcgagatccggcaggactggaagcccaccttcctgagcaatgaggagttcacccagctgatgctggaggccctggatggcttcttcctggccatcatgacagatggcagcatcatctacgtgtctgagagcgtgaccagcctgctggagcacctgcccagcgacctggtggaccagagcatcttcaacttcatccctgagggggagcacagcgaggtgtacaagatcctgagcacccacctgctggagagtgacagcctgaccccagagtacctgaagagcaagaaccagctggagttctgctgccacatgctgcggggcaccatcgaccccaaggagcccagcacctatgaatatgtgaagttcatcggcaacttcaagagcctgaacagcgtgagcagcagcgcccacaatggatttgagggcaccatccagaggacccaccggcccagctatgaggacagagtgtgctttgtggccaccgtgcggctggccaccccccagttcatcaaggagatgtgcaccgtggaggagcccaatgaggagttcaccagccgccacagcctggagtggaagttcctgttcctggaccaccgggccccacccatcatcggctacctgccctttgaggtgctgggcaccagcggctatgactactaccacgtggatgacctggagaacctggccaagtgccacgagcacctgatgcagtatggcaagggcaagagctgctactaccgcttcctgaccaagggccagcagtggatctggctgcagacccactactacatcacctaccaccagtggaacagcaggcctgagttcatcgtgtgcacccacacagtggtgtcctatgcagaggtgcgggcagagcggcggcgggagctgggcatcgaggagagcctgcctgagacagctgctgacaagagccaggacagcggcagtgacaaccgcatcaacacagtgtccctgaaggaggccctggagagatttgaccacagccccaccccatctgccagcagccgcagcagcaggaagagcagccacacagctgtgtctgaccccagcagcacccccaccaagatccccacagacaccagcaccccaccccggcagcacctgcctgcccacgagaagatggtgcagaggaggagcagcttcagcagccagagcatcaacagccagagcgtgggcagcagcctgacccagcctgtgatgagccaggccaccaacctgcccatcccccagggcatgagccagttccagttcagcgcccagctgggcgccatgcagcacctgaaggaccagctggagcagaggaccaggatgattgaggccaacatccaccggcagcaggaggagctgaggaagatccaggagcagctgcagatggtgcacggccagggcctgcagatgttcctgcagcagagcaaccctggcctgaactttggatctgtgcagctgagcagcggcaacagcagcaacatccagcagctggcccccatcaacatgcagggccaggtggtgcccaccaaccagatccagagcggcatgaacacaggccacatcggcaccacccagcacatgatccagcagcagaccctgcagagcaccagcacccagagccagcagaatgtgctgagcggccacagccagcagaccagcctgcccagccagacccagagcaccctgacagcccccctgtacaacaccatggtgatcagccagcctgctgctggctccatggtgcagatccccagctccatgccccagaacagcacccagagcgctgctgtgaccaccttcacccaggaccggcagatccgcttcagccagggccagcagctggtgaccaagctggtgacagcccctgtggcctgtggggctgtgatggtgcccagcaccatgctgatgggccaggtggtgacagcctaccccacctttgccacccagcagcagcagagccagaccctgtctgtgacccagcagcagcagcagcagagcagccaggagcagcagctgacctctgtgcagcagcccagccaggcccagctgacccagcccccccagcagttcctgcagaccagccggctgctgcacggcaaccccagcacccagctgatcctgtctgctgccttccccctgcagcagagcaccttcccccagagccaccaccagcagcaccagagccagcagcagcagcagctgagccgccacaggacagacagcctgcctgaccccagcaaggtgcagccccagtag

SEQ ID NO: 18855 - DNA, 1656 bp, synthetic construct
  source 1..1656: mol_type = other DNA; note = Synthetic coding sequence
atgggcaggaaggccatcgtgctggccatcgccaacaccagcctggccttccccctgtgccagcacctggtgaccttctgcctgggggaggatgatggagtgcacacagtggaggatgccagcaggaagctggccgtgatggacagccagggccgggtgtgggcccaggagatgctgctgcgggtgtccccagaccacgtgaccctgctggaccctgccagcaaggaggagctggagagctaccccctgggcgccatcgtgcgctgtgatgctgtgatgcctcctggccgcagccgcagcctgctgctgctggtgtgccaggagcctgagcgggcccagccagatgtgcacttcttccagggcctgcggctgggcgctgagctgatccgggaggacatccagggcgccctgcacaactaccgcagcggccgcggggagaggagagctgctgccctgcgggccacccaggaggagctgcagagggacaggagccctgctgctgagaccccacccctgcagaggcggcccagcgtgcgggccgtcatcagcacagtggagagaggagctggccggggccggccccaggccaagcccatccctgaggccgaggaggcccagaggcctgagcctgtgggcaccagcagcaatgctgacagcgccagcccagacctgggcccccggggccctgacctggccgtgctgcaggccgagcgggaggtggacatcctgaaccacgtgtttgatgatgtggagagctttgtgtcccggctgcagaagtctgctgaggccgcccgggtgctggagcaccgggagcggggccgccgcagcagaagaagagctgctggggagggcctgctgaccctgcgggccaagccacccagcgaggccgagtacacagatgtgctgcagaagatcaagtatgccttcagcctgctggcccggctgcggggcaacattgctgaccccagcagccctgagctgctgcacttcctgtttggccccctgcagatgattgtgaacaccagcggcggccctgagtttgccagctctgtgcggcggccccacctgaccagtgatgctgtggccctgctgcgggacaacgtgaccccccgggagaatgagctgtggaccagcctgggggacagctggacccggcccggcctggagctgagccctgaggagggccccccctacagacctgagttcttcagcggctgggagccccctgtgacagacccccagagccgggcctgggaggaccctgtggagaagcagctgcagcacgagaggagaagacggcaggtgacccaggccacccagcagggccggggctgggaggtgcggggccggggccgcagcgcctggccccggctgacccggctgagctacttcctgcagcagagcgccccccaggtggccgtgaatggccaccgggacctggagcctgagagcgagccccagctggagagcgagacagctgggaagtgggtgctgtgcaactatgacttccaggccaggaacagcagcgagctgtctgtgaagcagagagatgtgctggaggccctgcaggacaaggagaaggtgtctgagctggaggccgtgatggagaagcagaagaagaaggtggagggggaggtggagatggaggtgatctag

SEQ ID NO: 18856 - DNA, 1689 bp, synthetic construct
  source 1..1689: mol_type = other DNA; note = Synthetic coding sequence
atggccgccagcgccaagaggaagcaggaggagaagcacctgaagatgctgcgggacatgacaggcctgccccacaacaggaagtgctttgactgtgaccagaggggccccacctacgtgaacatgacagtgggcagctttgtgtgcaccagctgcagcggcagcctgcggggcctgaaccccccccaccgggtgaagagcatctccatgaccaccttcacccagcaggagattgagttcctgcagaagcacggcaatgaggtgtgcaagcagatctggctgggcctgtttgatgacaggagcagcgccatcccagacttccgggacccccagaaggtgaaggagttcctgcaggagaagtatgagaagaagcgctggtacgtgcccccagagcaggccaaggtggtggcctctgtgcacgccagcatcagcggcagcagcgccagcagcaccagcagcaccccagaggtgaagcccctgaagagcctgctgggggacagcgcccccaccctgcacctgaacaagggcacccccagccagagccctgtggtgggccgcagccagggccagcagcaggagaagaagcagtttgacctgctgagtgacctgggcagtgacatctttgctgccccagccccccagagcacagccacagccaactttgccaactttgcccacttcaacagccatgctgcccagaacagcgccaatgctgactttgccaactttgatgccttcggccagagcagcggcagcagcaactttggaggcttccccacagccagccacagccccttccagccccagaccactggaggcagcgctgcctctgtgaatgccaactttgcccactttgacaacttccccaagagcagcagcgctgactttggcaccttcaacaccagccagagccaccagacagccagcgctgtgtccaaggtgtccaccaacaaggccggcctgcagacagctgacaagtatgctgccctggccaacctggacaacatcttctctgctggccagggcggggaccagggcagcggcttcggcaccaccgggaaggcccctgtgggctctgtggtgtctgtgcccagccagagcagcgccagcagtgacaagtatgctgccctggccgagctggacagcgtcttcagcagcgctgccaccagcagcaatgcctacaccagcaccagcaatgccagcagcaatgtgtttggaacagtgcctgtggtggccagcgcccagacccagcctgccagcagctctgtgcctgccccctttggagccacccccagcaccaacccctttgtggccgccgccggccccagcgtggccagcagcaccaaccccttccagaccaatgcccggggggccacagctgccacctttggaacagcctccatgtccatgcccaccggcttcggcaccccagccccctacagcctgcccaccagcttcagcggcagcttccagcagcctgccttccctgcccaggccgccttcccccagcagacagccttcagccagcagcccaacggggccggctttgctgccttcggccagaccaagcctgtggtgaccccatttggccaggtggccgctgctggggtgagcagcaaccccttcatgaccggggcccccaccggccagttccccaccggcagcagcagcaccaaccccttcctgtag

SEQ ID NO: 18857 - DNA, 2052 bp, synthetic construct
  source 1..2052: mol_type = other DNA; note = Synthetic coding sequence
atggctgctgctgtggccgcccccctggccgccggcggggaggaggccgccgccaccacctctgtgcccggcagccctggcctgcctggaagaagatctgctgagcgggccctggaggaggccgtggccaccggcaccctgaacctgagcaacagaaggctgaagcacttccccagaggagctgcccggagctatgacctgagtgacatcacccaggccgacctgagcaggaaccgcttccctgaggtgcctgaggccgcctgccagctggtgtccctggagggcctgagcctgtaccacaactgcctgcgctgcctgaacccagccctgggcaacctgacagccctgacctacctgaacctgagcaggaaccagctgagcctgctgcccccctacatctgccagctgcccctgcgggtgctgattgtgagcaacaacaagctgggcgccctgcccccagacatcggcaccctgggcagcctgcggcagctggatgtgagcagcaatgagctgcagagcctgcccagcgagctgtgtggcctgagcagcctgcgggacctgaatgtgagaagaaaccagctgagcaccctgcctgaggagctgggggacctgcccctggtgcggctggacttcagctgcaacagagtgagccgcatccctgtgtccttctgccgcctgcggcacctgcaggtgatcctgctggacagcaaccccctgcagagccccccagcccaggtgtgcctgaagggcaagctgcacatcttcaagtacctgagcacagaggccggccagaggggcagcgccctgggggacctggcccccagcaggcctccttccttcagcccctgcccagctgaggacctcttccctggccacagatatgatggcggcctggacagcggcttccacagcgtggacagcggcagcaagcgctggagcggaaatgaaagcacagatgagttcagcgagctgtccttccgcatcagcgagctggcccgggagccccggggcccccgggagaggaaagaagatggcagcgcagatggagaccctgtgcagattgacttcatcgacagccacgtgcctggagaagatgaggagcggggcaccgtggaggagcagaggcctcctgagctgagccctggagctggggaccgggagcgggcccccagcagcagaagagaggagcctgctggggaggagaggagaagaccagacaccctgcagctgtggcaggagcgggagcggcggcagcagcagcagagcggggcctggggcgcccccaggaaggacagcctgctgaagccaggcctgcgggctgtggtgggcggcgctgctgctgtgtccacccaggccatgcacaacggcagccccaagagcagcgccagccaggccggggctgctgctggccagggcgccccagccccagccccagccagccaggagcccctgcccatcgccggccctgccacagccccagccccccggcccctgggcagcatccagaggcccaacagcttcctgttccgcagcagcagccagagcggcagcggccccagcagcccagacagcgtgctgcggccccggcgctacccccaggtgcctgatgagaaggacctgatgacccagctgcggcaggtgctggagagccggctgcagaggcccctgcctgaggacctggccgaggccctggccagcggggtcatcctgtgccagctggccaaccagctgcggcccaggtctgtgcccttcatccacgtgcccagccctgctgtgcccaagctgagcgccctgaaggccaggaagaatgtggagagcttcctggaggcctgcaggaagatgggcgtgcctgaggccgacctgtgcagccccagcgacctgctgcagggcacagcccggggcctgaggacagccctggaggccgtgaagagggtgggcggcaaggccctgccccccctgtggcccccatctggcctgggcggctttgtggtgttctacgtggtgctgatgctgctgctgtatgtgacctacacccggctgctgggcagctag

SEQ ID NO: 18858 - DNA, 303 bp, synthetic construct
  source 1..303: mol_type = other DNA; note = Synthetic coding sequence
atgagcaccagcaccagctgccccatccctgggggccgggaccagctgcctgactgctacagcaccacccctgggggcaccctgtatgccaccaccccaggcggcacccgcatcatctatgacaggaagttcctgctggagtgcaagaacagccccatcgcccggaccccaccctgctgcctgccccagatccctggggtgaccaccccacccacagcccccctgagcaagctggaggagctgaaggagcaggagacagaggaggagatcccagatgatgcccagtttgagatggacatctag

SEQ ID NO: 18859 - DNA, 2382 bp, synthetic construct
  source 1..2382: mol_type = other DNA; note = Synthetic coding sequence
atgcccatggagagcgccagcagtgacaacaagaagcagatccccaatgaggccagcgcccggtctgagcgggacaccagtgacctggagcagaactggagcctgcaggaccactacaggatgtacagccccatcatctaccaggccctgtgtgaacatgtgcagacccagatgagcctgatgaatgacctgaccagcaagaacatccccaacggcatcccagctgtgccctgccacgcccccagccacagcgagagccaggccaccccccacagcagctatggcctgtgcaccagcacccctgtgtggagcctgcagaggcctccctgcccccccaaggtgcacagcgaggtgcagacagatggcaacagccagtttgccagccagggcaagacagtgtctgccacctgcacagatgtgctgaggaacagcttcaacaccagccctggggtgccctgcagcctgcccaagacagacatcagcgccatccccaccctgcagcagctgggcctggtgaatggcatcctgccccagcagggcatccacaaggagacagacctgctgaagtgcatccagacctacctgagcctcttccgcagccacggcaaggagacccacctggacagccagacccacaggagccccacccagagccagcctgccttcctggccaccaatgaggagaagtgtgcccgggagcagatccgggaggccaccagcgagaggaaggacctgaacatccacgtgcgggacaccaagacagtgaaggatgtgcagaaggccaagaatgtgaacaagacagctgagaaggtgcgcatcatcaagtacctgctgggggagctgaaggccctggtggccgagcaggaggacagcgagatccagaggctcatcacagagatggaggcctgcatctctgtgctgcccaccgtgtctggcaacacagacatccaggtggagatcgccctggccatgcagcccctgcggagtgaaaatgcccagctgcggcggcagctgcgcatcctgaaccagcagctgcgggagcagcagaagacccagaagcccagcggggctgtggactgcaacctggagctgttcagcctgcagagcctgaacatgagcctgcagaaccagctggaggagagcctgaagagccaggagctgctgcagagcaagaatgaggagctgctgaaggtgattgagaaccagaaggatgagaacaagaagttcagcagcatcttcaaggacaaggaccagaccatcctggagaacaagcagcagtatgacatcgagatcacccgcatcaagattgagctggaggaggccctggtgaatgtgaagagcagccagttcaagctggagacagctgagaaggagaaccagatcctgggcatcaccctgcggcagagagatgctgaggtgacccggctgcgggagctgaccaggaccctgcagacctccatggccaagctgctgagtgacctgtctgtggacagcgcccgctgcaagccaggcaacaacctgaccaagagcctgctgaacatccatgacaagcagctgcagcacgaccctgccccagcccacaccagcatcatgagctacctgaacaagctggagaccaactacagcttcacccacagcgagcccctgagcaccatcaagaatgaggagaccatcgagccagacaagacctatgaaaatgtgctgagcagccggggcccccagaacagcaacacccggggcatggaggaggccagcgcccctggcatcatcagcgccctgagcaagcaggacagtgatgagggcagcgagaccatggccctgattgaagatgagcacaacctggacaacaccatctacatcccctttgcccggagcaccccagagaagaagagccccctgagcaagaggctgagcccccagccccagatccgggccgccaccacccagctggtgagcaacagcggcctggccgtgtctgggaaggagaacaagctgtgcacccctgtgatctgcagcagcagcaccaaggaggctgaagatgcccctgagaagctgagccgggccagtgacatgaaggacacccagctgctgaagaagatcaaggaggccatcggcaagatcccagctgccaccaaggagcctgaggagcagacagcctgccacggccccagcggctgcctgagcaacagcctgcaggtgaagggcaacacagtgtgtgatggcagcgtcttcaccagtgacctgatgtctgactggagcatcagcagcttcagcaccttcaccagcagagatgagcaggacttcagaaatggcctggccgccctggatgccaacatcgcccggctgcagaagagcctgaggacaggcctgctggagaagtag

SEQ ID NO: 18860 - DNA, 1119 bp, synthetic construct; identical to SEQ ID NO: 18778
  source 1..1119: mol_type = other DNA; note = Synthetic coding sequence

SEQ ID NO: 18861 - DNA, 336 bp, synthetic construct
  source 1..336: mol_type = other DNA; note = Synthetic coding sequence
atgaccaccctgcgggccttcacctgtgatgacctcttccgcttcaacaacatcaacctggaccccctgacagagacctacggcatccccttctacctgcagtacctggcccactggccagagtacttcatcgtggccgaggcccctggaggagagctgatgggctacatcatgggcaaggccgagggctctgtggcccgggaggagtggcacggccacgtgacagccctgtctgtggcccctgagttccggcggctgggcctggccgccaagctgatggagctgctggaggagatcagcgagagatatgaggagagcaccttccagggctactag

SEQ ID NO: 18862 - DNA, 1449 bp, synthetic construct
  source 1..1449: mol_type = other DNA; note = Synthetic coding sequence
atgaatggcaccctggaccacccagaccagcctgacctggatgccatcaagatgtttgtgggccaggtgcccaggacctggagcgagaaggacctgcgggagctgtttgagcagtatggagctgtgtatgagatcaacgtgctgcgggacaggagccagaaccccccccagagcaagggctgctgctttgtgaccttctacaccaggaaggccgccctggaggcccagaatgccctgcacaacatgaaggtgctgcccggcatgcaccaccccatccagatgaagccagctgacagcgagaagaacaatgctgtggaggacaggaagctgttcatcggcatgatcagcaagaagtgcacagaaaatgacatccgggtgatgttcagcagctttggccagatcgaggagtgccgcatcctgcggggcccagatggcctgagccggggctgtgcctttgtgaccttcaccacccgggccatggcccagacagccatcaaggccatgcaccaggcccagaccatggagggctgcagcagccccatggtggtgaagtttgctgacacccagaaggacaaggagcagaagaggatggcccagcagctgcagcagcagatgcagcagatctctgctgcctctgtgtggggcaacctggccggcctgaacaccctgggcccccagtacctggccctgctgcagcagacagccagcagcggcaacctgaacaccctgagcagcctgcaccccatgggcggcctgaatgccatgcagctgcagaacctggccgccctggccgccgccgccagcgctgcccagaacaccccatctggcaccaatgccctgaccaccagcagcagccccctgtctgtgctgaccagcagcggcagcagccccagcagcagcagcagcaacagcgtgaaccccatcgccagcctgggcgccctgcagaccctggccggggccacagctggcctgaatgtgggcagcctggccggcatggccgccctgaatggaggcctgggcagcagcggcctgagcaatggcaccggcagcaccatggaggccctgacccaggcctacagcggcatccagcagtatgctgctgctgccctgcccaccctgtacaaccagaacctgctgacccagcagagcatcggggctgctggcagccagaaggagggccctgagggcgccaacctcttcatctaccacctgccccaggagtttggagaccaggacctgctgcagatgttcatgccctttggaaatgtggtgtctgccaaggtgttcatcgacaagcagaccaacctgagcaagtgcttcggctttgtgtcctatgacaaccctgtgtctgcccaggccgccatccagagcatgaatggcttccagatcggcatgaagaggctgaaggtgcagctgaagaggagcaagaatgacagcaagccctactag

SEQ ID NO: 18863 - DNA, 1347 bp, synthetic construct
  source 1..1347: mol_type = other DNA; note = Synthetic coding sequence
atgagccccctggagtgcagcgagtgcttcggggaccagctgctgcacaggacctacacctggcagctgaccctgcacagccggcccaactacaccaggaagagggacaccaggtctgagagcctggagatccccatctctgtggtgctgccccagaggggcacagctgagcccttcccccggctgcacaacctgtacagcaccccccgctgtgcccagcaggccgccctgccccggctgagcaggaggatggccagccagcacagctaccccctgaaccgcttcagctctgtgcccctggaccccatggagcggcccatgagccaggccgacctggagctggactacaaccccccccgggtgcagctgagtgatgagatgtttgtgttccaggacggccgctgggtgaatgaaaactgccgcctgcagagcccctacttcagccccagcgccagcttccaccacaagctgcaccacaagaggctggccaaggagtgcatgctgcaggaggagaacaagagcctgcgggaggagaacaaggccctgcgggaggagaacaggatgctgagcaaggagaacaagatcctgcaggtgttctgggaggagcacaaggccagcctgggccgggaggagagccgggcccccagccccctgctgcacaaggacagcgccagcctggaggtggtgaagaaggaccacgtggccctgcaggtgccccggggcaaggaggacagcaccctgcagctgctgcgggaggagaacagagccctgcagcagctgctggagcagaagcaggcctactgggcccaggccgaggacacagctgccccagctgaggagagcaagccagcccccagcccccatgaggagccctgcagccctggcctgctgcaggaccagggcagcggcctgagcagcagatttgaggagcccaagggccccccagcccggcaggaggacagcaaggagctgcgggccctgaggaagatggtgagcaacatgagcggccccagcggggaggaggaggccaaggtgggccctggcctgcctgatggctgccagcccctgcagctgctgcgggagatgaggcaggccctgcaggccctgctgaaggagaaccggctgctgcaggaggagaacagaaccctgcaggtgctgcgggcagagcaccggggcttccaggaggagaacaaggccctgtgggagaacaacaagctgaagctgcagcagaagctggtgattgacacagtgacagaggtgacagccaggatggagatgctgattgaggagctgtatgccttcatgcctgcccggagccaggaccccaagaagcccagccgggtgtag

SEQ ID NO: 18864 - DNA, 1002 bp, synthetic construct
  source 1..1002: mol_type = other DNA; note = Synthetic coding sequence
atggctgctgctgctgctggaacagccaccagccagcgcttcttccagagcttcagtgatgccctgattgatgaggacccccaggccgccctggaggagctgaccaaggccctggagcagaagccagatgatgcccagtactactgccagagggcctactgccacatcctgctgggcaactactgtgtggccgtggctgatgccaagaagagcctggagctgaaccccaacaacagcacagccatgctgaggaagggcatctgtgagtaccacgagaagaactatgctgctgccctggagaccttcacagagggccagaagctggacagcgcagatgccaacttctctgtgtggatcaagcgctgccaggaggcccagaatggaagtgaaagtgaggtgtggacccaccagagcaagatcaagtatgactggtaccagacagagagccaggtggtgatcaccctgatgatcaagaatgtgcagaagaatgatgtgaatgtggagttcagcgagaaggagctgagcgccctggtgaagctgcccagcggggaggactacaacctgaagctggagctgctgcaccccatcatccctgagcagagcaccttcaaggtgctgagcaccaagattgagatcaagctgaagaagccagaggccgtgcgctgggagaagctggagggccagggagatgtgcccacccccaagcagtttgtggctgatgtgaagaacctgtaccccagcagcagcccctacaccaggaactgggacaagctggtgggggagatcaaggaggaggagaagaatgagaagctggagggagatgctgccctgaacagactcttccagcagatctacagtgatggcagtgatgaggtgaagagggccatgaacaagagcttcatggagagcggcggcaccgtgctgagcaccaactggagcgatgtgggcaagaggaaggtggagatcaaccccccagatgacatggagtggaagaagtactag

SEQ ID NO: 18865 - DNA, 1029 bp, synthetic construct
  source 1..1029: mol_type = other DNA; note = Synthetic coding sequence
atgagcctgcacggcaagaggaaggagatctacaagtatgaggccccctggacagtgtatgccatgaactggagcgtgcggccagacaagcgcttccggctggccctgggcagctttgtggaggagtacaacaacaaggtgcagctggtgggcctggatgaggagagcagcgagttcatctgcaggaacacctttgaccacccctaccccaccaccaagctgatgtggatcccagacaccaagggcgtgtacccagacctgctggccaccagcggggactacctgcgggtgtggagggtgggggagacagagacccggctggagtgcctgctgaacaacaacaagaacagcgacttctgtgcccccctgaccagctttgactggaatgaggtggacccctacctgctgggcaccagcagcattgacaccacctgcaccatctggggcctggagaccggccaggtgctgggccgggtgaacctggtgtctggccacgtgaagacccagctgattgcccatgacaaggaggtgtatgacatcgccttcagcagagctgggggcggccgggacatgtttgcctctgtgggcgcagatggctctgtgaggatgtttgacctgcggcacctggagcacagcaccatcatctatgaggacccccagcaccaccccctgctgcggctgtgctggaacaagcaggaccccaactacctggccaccatggccatggatggcatggaggtggtgatcctggatgtgcgggtgccctgcacccctgtggcccggctgaacaaccaccgggcctgtgtgaatggcatcgcctgggccccccacagcagctgccacatctgcacagctgctgatgaccaccaggccctgatctgggacatccagcagatgccccgggccatcgaggaccccatcctggcctacacagctgagggggagatcaacaacgtgcagtgggccagcacccagcctgactggatcgccatctgctacaacaactgcctggagatcctgcgggtgtag

SEQ ID NO: 18866 - DNA, 507 bp, synthetic construct
  source 1..507: mol_type = other DNA; note = Synthetic coding sequence
atggccgagggcagccgcatcccccaggcccgggccctgctgcagcagtgcctgcacgcccggctgcagatccggccagcagatggagatgtggccgcccagtgggtggaggtgcagaggggcctggtgatctacgtgtgcttcttcaagggagctgacaaggagctgctgcccaagatggtgaacaccctgctgaatgtgaagctgtctgaaacagaaaatggcaagcacgtgtccatcctggacctgcccggcaacatcctgatcatcccccaggccaccctgggcggccgcctgaagggcaggaacatgcagtaccacagcaacagcggcaaggaggagggctttgagctgtacagccagtttgtgaccctgtgtgagaaggaggtggccgccaacagcaaatgtgccgaggcccgggtggtggtggagcacggcacctacggcaaccggcaggtgctgaagctggacaccaacggccccttcacccacctgattgagttctag

SEQ ID NO: 18867 - DNA, 3069 bp, synthetic construct
  source 1..3069: mol_type = other DNA; note = Synthetic coding sequence
atggagggcgccctgacagcccgggacaaggtgggcgtgcaggactttgtgctgctggatgcctacaccagcgagagcgcctttgtggacaacctgaggaagcgcttcagcgagaacctgatctacacctacatcggcaccctgctggtgtctgtgaacccctaccaggagctgggcatctacacagtgtcccagatggagctgtaccagggcgtgaacttctttgagctgcccccccacgtgtatgccatcgctgacaatgcctacaggatgatgtgtgccgagctgaacaaccacttcatcctgatcagcggggagagcggggccggcaagacagaggccagcaagaagatcctggagtactttgctgtgacctgccccatgacccagagcctgcagatcgcccgggaccggctgctcttcagcaaccctgtgctggaggcctttggaaatgcccggaccctgagaaatgacaacagcagcagatttgggaagtacatggacatccagtttgacttccagggcatccctgtgggcggccacatcatctcctacctgattgagaagagccgggtggtgtaccagaatgaaggagagaggaacttccacatcttctaccagctgctggccggcggggaggaggagcggctgagctacctgggcctggagcgggacccccagctgtacaagtacctgagccagggccactgtgccaaggagagcagcatcagtgacaagaatgactggaagacagtgtccaatgccttctctgtgattgacttcacagaggccgacctggagaacctgtttggcatcatcgcctctgtgctgcacctgggcaacatcggctttgaggaggatgaccagggctgtgccaccatcccagacacccatgagatcaagtggatcgccaagctgctgggcgtgcaccccagcgtgctgctggaggccctgacccacaggaagattgaggccaagacagaggaggtgatctgccccctgaccctggagctgtctgtgtatgccagagatgccatggccaaggctgtgtatggccgcaccttcacctggctggtgaacaagatcaacagcagcctggtgaacaaggacttcaccaggaagacagtgattggcctgctggacatctacggctttgaggtgtttgacaagaatggatttgagcagttctgcatcaactactgcaatgagaagctgcagcagctgctgattgaaagaaccctgaaggccgagcaggccgagtatgagatggagggcatcgagtgggagcccatcaagtacttcaacaacaagatcatctgtgacctggtggaggagcggcacaagggcatcatcagcatcctggatgaggagtgcatccggcccggccctgccacagacctgtccttcctggagaagctggaggagaaggtgggcaagcacgcccactttgagaccaggaagctggccggccccaagggcaggaagagaattggctggatggagttccggctgctgcactacgccggggaggtgacctactgcaccaagggcttcctggagaagaacaatgacctgctgtaccgccacctgaaggaggtgctgtgcaagagcaagaacatcatcctgcgggagtgcttcctgctggccgagctggagaacagaagaagaccacccaccgtgggcacccagttcaagaacagcctgagcagcctgctggagaccctcatcagcaaggagcccagctacatccgctgcatcaagcccaatgacaggaaggagcccagcaagtttgatgacttcctgatccgccaccagatcaagtacctgggcctgatggagcacctgcgggtgcggcgggccggctttgcctacagaagaaaatatgagcacttcctgcagcgctacaagagcctgtgcccagacacctggccccactggcacggccccccagctgagggcgtggagcggctcatcaagtacatcggctacaagccagaggagtacaagctgggcaagaccaagatcttcatccgcttccccaggaccctgtttgccacagaagatgcctttgagttcagcaagcaccagctggtggcccgcatccaggccacctacaagcgctgcctgggcagaagagaatatgtgaagaagaggcaggccgccatcaagctggaggcccactggaggggggccctggccaggaaggccatccagaggaggaagtgggccgtgcgcatcatcaggaagttcatcaagggcttcatcagcaggaacaagcccctgtgcccagacaatgaggagttcatcgtgtttgtgaggaagaactacatcctgaacctgcgctaccacctgcccaagacagtgctggacaagtcctggctgcggcccccaggcatcctggagaatgccagtgacctgctgaggaagatgtgtgtgaggaacctggtgcagaagtactgccggggcatcacagctgagaggaaggccatgatgcagcagaaggtggtgaccagcgagatcttccggggcaggaaggatggctacacagagagcctgaaccagccctttgtgaacagcagaattgatgaaggagacatcaaccccaaggtgctgcagctgatcagccatgagaagatccagtatggagtgcctgtgatcaagtatgacaggaagggcttcaaggcccggcagaggcagctgatcctgacccagaaggccgcctacgtggtggagctggccaagatcaagcagaagattgagtacagcgccctgaagggcgtgtccaccagcaacctgagtgatggcatcctggtgatccacgtgtccccagaggacagcaagcagaagggagatgctgtgctgcagtgtggccacgtgtttgaggccgtgaccaagctggtgatgctggtgaagaaggaaaatattgtgaatgtggtgcagggcagcctgcagttcttcatcagccctgggaaggagggcaccatcgtgtttgacaccggcctggaggagcaggtgtacaagaacaagaatggccagctgactgtggtgtctgtgcggaggaagagctag

SEQ ID NO: 18868 - DNA, 1044 bp, synthetic construct
  source 1..1044: mol_type = other DNA; note = Synthetic coding sequence
atgaacaccctgatggatgtgctgcggcaccggcccggctgggtggaggtgaaggatgaaggagagtgggacttctactggtgtgatgtgtcctggctgagagaaaattttgaccacacctacatggatgaacatgtgcgcatcagccacttcaggaaccactatgagctgaccaggaagaactacatggtgaagaacctgaagcgcttcaggaagcagctggagcgggaggccggcaagctggaggccgccaagtgtgacttcttccccaagacctttgagatgccctgtgagtaccacctgtttgtggaggagttcaggaagaaccctggcatcacctggatcatgaagcctgtggcccggagccagggcaagggcatcttcctgttccggcggctgaaggacatcgtggactggaggaaggacaccaggagcagtgatgaccagaaggatgacatccctgtggagaactacgtggcccagcgctacatcgagaacccctacctgattggaggcaggaagtttgacctgcgggtgtatgtgctggtgatgagctacatccccctgcgggcctggctgtacagagatggctttgcccgcttcagcaacacccgcttcaccctgaacagcattgatgaccagtatgtgcacctgaccaacgtggccgtgcagaagaccagcccagactaccaccccaagaagggctgcaagtggaccctgcagcgcttccggcagtacctggccagcaagcacggccctgaggccgtggagaccctcttccgggacatcgacaacatctttgtgaagagcctgcagagcgtgcagaaggtgatcatcagtgacaagcactgctttgagctgtatggctatgacatcctgattgaccaggacctgaagccctggctgctggaggtgaatgccagccccagcctgacagccagcagccaggaggactatgagctgaagacctgcctgctggaggacaccctgcacgtggtggacatggaggcccggagcctgcgggctgacagcccctgctggtag

SEQ ID NO: 18869 - DNA, 444 bp, synthetic construct
  source 1..444: mol_type = other DNA; note = Synthetic coding sequence
atgagcagcgagcccccacctccaccccagccccccacccaccaggcctctgtgggcctgctggacacccccaggagccgggagaggagccccagccccctgcggggaaatgtggtgcccagccccctgcccaccaggaggaccaggaccttcagcgccaccgtgcgggccagccagggccctgtgtacaagggcgtgtgcaagtgcttctgccgcagcaagggccacggcttcatcaccccagcagatggcggccctgacatcttcctgcacatcagtgatgtggagggggagtatgtgcctgtggagggagatgaggtgacctacaagatgtgcagcatcccccccaagaatgagaagctgcaggccgtggaggtggtgatcacccacctggcccctggcaccaagcatgagacctggagcggccacgtgatcagcagctag

SEQ ID NO: 18870 - DNA, 558 bp, synthetic construct
  source 1..558: mol_type = other DNA; note = Synthetic coding sequence
atggctgatggcggcggcggcggcggcaccggggctgtgggcggcggcggcaccagccaggccagcgctggagctgccactggagccaccggggccagcggcggcggcggccccatcaacccagccagcctgcccccaggggacccccagctgattgccctgattgtggagcagctgaagagccggggcctgtttgacagcttcagaagagactgcctggctgatgtggacaccaagccagcctaccagaacctgcggcagaaggtggacaactttgtgtccacccacctggacaagcaggagtggaaccccaccatgaacaagaaccagctgagaaatggcctgcggcagagcgtggtgcagagcggcatgctggaggccggcgtggaccgcatcatcagccaggtggtggaccccaagctgaaccacatcttccggccccagatcgagcgggccatccacgagttcctggccgcccagaagaaggctgctgtgcctgcccctcctcctgagcctgagggccaggaccccccagcccccagccaggacaccagctag

SEQ ID NO: 18871 - DNA, 6351 bp, synthetic construct
  source 1..6351: mol_type = other DNA; note = Synthetic coding sequence
atggatgaggtggagcaggaccagcacgaggcccggctgaaggagctgtttgacagctttgacaccactggaacaggcagcctgggccaggaggagctgacagacctgtgccacatgctgagcctggaggaggtggcccctgtgctgcagcagaccctgctgcaggacaacctgctgggccgggtgcactttgaccagttcaaggaggccctgatcctgatcctgagcaggaccctgagcaatgaggagcacttccaggagccagactgcagcctggaggcccagcccaagtatgtgcggggcggcaagagatatggaagaagaagcctgcctgagttccaggagagcgtggaggagttccctgaggtgaccgtcatcgagcccctggatgaggaggcccggcccagccacatcccagctggggactgcagcgagcactggaagacccagaggtctgaggagtatgaagctgagggccagctgcgcttctggaacccagatgacctgaatgccagccagagcggcagcagccccccccaggactggattgaggagaagctgcaggaggtgtgtgaggacctgggcatcaccagagatggccacctgaacaggaagaagctggtgtccatctgtgagcagtatggcctgcagaatgtggatggagagatgctggaggaggtgttccacaacctggaccctgatggcaccatgtctgtggaggacttcttctacggcctcttcaagaatggcaagagcctgacccccagcgccagcaccccctaccggcagctgaagaggcacctgtccatgcagagctttgatgagagcggccgccgcaccaccaccagcagcgccatgaccagcaccatcggcttccgggtcttcagctgcctggatgatggcatgggccacgcctctgtggagcgcatcctggacacctggcaggaggagggcatcgagaacagccaggagatcctgaaggccctggacttcagcctggatggcaacatcaacctgacagagctgaccctggccctggagaatgagctgctggtgaccaagaacagcatccaccaggccgccctggccagcttcaaggccgagatccgccacctgctggagcgggtggaccaggtggtgcgggagaaggagaagctgcggagtgacctggacaaggccgagaagctgaagagcctgatggccagcgaggtggatgaccaccacgccgccattgaaagaagaaatgagtacaacctgaggaagctggatgaggagtacaaggagagaattgctgccctgaagaatgagctgaggaaggagcgggagcagatcctgcagcaggccggcaagcagaggctggagctggagcaggagattgagaaggccaagacagaggagaactacatccgggaccggctggccctgagcctgaaggagaacagccggctggagaatgagctgctggagaatgcagaaaatgtgctggccgagaagtttggagacctggaccccagcagcgctgagttcttcctgcaggaggagcggctgacccagatgagaaatgaatatgagcggcagtgccgggtgctgcaggaccaggtggatgagctgcagagcgagctggaggagtaccgggcccagggccgggtgctgcggctgcccctgaagaacagccccagcgaggaggtggaggccaacagcggcggcatcgagcctgagcacggcctgggcagcgaggagtgcaaccccctgaacatgagcattgaggccgagctggtgattgagcagatgaaggagcagcaccaccgggacatctgctgcctgcggctggagctggaggacaaggtgcgccactatgagaagcagctggatgagaccgtggtgtcctgcaagaaggcccaggagaacatgaagcagagacatgaaaatgagacccacaccctggagaagcagatcagtgacctgaagaatgaaattgctgagctgcagggccaggccgctgtgctgaaggaggcccaccacgaggccacctgcagacatgaggaggagaagaagcagctgcaggtgaagctggaggaggagaagacccacctgcaggagaagctgcggctgcagcacgagatggagctgaaggcccggctgacccaggcccaggccagctttgagcgggagcgggagggcctgcagagcagcgcctggacagaggagaaggtgcggggcctgacccaggagctggagcagttccaccaggagcagctgaccagcctggtggagaagcacaccctggagaaggaggagctgaggaaggagctgctggagaagcaccagcgggagctgcaggagggccgggagaagatggagacagagtgcaacagaaggaccagccagatcgaggcccagttccagagcgactgccagaaggtgacagagcgctgtgagagcgccctgcagagcctggagggccgctaccggcaggagctgaaggacctgcaggagcagcagcgggaggagaagagccagtgggagtttgagaaggatgagctgacccaggagtgtgccgaggcccaggagctgctgaaggagaccctgaagcgggagaagaccaccagcctggtgctgacccaggagcgggagatgctggagaagacctacaaggagcacctgaacagcatggtggtggagcggcagcagctgctgcaggacctggaggacctgagaaatgtgtctgagacccagcagagcctgctgagtgaccagatcctggagctgaagagcagccacaagcgggagctgcgggagcgggaggaggtgctgtgccaggccggggccagcgagcagctggccagccagaggctggagcggctggagatggagcatgaccaggagcggcaggagatgatgagcaagctgctggccatggagaacatccacaaggccacctgtgaaacagctgaccgggagagagctgagatgagcacagagatcagccggctgcagagcaagatcaaggagatgcagcaggccaccagccccctgtccatgctgcagagcggctgccaggtgattggagaggaggaggtggagggagatggagccctgagcctgctgcagcagggcgagcagctgctggaggagaatggagatgtgctgctgagcctgcagagggcccacgagcaggccgtgaaggaaaatgtgaagatggccacagagatcagccggctgcagcagaggctgcagaagctggagcccggcctggtgatgagcagctgcctggatgagcccgccacagagttctttggaaacacagctgagcagacagagcagttcctgcagcagaacagaaccaagcaggtggagggcgtgaccaggagacatgtgctgagtgacctggaggatgatgaggtgcgggacctgggcagcacaggcaccagctctgtgcagaggcaggaggtgaagattgaggagagcgaggcctctgtggagggcttcagcgagctggagaacagcgaggagaccaggacagagagctgggagctgaagaaccagatcagccagctgcaggagcagctgatgatgctgtgtgccgactgtgaccgggccagcgagaagaagcaggacctgctgtttgatgtgtctgtgctgaagaagaagctgaagatgctggagcgcatccctgaggccagccccaagtacaagctgctgtatgaagatgtgtccagagaaaatgactgcctgcaggaggagctgaggatgatggagaccaggtatgatgaggccctggagaacaacaaggagctgacagctgaggtgttccggctgcaggatgagctgaagaagatggaggaggtgacagagaccttcctgagcctggagaagagctatgatgaggtgaagattgaaaatgaaggcctgaatgtgctggtgctgcggctgcagggcaagattgagaagctgcaggagagcgtggtgcagagatgtgactgctgcctgtgggaggccagcctggagaacctggagattgaaccagatggcaacatcctgcagctgaaccagaccctggaggagtgtgtgccccgggtgcgctctgtgcaccacgtgattgaggagtgcaagcaggagaaccagtacctggagggcaacacccagctgctggagaaggtgaaggcccacgagatcgcctggctgcacggcaccatccagacccaccaggagcggccccgggtgcagaaccaggtgatcctggaggagaacaccaccctgctgggcttccaggacaagcacttccagcaccaggccaccatcgccgagctggagctggagaagaccaagctgcaggagctgaccaggaagctgaaggagcgggtgaccatcctggtgaagcagaaggatgtgctgagccatggagagaaggaggaggagctgaaggccatgatgcatgacctgcagatcacctgcagcgagatgcagcagaaggtggagctgctgcgctatgaaagtgagaagctgcagcaggagaacagcatcctgagaaatgagatcaccaccctgaatgaagaagattccatcagcaacctgaagctgggcaccctgaatggcagccaggaggagatgtggcagaagacagaaacagtgaagcaggagaatgctgctgtgcagaagatggtggagaacctgaagaagcagatcagcgagctgaagatcaagaaccagcagctggacctggagaacacagagctgagccagaagaacagccagaaccaggagaagctgcaggagctgaaccagaggctgacagagatgctgtgccagaaggagaaggagcccggcaacagcgccctggaggagcgggagcaggagaagttcaacctgaaggaggagctggagcgctgcaaggtgcagagcagcaccctggtgagcagcctggaggccgagctgtctgaggtgaagatccagacccacatcgtgcagcaggagaaccacctgctgaaggatgagctggagaagatgaagcagctgcaccgctgcccagacctgagtgacttccagcagaagatcagctctgtgctgagctacaatgagaagctgctgaaggagaaggaggccctgtctgaggagctgaacagctgtgtggacaagctggccaagagcagcctgctggagcacagaattgccaccatgaagcaggagcagaagtcctgggagcaccagagcgccagcctgaagagccagctggtggccagccaggagaaggtgcagaacctggaggacacagtgcagaatgtgaacctgcagatgagcaggatgaagagtgacctgcgggtgacccagcaggagaaggaggccctgaagcaggaggtgatgagcctgcacaagcagctgcagaatgctgggggcaagtcctgggcccctgagatcgccacccaccccagcggcctgcacaaccagcagaagaggctgtcctgggacaagctggaccacctgatgaatgaggagcagcagctgctgtggcaggagaatgaaaggctgcagaccatggtgcagaacaccaaggccgagctgacccacagccgggagaaggtgcggcagctggagagcaacctgctgcccaagcaccagaagcacctgaaccccagcggcaccatgaaccccacagagcaggagaagctgagcctgaagcgggagtgtgaccagttccagaaggagcagagccctgccaacaggaaggtgtcccagatgaacagcctggagcaggagctggagaccatccacctggagaatgaaggcctgaagaagaagcaggtgaagctggatgagcagctgatggagatgcagcacctgcggagcacagccacccccagccccagcccccacgcctgggacctgcagctgctgcagcagcaggcctgccccatggtgccccgggagcagttcctgcagctgcagaggcagctgctgcaggccgagcgcatcaaccagcacctgcaggaggagctggagaacagaacatctgagaccaacaccccccagggcaaccaggagcagctggtgacagtgatggaggagaggatgattgaggtggagcagaagctgaagctggtgaagaggctgctgcaggagaaggtgaaccagctgaaggagcagctgtgcaagaacaccaaggcagatgccatggtgaaggacctgtatgtggagaatgcccagctgctgaaggccctggaggtgacagagcagaggcagaagacagctgagaagaagaactacctgctggaggagaagatcgccagcctgagcaacatcgtgaggaacctgaccccagcccccctgaccagcaccccacccctgcggagctag

SEQ ID NO: 18872 - DNA, 2664 bp, synthetic construct
  source 1..2664: mol_type = other DNA; note = Synthetic coding sequence
atgcccatcctgctcttcctgattgacaccagcgcctccatgaaccagaggagccacctgggcaccacctacctggacacagccaagggagctgtggagaccttcatgaagctgcgggcccgggaccctgccagcagaggagaccgctacatgctggtgacctttgaggagcccccctatgccatcaaggccggctggaaggagaaccacgccaccttcatgaatgagctgaagaacctgcaggccgagggcctgaccaccctgggccagagcctgaggacagcctttgacctgctgaacctgaaccggctggtgacaggcatcgacaactacggccagggcaggaaccccttcttcctggagcccgccatcatcatcaccatcacagatggcagcaagctgaccaccaccagcggcgtgcaggatgagctgcacctgcccctgaacagccccctgcccggcagcgagctgaccaaggagcccttccgctgggaccagaggctgtttgccctggtgctgcggctgcccggcaccatgtctgtggagagcgagcagctgactggagtgcccctggatgacagcgccatcacccccatgtgtgaggtgactggaggccgcagctacagcgtgtgcagccccaggatgctgaaccagtgcctggagagcctggtgcagaaggtgcagagcggcgtggtgatcaactttgagaaggccggccctgaccccagccctgtggaggatggccagcctgacatcagccggcccttcggcagccagccctggcacagctgccacaagctgatctacgtgcggcccaaccccaagacaggagtgcccatcggccactggcctgtgcctgagagcttctggccagaccagaacagccccaccctgccccccaggaccagccaccctgtggtgaagttcagctgcacagactgtgagcccatggtgattgacaagctgccctttgacaagtatgagctggagcccagccccctgacccagttcatcctggagaggaagagcccccagacctgctggcaggtgtatgtgagcaacagcgccaagtacagcgagctgggccaccccttcggctacctgaaggccagcacagccctgaactgtgtgaacctgtttgtgatgccctacaactaccctgtgctgctgcccctgctggatgacctcttcaaggtgcacaaggccaagcccaccctgaagtggaggcagagctttgagagctacctgaagaccatgccaccctactacctgggccccctgaagaaggctgtgaggatgatgggcgcccccaacctgattgctgacagcatggagtatggcctgagctacagcgtcatctcctacctgaagaagctgagccagcaggccaagattgaaagtgacagagtgattggctctgtgggcaagaaggtggtgcaggagaccggcatcaaggtgcgcagccgcagccacggcctgtccatggcctacaggaaggacttccagcagctgctgcagggcatcagtgaagatgtgccccaccggctgctggacctgaacatgaaggagtacacaggcttccaggtggccctgctgaacaaggacctgaagccccagaccttcagaaatgcctatgacatccccaggaggaacctgctggaccacctgaccaggatgaggagcaacctgctgaagagcacccggcgcttcctgaagggccaggatgaggaccaggtgcacagcgtgcccatcgcccagatgggcaactaccaggagtacctgaagcaggtgcccagccccctgcgggagctggaccctgaccagccccggcggctgcacacctttggaaaccccttcaagctggacaagaagggcatgatgattgatgaagcagatgaatttgtggccggcccccagaacaagcacaagaggcctggagagcccaacatgcagggcatccccaagagaagacgctgcatgagccccctgctgcggggccggcagcagaaccctgtggtgaacaaccacatcggcggcaagggccccccagcccccaccacccaggcccagcctgacctgatcaagcccctgcccctgcacaagatcagcgagaccaccaatgacagcatcatccatgatgtggtggagaaccacgtggccgaccagctgagcagtgacatcaccccaaatgccatggacacagagttcagcgccagcagccctgccagcctgctggagcggcccaccaaccacatggaggccctgggccatgaccacctgggcaccaatgacctgactgtgggcggcttcctggagaaccacgaggagccccgggacaaggagcagtgtgccgaggagaacatcccagccagcagcctgaacaagggcaagaagctgatgcactgccgcagccatgaggaggtgaacacagagctgaaggcccagatcatgaaggagatcaggaagccaggcaggaaatatgagcgcatcttcaccctgctgaagcacgtgcagggcagcctgcagaccaggctcatcttcctgcagaatgtcatcaaggaggccagccgcttcaagaagaggatgctgattgagcagctggagaacttcctggatgagatccaccggcgggccaaccagatcaaccacatcaacagcaactag

SEQ ID NO: 18873 - DNA, 1944 bp, synthetic construct
  source 1..1944: mol_type = other DNA; note = Synthetic coding sequence
atgtctgatgaggtgttcagcaccaccctggcctacaccaagagccccaaggtgaccaagaggaccaccttccaggatgagctgatccgggccatcacagcccggagcgcccggcagaggagcagcgagtacagtgatgactttgacagtgatgaaattgtgtccctgggggacttcagtgacaccagcgcagatgagaacagcgtgaacaagaagatgaatgacttccacatcagtgatgatgaggagaagaaccccagcaagctgctcttcctgaagaccaacaagagcaatggaaacatcaccaaggatgagcctgtgtgtgccatcaagaatgaggaggagatggccccagatggctgtgaggacatcgtggtgaagagcttcagcgagagccagaacaaggatgaggagtttgagaaggacaagatcaagatgaagcccaagccccgcatcctgagcatcaagagcaccagcagcgctgagaacaacagcctggacacagatgaccacttcaagcccagcccccggcccaggtccatgctgaagaagaagagccacatggaggagaaggatggcctggaggacaaggagacagccctgtctgaggagctggagctgcacagcgcccccagcagcctgcccacccccaacggcatccagctggaggccgagaagaaggccttcagcgagaacctggaccctgaggacagctgcctgaccagcctggccagcagcagcctgaagcagatcctgggggacagcttcagccctggcagcgagggcaatgccagcggcaaggaccccaatgaggagatcacagagaaccacaacagcctgaagagtgatgagaacaaggaaaattccttctctgctgaccacgtgaccacagctgtggagaagagcaaggagagccaggtgacagcagatgacctggaggaggagaaggccaaggccgagctgatcatggatgatgacagaacagtggaccccctgctgagcaagagccagagcatcctgatcagcaccagcgccacagccagcagcaagaagaccatcgaggacaggaacatcaagaacaagaagagcaccaacaacagagccagcagcgccagcgcccggctgatgaccagcgagttcctgaagaagagcagcagcaagaggaggacccccagcaccaccaccagcagccactacctgggcaccctgaaggtgctggaccagaagcccagccagaagcagagcattgaaccagacagagctgacaacatccgggctgctgtgtaccaggagtggctggagaagaagaatgtgtacctgcacgagatgcaccgcatcaagagaattgaaagtgagaacctgcgcatccagaatgagcagaagaaggccgccaagcgggaggaggccctggccagctttgaggcctggaaggccatgaaggagaaggaggccaagaagattgctgccaagaagaggctggaggagaagaacaagaagaagacagaggaggagaatgctgccaggaaaggagaggccctgcaggcctttgagaagtggaaggagaagaagatggagtacctgaaggagaagaacaggaaggagcgggagtatgagcgggccaagaagcagaaggaggaggagaccgtggccgagaagaagaaggacaacctgacagctgtggagaagtggaatgagaagaaggaggccttcttcaagcagaaggagaaggagaagatcaatgagaagaggaaggaggagctgaagagagctgagaagaaggacaaggacaagcaggccatcaatgaatatgagaagtggctggagaacaaggagaagcaggagcgcatcgagaggaagcagaagaagaggcacagcttcctggagagcgaggccctgcccccctggagcccccccagcaggacagtgtttgccaaggtgttctag

SEQ ID NO: 18874 - DNA, 1074 bp, synthetic construct
  source 1..1074: mol_type = other DNA; note = Synthetic coding sequence
atgcagaccttcctgaagggcaagagggtgggctactggctgtctgagaagaagatcaagaagctgaacttccaggcctttgctgagctgtgcaggaagaggggcatggaggtggtgcagctgaacctgagccggcccatcgaggagcagggccccctggatgtgatcatccacaagctgacagatgtgatcctggaggccgaccagaatgacagccagagcctggagctggtgcaccgcttccaggagtacattgatgcccaccctgagaccatcgtgctggaccccctgcctgccatccgcaccctgctggacaggagcaagagctatgagctgatcaggaagattgaggcctacatggaggatgaccgcatctgcagcccccccttcatggagctgaccagcctgtgtggagatgacaccatgaggctgctggagaagaatggcctgaccttccccttcatctgcaagaccagggtggcccacggcaccaacagccatgagatggccatcgtgttcaaccaggagggcctgaatgccatccagcccccctgtgtggtgcagaacttcatcaaccacaatgctgtgctgtacaaggtgtttgtggtgggggagagctacacagtggtgcagaggcccagcctgaagaacttctctgctggcaccagtgaccgggagagcatcttcttcaacagccacaacgtgtccaagccagagagcagctctgtgctgacagagctggacaagattgagggcgtgtttgagcggcccagtgatgaagtcatccgggagctgagccgggccctgcggcaggccctgggcgtgtccctgtttggcatcgacatcatcatcaacaaccagacaggccagcacgccgtcatcgacatcaatgccttccctggctatgagggcgtgtctgagttcttcacagacctgctgaaccacatcgccaccgtgctgcagggccagagcacagccatggccgcccccagcggggagttccgggccggggacctgtgctgtgacctgggcaagagcttccaggtgtttggccccccaccaccctgcctgtag

SEQ ID NO: 18875 - DNA, 852 bp, synthetic construct
  source 1..852: mol_type = other DNA; note = Synthetic coding sequence
atgctgcgctgtggccagatgatctttgcccaggccctggtgtgccgccacctgggccgggactggcgctggacccagaggaagaggcagcctgacagctacttctctgtgctgaatgccttcatcgacaggaaggacagctactacagcatccaccagatcgcccagatgggcgtgggggagggcaagagcatcggccagtggtacggccccaacacagtggcccaggtgctgaagaagctggccgtgtttgacacctggagcagcctggccgtgcacatcgccatggacaacacagtggtgatggaggagatccggcggctgtgcaggacctctgtgccctgtgccggggccacagccttccctgctgacagcgacagacactgcaatggcttccctgctggagctgaggtgaccaaccggcccagcccctggaggcccctggtgctgctgatccccctgcggctgggcctgacagacatcaatgaggcctacgtggagaccctgaagcactgcttcatgatgccccagagcctgggcgtcatcggcggcaagcccaacagcgcccactacttcatcggctacgtgggggaggagctgatctacctggacccccacaccacccagcctgctgtggagcccacagatggctgcttcatcccagatgagagcttccactgccagcaccccccctgcaggatgagcattgctgagctggaccccagcattgctgtggtgctgggcgtgggcaagcagggccgcctggtgcgcagcatcccctgggccccccggcccagctcctggtgtgccgctgtgctgggcgctgctgtggtgatgtgtggcaccccctag

SEQ ID NO: 18876 - DNA, 2160 bp, synthetic construct
  source 1..2160: mol_type = other DNA; note = Synthetic coding sequence
atgggcttcagcaacatggaggatgatggccctgaggaggaggagcgggtggccgagccccaggccaacttcaacaccccccaggccctgcgctttgaggagctgctggccaacctgctgaatgagcagcaccagatcgccaaggagctgtttgagcagctgaagatgaagaagcccagcgccaagcagcagaaggaggtggagaaggtgaagccccagtgcaaggaggtgcaccagaccctcatcctggaccctgcccagaggaagaggctgcagcagcagatgcagcagcacgtgcagctgctgacccagatccacctgctggccacctgcaaccccaacctgaaccctgaggccagcagcacccgcatctgcctgaaggagctgggcacctttgcccagagcagcatcgccctgcaccaccagtacaaccccaagttccagaccctcttccagccctgcaacctgatgggcgccatgcagctgattgaggacttcagcacccacgtgtccattgactgcagcccccacaagacagtgaagaagacagccaatgagttcccctgcctgcccaagcaggtggcctggatcctggccaccagcaaggtgttcatgtacccagagctgctgcctgtgtgcagcctgaaggccaagaacccccaggacaagatcctcttcaccaaggccgaggacaacaagtacctgctgacctgcaagacagcccggcagctgactgtgcgcatcaagaacctgaacatgaacagagccccagacaacatcatcaagttctacaagaagaccaagcagctgcctgtgctgggcaagtgctgtgaggagatccagccccaccagtggaagccacccatcgagcgggaggagcaccggctgcccttctggctgaaggccagcctgcccagcatccaggaggagctgcggcacatggctgatggagcccgggaggtgggcaacatgacaggcaccacagagatcaacagcgaccagggcctggagaaggacaacagcgagctgggcagcgagacccgctaccccctgctgctgcccaagggcgtggtgctgaagctgaagcctgtggccgaccgcttccccaagaaggcctggaggcagaagaggagctctgtgctgaagcccctgctgatccagcccagccccagcctgcagcccagcttcaaccctgggaagaccccagcccagagcacccacagcgaggccccacccagcaagatggtgctgcgcatcccccaccccatccagcctgccaccgtgctgcagacagtgcctggggtgccccccctgggcgtgtctggaggagagagctttgagagccctgctgccctgcctgccatgcctcctgaggcccggaccagcttccccctgtctgagagccagaccctgctgagcagcgcccctgtgcccaaggtgatgatgcccagccctgccagctccatgttcaggaagccctacgtgagaagaagacccagcaagagaagaggagcccgggccttccgctgcatcaagccagcccctgtgatccacccagccagcgtcatcttcaccgtgcctgccaccaccgtgaagatcgtgtccctgggcggcggctgcaacatgatccagcctgtgaatgctgctgtggcccagagcccccagaccatccccatcgccaccctgctggtgaaccccaccagcttcccctgccccctgaaccagcccctggtggccagctctgtgagccccctcatcgtgtctggcaacagcgtgaacctgcccatccccagcaccccagaggacaaggcccacatgaatgtggacatcgcctgtgctgtggctgatggagaaaatgccttccagggcctggagcccaagctggagccccaggagctgagccccctgagcgccaccgtcttccccaaggtggagcacagccctggccccccacctgtggacaagcagtgccaggagggcctgtctgaaaattctgcctaccgctggacagtggtgaagacagaggagggccggcaggccctggagcccctgccccagggcatccaggagagcctgaacaacagcagccctggggacctggaggaggtggtgaagatggagccagaagatgccacagaggagatcagcggcttcctgtag

SEQ ID NO: 18877 - DNA, 1134 bp, synthetic construct
  source 1..1134: mol_type = other DNA; note = Synthetic coding sequence
atggaggccgctgctgtgacagtgaccaggtctgccaccaggagaagaagacggcagctgcagggcctggccgcccctgaggccggcacccaggaggagcaggaggaccaggagccccggcccaggagaagaagacctggccgcagcatcaaggatgaggaggaggagaccgtcttccgggaggtggtgtccttctccccagaccccctgcctgtgcgctactatgacaaggacaccaccaagcccatctccttctacctgagcagcctggaggagctgctggcctggaagccccggctggaggatggcttcaacgtggccctggagcccctggcctgccggcagccccccctgagcagccagaggcccaggaccctgctgtgccacgacatgatgggcggctacctggatgaccgcttcatccagggctctgtggtgcagaccccctatgccttctaccactggcagtgcattgatgtgtttgtgtacttcagccaccacacagtgaccatcccccctgtgggctggaccaacacagcccacagacatggagtgtgtgtgctgggcaccttcatcacagagtggaatgaaggaggccgcctgtgtgaggccttcctggccggagatgagaggagctaccaggccgtggccgaccggctggtgcagatcacccagttcttccgctttgatggctggctgatcaacatcgagaacagcctgagcctggccgctgtgggcaacatgccacccttcctgcgctacctgaccacccagctgcaccggcaggtgcctgggggcctggtgctgtggtatgattctgtggtgcagagcggccagctgaagtggcaggatgagctgaaccagcacaacagagtcttctttgacagctgtgatggcttcttcaccaactacaactggagggaggagcacctggagaggatgctgggccaggccggggagaggagagcagatgtgtatgtgggcgtggatgtgtttgcccggggaaatgtggtgggcggccgctttgacacagacaagagcctggagctgatcaggaagcacggcttctctgtggccctgtttgcccctggctgcagcgtcttccctggggtgggcaacctgctgtgctgctag

SEQ ID NO: 18878 - DNA, 927 bp, synthetic construct
  source 1..927: mol_type = other DNA; note = Synthetic coding sequence
atgaggggcaagagaagaccccagaccagggctgcccggcggctggccgcccaggagagcagcgaggccgaggacatgtctgtgccccggggccccatcgcccagtgggcagatggagccatcagccccaacggccaccggccccagctgcgggccgccagcggggaggacagcacagaggaggccctggccgctgctgctgccccctgggagggcggccctgtgcctggggtggacaccagcccctttgccaagagcctgggccacagcagaggagaggccgacctgtttgattctggggacatcttcagcactggaacaggcagccagagcgtggagaggaccaagcccaaggccaagattgctgaaaatcctgccaacccccctgtgggcggcaaggccaagagccccatgtttcctgccctgggggaggccagcagtgatgatgacctcttccagagcgccaagcccaagccagccaagaagaccaaccccttccccctgctggaggatgaagatgacctcttcacagaccagaaggtgaagaagaatgagaccaagagcagcagccagcaggatgtgatcctgaccacccaggacatctttgaagatgacatctttgccacagaggccatcaagcccagccagaagacccgggagaaggagaagaccctggagagcaacctgtttgatgacaacatcgacatctttgctgacctgactgtgaagcccaaggagaagagcaagaagaaggtggaggccaagagcatctttgatgatgacatggatgacatcttcagcacaggcatccaggccaagaccaccaagcccaagagccgcagcgcccaggccgcccctgagcccaggtttgagcacaaggtgagcaacatctttgatgaccccctgaatgcctttggaggccagtag

SEQ ID NO: 18879 - DNA, 933 bp, synthetic construct
  source 1..933: mol_type = other DNA; note = Synthetic coding sequence
atgctgaagaacaagggccacagcagcaagaaggacaacctggccgtgaatgctgtggccctgcaggaccacatcctgcatgacctgcagctgaggaacctgtctgtggccgaccacagcaagacccaggtgcagaagaaggagaacaagagcctgaagagggacaccaaggccatcatcgacaccggcctgaagaagaccacccagtgccccaagctggaggacagcgagaaggagtatgtgctggaccccaagcccccacccctgaccctggcccagaagctgggcctcatcggccccccacctccacccctgagcagtgatgagtgggagaaggtgaagcagaggagcctgctgcagggcgacagcgtgcagccctgccccatctgcaaggaggagtttgagctgcggccccaggtgctgctgagctgcagccacgtgttccacaaggcctgcctgcaggcctttgagaagttcaccaacaagaagacctgccccctgtgcaggaagaaccagtaccagaccagggtcatccatgatggagcccggctcttccgcatcaagtgtgtgacccgcatccaggcctactggaggggctgtgtggtgaggaagtggtacagaaacctgaggaagacagtgcccccaacagatgccaagctgaggaagaagttctttgagaagaagttcacagagatcagccaccgcatcctgtgcagctacaacaccaacatcgaggagctgtttgctgagattgaccagtgcctggccatcaacagatctgtgctgcagcagctggaggagaagtgtggccacgagatcacagaggaggagtgggagaagatccaggtgcagaatgagaccagcgcctgctttgaggacccctgcctgggcgcccacggcagccacttcagcctgagcaacttcctgctgtag

SEQ ID NO: 18880 - DNA, 1119 bp, synthetic construct
  source 1..1119: mol_type = other DNA; note = Synthetic coding sequence
atgagggtgggccctgtgcgcagcgccatgtctggggccagccagccccggggccctgccctgctcttccctgccacccggggcgtgcctgccaagaggctgctggatgctgatgatgctgctgctgtggccgccaagtgcccccggctgtctgagtgcagcagccccccagactacctgagccccccaggcagcccctgcagcccccagcccccacctgctgcccctggggccggcggcggcagcggcagcgcccctggccccagcagaattgctgactacctgctgctgcccctggccgagcgggagcacgtgtcccgggccctgtgcatccacacaggccgggagctgcgctgcaaggtgttccccatcaagcactaccaggacaagatccggccctacatccagctgcccagccacagcaacatcaccggcatcgtggaggtgatcctgggggagaccaaggcctacgtgttctttgagaaggactttggagacatgcacagctatgtgcgcagcaggaagaggctgcgggaggaggaggccgcccggctcttcaagcagatcgtgtctgctgtggcccactgccaccagagcgccatcgtgctgggggacctgaagctgaggaagtttgtgttcagcacagaggagaggacccagctgcggctggagagcctggaggacacccacatcatgaagggagaagatgatgccctgagtgacaagcacggctgcccagcctacgtgtccccagagatcctgaacaccaccggcacctacagcggcaaggctgctgatgtgtggagcctgggcgtgatgctgtacaccctgctggtgggccgctaccccttccatgacagcgaccccagcgccctcttcagcaagatcagaagaggccagttctgcatccctgagcacatcagccccaaggcccgctgcctgatccgcagcctgctgcggcgggagcccagcgagcggctgacagcccctgagatcctgctgcacccctggtttgagagcgtgctggagcccggctacattgattctgaaattggcaccagtgaccagatcgtgcctgagtaccaggaggacagcgacatcagcagcttcttctgctag

SEQ ID NO: 18881 - DNA, 1554 bp, synthetic construct
  source 1..1554: mol_type = other DNA; note = Synthetic coding sequence
atggagacagacctgaacagccaggacaggaaggacctggacaagttcatcaagttctttgccctgaagacagtgcaggtgattgtgcaggcccggctgggggagaagatctgcaccaggagcagcagcagccccaccggcagtgactggttcaacctggccatcaaggacatccctgaggtgacccatgaggccaagaaggccctggccggccagctgcctgctgtgggccgctccatgtgtgtggagatcagcctgaagaccagcgagggggacagcatggagctggagatctggtgcctggagatgaatgagaagtgtgacaaggagatcaaggtgtcctacacagtgtacaaccggctgagcctgctgctgaagagcctgctggccatcaccagggtgaccccagcctaccgcctgagcaggaagcagggccacgagtatgtgatcctgtaccgcatctactttggagaggtgcagctgagcggcctgggggagggcttccagacagtgcgggtgggcaccgtgggcacccctgtgggcaccatcaccctgagctgtgcctaccgcatcaacctggccttcatgagcacccggcagtttgagaggaccccacccatcatgggcatcatcatcgaccactttgtggaccggccctaccccagcagcagccccatgcacccctgcaactacagaacagctggggaggacaccggggtcatctaccccagcgtggaggacagccaggaggtgtgcaccaccagcttcagcaccagcccccccagccagctgagcagcagccggctgagctaccagcctgctgccctgggcgtgggcagcgctgacctggcctaccctgtggtgtttgctgctggcctgaatgccacccacccccaccagctgatggtgcctgggaaggagggcggcgtgcccctggcccccaaccagcctgtgcacggcacccaggccgaccaggagcggctggccacctgcacccccagcgacaggacccactgtgccgccacccccagcagcagcgaggacacagaaacagtgagcaacagcagcgagggccgggccagcccccatgatgtgctggagaccatctttgtgaggaaggtgggcgcctttgtgaacaagcccatcaaccaggtgaccctgaccagcctggacatcccctttgccatgtttgcccccaagaacctggagctggaggacacagaccccatggtgaaccccccagacagccctgagacagagagccccctgcagggcagcctgcacagtgatggcagcagcggcggcagcagcggcaacacccatgatgactttgtgatgattgacttcaagccagccttcagcaaggatgacatcctgcccatggacctgggcaccttctaccgggagttccagaaccccccccagctgagcagcctgagcattgatattggagcccagagcatggccgaggacctggacagcctgcctgagaagctggccgtgcatgagaagaatgtgcgggagtttgatgcctttgtggagaccctgcagtag

SEQ ID NO: 18882 - DNA, 1488 bp, synthetic construct
  source 1..1488: mol_type = other DNA; note = Synthetic coding sequence
atgtggaggggctgtgcccggagcaggaagaggaagaaggtggacaatgactacaatgccctgcgggagcggctgagcaccctgcctgacaagctgagctacaacatcatggtgcccttcggcccctttgccttcatgcctgggaagctggtgcacaccaatgaggtgacagtgctgctgggggacaactggtttgccaagtgcagcgccaagcaggccgtgggcctggtggagcacaggaaggagcacgtgaggaagaccattgatgacctgaagaaggtgatgaagaactttgagagccgggtggagttcacagaggacctgcagaagatgtctgatgctgctggggacatcgtggacatccgggaggagatcaagtgtgactttgagttcaaggccaagcacagaattgcccacaagccccacagcaagcccaagaccagtgacatctttgaagctgacatcgccaatgatgtgaagagcaaggacctgctggccgacaaggagctgtgggcccggctggaggagctggagcggcaggaggagctgctgggggagctggacagcaagccagacacagtgattgccaatggagaggacaccaccagcagcgaggaggagaaggaggacaggaacaccaacgtgaatgccatgcaccaggtgacagacagccacaccccctgccacaaggatgtggccagcagcgagcccttcagcggccaggtgaacagccagctgaactgcagcgtgaatggcagcagcagctaccacagtgatgatgatgatgatgatgatgatgatgatgatgatgacaacattgatgatgatgatggagacaatgaccacgaggccctgggcgtgggggacaacagcatccccaccatctacttcagccacacagtggagcccaagagggtgcgcatcaacacaggcaagaacaccaccctgaagttcagcgagaagaaggaggaggccaagaggaagaggaagaacagcactggaagtggccacagcgcccaggagctgcccaccatccgcaccccagctgacatctaccgggcctttgtggatgtggtgaatggagaatatgtgcccaggaagagcatcctgaagagccgcagccgggagaacagcgtgtgcagcgacaccagcgagagcagcgctgctgagtttgatgaccggcggggcgtgctgcggagcatcagctgtgaggaggccacctgcagcgacaccagcgagagcatcctggaggaggagccccaggagaaccagaagaagctgctgcccctgtctgtgaccccagaggccttcagcggcaccgtcatcgagaaggagtttgtgagccccagcctgaccccacctccagccatcgcccacccagccctgcccaccatccctgagaggaaggaggtgctgctggaggccagcgaggagaccgggaagagggtgtccaagttcaaggccgcccggctgcagcagaaggactag

SEQ ID NO: 18883 - DNA, 1458 bp, synthetic construct
  source 1..1458: mol_type = other DNA; note = Synthetic coding sequence
atgtgccaggtgggggaggactatggagagcccgcccctgaggagcccccaccagccccccggcccagccgggagcagaagtgtgtgaagtgcaaggaggcccagcctgtggtggtgatccgggctggagatgccttctgccgggactgcttcaaggccttctacgtgcacaagttccgggccatgctgggcaagaacagactcatcttccctggagagaaggtgctgctggcctggagcggcggccccagcagcagctccatggtgtggcaggtgctggagggcctgagccaggacagcgccaagaggctgcgctttgtggccggggtcatctttgtggatgagggcgccgcctgtggccagagcctggaggagaggagcaagaccctggccgaggtgaagcccatcctgcaggccaccggcttcccctggcacgtggtggccctggaggaggtgttcagcctgccccccagcgtgctgtggtgcagcgcccaggagctggtgggcagcgagggcgcctacaaggctgctgtggacagcttcctgcagcagcagcacgtgctgggcgctgggggcggccctggccccacccagggcgaggagcagcccccccagccccccctggacccccagaacctggcccggcccccagccccagcccagacagaggccctgagccagctgttctgcagcgtgaggaccctgacagccaaggaggagctgctgcagaccctgcggacccacctgatcctgcacatggcccgggcccacggctacagcaaggtgatgaccggggacagctgcacccggctggccatcaagctgatgaccaacctggccctgggccgcggggccttcctggcctgggacaccggcttcagtgatgaaagacatggagatgtggtggtggtgcggcccatgagggaccacaccctgaaggaggtggccttctacaacagactcttctctgtgcccagcgtcttcaccccagctgtggacaccaaggcccctgagaaggccagcatccaccggctgatggaggccttcatcctgcggctgcagacccagttccccagcacagtgtccacagtgtaccgcaccagcgagaagctggtgaagggccccagagatggccctgctgctggggacagcggcccccgctgcctgctgtgcatgtgtgccctggatgtggatgctgctgacagcgccacagccttcggggcccagaccagcagccggctgagccagatgcagagccccatccccctgacagagaccaggaccccacctggcccctgctgcagccctggggtgggctgggcccagagatgtggccagggcgcctgccggcgggaggacccccaggcctgcatcgaggagcagctgtgctacagctgccgggtgaacatgaaggacctgggcctgggcctggccggggaccccggcctgagtgactag

SEQ ID NO: 18884 - DNA, 1353 bp, synthetic construct
  source 1..1353: mol_type = other DNA; note = Synthetic coding sequence
atgagcctgcggctgagcagcgccagccgccgcagctgcccccggcccaccaccggcagcctgcggctgtatggaggcggcaccagctttggcaccggcaacagctgtggcatctctggaattggcagcggcttcagcagcgcctttggaggcagcagcagcggcggcaacacaggaggcggcaacccctgtgccggcttcaccgtgaatgaaagaggcctgctgtctggaaatgagaaggtgaccatgcagaacctgaatgaccggctggccagctacctggacagcgtgcacgccctggaggaggccaatgctgacctggagcagaagatcaagggctggtatgagaagtttggacctggcagctgccggggcctggaccatgactacagccgctacttccccatcattgatgacctgaagaaccagatcatcgccagcaccaccagcaatgccaatgctgtgctgcagattgacaatgcccggctgacagcagatgacttccggctgaagtatgaaaatgagctggccctgcaccagagcgtggaggctgatgtgaatggcctgcggcgggtgctggatgagatcaccctgtgcaggacagacctggagatccagtatgagaccctgtctgaggagatgacctacctgaagaagaaccacaaggaggagatgcaggtgctgcagtgtgccgccggcggcaatgtgaatgtggagatgaatgctgcccctggggtggacctgactgtgctgctgaacaacatgagagcagaatatgaggccctggccgagcagaacagaagagatgctgaggcctggttcaatgagaagagcgccagcctgcagcagcagatcagtgaagatgtgggcgccaccaccagcgccagaaatgagctgacagagatgaagaggaccctgcagaccctggagattgagctgcagagcctgctggccaccaagcacagcctggagtgcagcctgacagaaacagagagcaactactgtgcccagctggcccagatccaggcccagattggagccctggaggagcagctgcaccaggtgaggacagaaacagagggccagaagctggagtatgagcagctgctggacatcaagctgcacctggagaaggagattgagacctactgcctgctgattggaggagatgatggagcctgcaagagcggcggctacaagagcaaggactatggcagcggaaatgtgggcagccaggtgaaggaccctgccaaggccatcgtggtgaagaaggtgctggaggaggtggaccagaggagcaagatcctgaccacccggctgcacagcctggaggagaagagccagagcaactag

SEQ ID NO: 18885 - DNA, 2679 bp, synthetic construct
  source 1..2679: mol_type = other DNA; note = Synthetic coding sequence
atggaccagcctgaggccccctgcagcagcacaggcccccggctggccgtggcccgggagctgctgctggccgccctggaggagctgagccaggagcagctgaagcgcttccgccacaagctgagagatgtgggcccagatggccgcagcatcccctggggccgcctggagcgggcagatgctgtggacctggccgagcagctggcccagttctacggccctgagcccgccctggaggtggccaggaagaccctgaagagagcagatgccagagatgtggccgcccagctgcaggagcggcggctgcagaggctgggcctgggcagcggcaccctgctgtctgtgtctgagtacaagaagaagtaccgggagcacgtgctgcagctgcacgcccgggtgaaggagagaaatgcccggtctgtgaagatcaccaagcgcttcaccaagctgctgattgcccctgagagcgctgcccctgaggaggccatgggccctgctgaggagcctgagcccggccgggccaggagaagtgacacccacaccttcaacagactcttcagaagagatgaggagggcagaagacccctgactgtggtgctgcagggccctgctggcatcggcaagaccatggccgccaagaagatcctgtatgactgggccgccggcaagctgtaccagggccaggtggactttgccttcttcatgccctgtggggagctgctggagcggcccggcaccaggagcctggccgacctgatcctggaccagtgcccagacagaggagcccctgtgccccagatgctggcccagccccagaggctgctcttcatcctggatggagcagatgagctgcctgccctgggcggccctgaggccgccccctgcacagacccctttgaagctgccagcggggcccgggtgctgggcggcctgctgagcaaggccctgctgcccacagccctgctgctggtgaccaccagggctgctgcccctggccgcctgcagggccgcctgtgcagcccccagtgtgccgaggtgcggggcttcagtgacaaggacaagaagaagtacttctacaagtacttcagagatgagcggcgggcagagcgggcctacagatttgtgaaggaaaatgagaccctgtttgccctgtgctttgtgccctttgtgtgctggatcgtgtgcaccgtgctgcggcagcagctggagctgggccgggacctgagcaggaccagcaagaccaccacctctgtgtacctgctcttcatcacctctgtgctgagcagcgcccctgtggctgatggcccccggctgcagggcgacctgaggaacctgtgccgcctggcccgggagggcgtgctgggccggcgggcccagtttgctgagaaggagctggagcagctggagctgcggggcagcaaggtgcagaccctcttcctgagcaagaaggagctgcccggggtgctggagacagaggtgacctaccagttcatcgaccagagcttccaggagttcctggccgccctgagctacctgctggaggatggaggagtgcccaggacagctgctggaggagtgggcaccctgctgcggggagatgcccagccccacagccacctggtgctgaccacccgcttcctgtttggcctgctgtctgctgagaggatgagggacatcgagcggcacttcggctgcatggtgtctgagcgggtgaagcaggaggccctgcgctgggtgcagggccagggccagggctgccctggggtggcccctgaggtgacagagggcgccaagggcctggaggacacagaggagcctgaggaggaggaggagggggaggagcccaactaccccctggagctgctgtactgcctgtatgagacccaggaggatgcctttgtgcggcaggccctgtgccgcttccctgagctggccctgcagagggtgcgcttctgcaggatggatgtggccgtgctgagctactgtgtgcgctgctgcccagctggccaggccctgcggctcatcagctgccgcctggtggccgcccaggagaagaagaagaagagcctgggcaagaggctgcaggccagcctgggcggcggcagcagcagccagggcaccaccaagcagctgcctgccagcctgctgcaccccctcttccaggccatgacagaccccctgtgccacctgagcagcctgaccctgagccactgcaagctgcctgatgctgtgtgccgggacctgtctgaggccctgcgggccgccccagccctgacagagctgggcctgctgcacaaccggctgtctgaggccggcctgaggatgctgtctgagggcctggcctggccccagtgccgggtgcagacagtgcgggtgcagctgcctgacccccagaggggcctgcagtacctggtgggcatgctgcggcagagccctgccctgaccaccctggacctgagcggctgccagctgcctgcccccatggtgacctacctgtgtgctgtgctgcagcaccagggctgcggcctgcagaccctgagcctggcctctgtggagctgtctgagcagagcctgcaggagctgcaggccgtgaagagggccaagccagacctggtgatcacccacccagccctggatggccacccccagccccccaaggagctgatcagcaccttctag

SEQ ID NO: 18886 - DNA, 1047 bp, synthetic construct
  source 1..1047: mol_type = other DNA; note = Synthetic coding sequence
atgggcaaggactactacaagatcctgggcatccccagcggggccaatgaagatgagatcaagaaggcctacaggaagatggccctgaagtaccacccagacaagaacaaggagcccaatgctgaggagaagttcaaggagattgctgaggcctatgatgtgctgagtgaccccaagaagaggggcctgtatgaccagtatggagaggagggcctgaagacaggaggcggcaccagcggcggcagcagcggcagcttccactacaccttccatggagacccccacgccacctttgccagcttcttcggcggcagcaacccctttgacatcttctttgccagcagccgcagcacccggcccttcagcggctttgatcctgatgacatggatgtggatgaagatgaggacccctttggagccttcggccgcttcggcttcaacggcctgagccggggcccccggcgggcccctgagcccctgtaccccaggaggaaggtgcaggacccccctgtggtgcatgagctgcgggtgtccctggaggagatctaccacggcagcaccaagaggatgaagatcacccggcggcggctgaacccagatggccgcacagtgaggacagaggacaagatcctgcacatcgtcatcaagaggggctggaaggagggcaccaagatcaccttccccaaggagggagatgccaccccagacaacatcccagctgacatcgtgtttgtgctgaaggacaagccccacgcccacttcagaagagatggcaccaacgtgctgtacagcgccctgatcagcctgaaggaggccctgtgtggctgcaccgtgaacatccccaccattgatggccgggtcatccccctgccctgcaatgatgtgatcaagccaggcaccgtgaagaggctgcggggggagggcctgcccttccccaaggtgcccacccagagaggagacctgattgtggagttcaaggtgcgcttcccagaccggctgaccccccagacccggcagatcctgaagcagcacctgccctgcagctag

SEQ ID NO: 18887 - DNA, 1899 bp, synthetic construct
  source 1..1899: mol_type = other DNA; note = Synthetic coding sequence
atggacaccatgatgctgaatgtgaggaacctgtttgagcagctggtgagaagagtggagatcctgtctgagggcaatgaggtgcagttcatccagctggccaaggactttgaggacttcaggaagaagtggcagaggacagaccacgagctgggcaagtacaaggacctgctgatgaaggccgagacagagaggtctgccctggatgtgaagctgaagcacgccaggaaccaggtggatgtggagatcaagaggcggcagagagctgaggccgactgtgagaagctggagcggcagatccagctgatccgggagatgctgatgtgtgacaccagcggcagcatccagctgtctgaggagcagaagagcgccctggccttcctgaacagaggccagcccagcagcagcaatgccggcaacaagaggctgagcaccattgatgaaagtggcagcatcctgagtgacatcagctttgacaagacagatgagagcctggactgggacagcagcctggtgaagaccttcaagctgaagaagcgggagaagagaagaagcaccagccggcagtttgtggatggccccccaggccctgtgaagaagaccaggagcatcggcagcgctgtggaccagggcaatgaaagcatcgtggccaagaccaccgtgacagtgcccaatgatggcggccccatcgaggccgtgtccaccatcgagaccgtgccctactggaccaggagcaggaggaagacaggcaccctgcagccctggaacagcgacagcaccctgaacagccggcagctggagcccaggacagaaacagacagcgtgggcaccccccagagcaatggaggcatgaggctgcatgactttgtgtccaagacagtcatcaagccagagagctgtgtgccctgtgggaagaggatcaagtttgggaagctgagcctgaagtgccgggactgccgggtggtgagccaccctgagtgccgggaccgctgccccctgccctgcatccccaccctcatcggcacccctgtgaagatcggggagggcatgctggccgactttgtgtcccagaccagccccatgatccccagcatcgtggtgcactgtgtgaatgaaattgagcagaggggcctgacagaaacaggcctgtaccgcatcagcggctgtgacagaacagtgaaggagctgaaggagaagttcctgcgggtgaagacagtgcccctgctgagcaaggtggatgacatccacgccatctgcagcctgctgaaggacttcctgaggaacctgaaggagcccctgctgaccttccggctgaacagagccttcatggaggccgctgagatcacagatgaggacaacagcattgctgccatgtaccaggccgtgggggagctgccccaggccaacagagacaccctggccttcctgatgatccacctgcagagggtggcccagagcccccacaccaagatggatgtggccaacctggccaaggtgtttggccccaccatcgtggcccatgctgtgcccaacccagaccctgtgaccatgctgcaggacatcaagaggcagcccaaggtggtggagcggctgctgagcctgcccctggagtactggagccagttcatgatggtggagcaggagaacatcgaccccctgcacgtgattgagaacagcaatgccttcagcaccccccagaccccagacatcaaggtgtccctgctgggccctgtgaccaccccagagcaccagctgctgaagacccccagcagcagcagcctgagccagagggtgcgcagcaccctgaccaagaacacccccaggtttggcagcaagagcaagagcgccaccaacctgggccggcagggcaacttctttgccagccccatgctgaagtag

SEQ ID NO: 18888 - DNA, 12075 bp, synthetic construct
  source 1..12075: mol_type = other DNA; note = Synthetic coding sequence
atgagcagcgagcaggacaagagcgccagcaaggagaagagcaagaagcctgtgcgcttcctgccccagctgtccatggagaagctggccagcaaggagaagttcaaggccccagcccgggccctgccccagctgtccatggtgtccaccaagccccactggcagcaggccgcccccagcttccacctgtctgtgaagcaggatgatgagagccctgagcccttctctgtgaagaatgagcagagccacgccgagtacatggagagatttgggaagaagggcaagctgccccaccaggtggatgacagctatgtgggccccagcaccagcaagagcaagggcaagagcccccacaaggagcgggagaacttccgcagcaccctggtgaatgtcatcatgcagcaggatgctgacctggacagcgctgtgcctgatggcagcaccatccccaagcccacagccagcgccatcgagaaggacatcctgcgctactactactacatccaccacggcatcgacacagaccacgtggcccccatggaggacagctggctggagcacgtgctggacctggtgccccagcacctgaaggtgttcacagacagcatcgtgaccctgagtgatgagatgagggaggactacctgctgtctgtgaggaagagcatcgtggactttgtgctgaaggacccccgggagaagggagatgacaagaagacagatgagctgcctgcccacagagctgagatggagatcctgcccaagccctggaggaagagcttcctggccgccagcagctacatccgggaccacctgaatgccatgaaccccaccatgctggccgtgctggacctgtggcacaccaacttcaagaagctgcggctggtggacatcaaggagttccacaactgccaggatgccctggagctgagcagcttccagaacatcatcatgaggcacatggacagcgccaaggagaccctgctgaagatgtggttccctgaggtgcagaacatctactaccagggcaacaagaagaagcagctgcccaccggggacagcagcgccaagctggagagcttcttcaactgtgccgccgccctgatgaccctgcagctgcaggacctgaccctggtgtccatgcaggacttcacagacctgattgcccagcccccagattctgtgcgggcctttgagcaccctggcttcatcatgaggctcatcctggacaatgacaccatcaagtttgagcctgagctgagtgactacatcgacatcttcctgaatgtgtatgatgtgatgatcaaggctgtgtcctttgtgccccgggtggagaccaagctgtacagcaagtgggagagcaagagcaagcccaccaccctgaagcccatcatcctgaatgagatcgtggatgcccacaaggagaagatcaaggaggtgatcatgaaggagagcgtggcccccacagagcacctgcggctgtatgacaagtatgacttcctgatcaccaggaaggccgagagagatgtggacaacttcctggccgagaaccacagctatgagaagatcattgatgagatctgcaagtaccagaagctgattgaggagatccagtacaccagcatcaagaccatccggctgggcatgtttgagatgcactgtgaggagctgatccgggccctggtgaagagagctgacatcatctgtgggaagctgctggccaagatgttccgggaccaccaggaggtgaacacccggctgtgtgatgaatttgaaagaattgctgagaaggccctgagcaccccacccaacacagctgagctgatggagatgaaggcctacatccagaaggtggaggtgacagacatgattgagctggagcagaggctggtggacagcaagaactgcctggccttcctgattgaatatgtgaacttctccccagctgacatgaggctgaacaacagcgtcttccagtggtacggccgcatgggagagatctttgaggagcacaggaagatcatcaaggagaagattgagcagtaccaggagggcctgaagctgcgctgtgaaagatttgtggaggagctggagagctatgccaagcagagcgaggagttctacagctttggagacctgcaggatgtgcagcgctacctgaagaaggcccagatcctgaatggcaagctggacctggccgctgacaagattgagcagttcaatgctgaggaggaggccttcggctggctgcccagcgtgtacccccagaggaagaagatccaggacggcctgaacccctacctgcggctgtatgaaacagctgtggagttcagcagcaactaccgggcctggacagagggcccctaccacaaggtgaacccagaccaggtggaggccgacatcggcaactactggaggggcctgtacaagctggagaagaccttccatgacagcccctatgccctggccatgaccaagaaggtgcgcagcaaggtggaggacttcaagcagcacatccccctcatccaggtgatctgcaaccctggcctgcggcccaggcactgggaggccatgtctgccatcgtgggctaccccctgcagcccagtgatgacagcacagtgtcctccttcctggacatgaacctggagccctacatcgacagatttgagggcatcagcgaggccgccagcaaggagtacagcctggagaaggccatggagaagatgatcacagagtgggatgctgtggagtttgtgatccacagctaccgggagaccggcaccttcatcctggcctctgtggatgagatccagatgctgctggatgaccacatcatcaagacccagaccatgaggggcagccccttcatcaagccctatgagaagcagatgagggagtgggagggcaagctgctgctgctgcaggagatcctggatgagtggctgaaggtgcaggccacctggctgtacctggagcccatcttcagcagcccagacatcatgagccagatgcctgaggagggccgccgcttcaccgctgtggacaagacctggagggacatcatgaggtctgtgatgcaggacaagcacgtgctgactgtggtgaccatcgacaggatgctggagcggctgaagaagagcaatgagctgctggagctgatcctgaagggcctgaatgagtacctggagaagaagaggctcttcttcccccgcttcttcttcctgagcaatgatgagctgctggagatcctgtctgagaccaaggaccccaccagggtgcagccccacctgaagaagtgctttgagggcatcgccaaggtggagttcacagagaccctggacatcacccacatgaagagcagcgagggggaggtggtggagctgattgagatcatcagcacagccaaggcccggggccaggtggagaagtggctggtggagctggagcgggtgatgatcaacagcatccacaaggtgactggagatgccacctttgcctacaccaagtatgagcgcatcaactgggtgcgggactggccaggccagacagtgctgtgtgtgtcccagatcttctggaccaaggaggtgcagacagccatccccatgggcatcaaggccctggagcagtacctgaagacctgcaaccggcagattgatgacatcgtgaccctggtgcggggcaagctgtccatgcagaacagagtgaccctgggcgccctggtggtgctggatgtgcacgccagagatgtgctgagcagcctggtgaagaagaacatcagtgatgacagcgactttgagtggctgagccagctgcgctactactggcaggagaaccacctggagaccaagatgatcaatgccggcctgcgctatggctatgagtacctgggcaacagcccccggctggtgatcacccccctgacagaccgctgctaccgcaccctgtttggagccctgcacctgcacctgggcggggcccctgagggccctgctggcaccgggaagacagagaccaccaaggacctggccaaggctgtggccaagcagtgtgtggtgttcaactgcagtgatggcctggactacctggccctgggcaagttcttcaagggcctgctgagctgtggggcctgggcctgctttgatgagttcaacagaattgacctggaggtgctgtctgtggtggcccagcagatcctgaccatccagaggggcatcaatgctggagctgacatcctgatgtttgagggcacagagctgaagctggaccccacctgtgctgtgttcatcaccatgaaccctggctacgccggccgctctgagctgcctgacaacctgaaggccctcttcagaacagtggccatgatggtgcctgactatgccatgattgctgagatcgtgctgtacagctgtggctttgtgacagcccggcccctgtctgtgaagatcgtggccacctaccgcctgtgcagcgagcagctgagcagccagcaccactatgactatggcatgagagctgtgaagtctgtgctgacagctgctggcaacctgaagctgaagtacccaaatgaaaatgaggagatcctgctgctgcggagcatcattgatgtgaacctgcccaagttcctgagccatgacctgcccctgtttgagggcatcaccagtgacctcttccctggggtgaagctgcccaagccagactacaatgacctgctggccgccatcaaggacaactgtgcctccatgaacctgcagatgacagccttcttcagcgagaagatcctgcaggtgtatgagatgatgattgtgagacatggcttcatgattgtgggggagccctttggaggcaagaccagcgcctacagagtgctggccggggccctgaatgacatctgtgagaagggcctgatggaggagaacaaggtgcagatcaccgtgctgaaccccaagtctgtgaccatgggccagctgtatggccagtttgattctgtgtcccatgagtggagcgatggagtgctggccgtgtccttccgggcctttgccagctctgtgaccccagacaggaagtggctgatctttgatggccctgtggatgctgtgtggattgagaacatgaacacagtgctggatgacaacaagaagctgtgcctgatgtctggagagatcatccagatgagcccccagatgaacctgatctttgagcccatggacctggaggtggccagccctgccaccgtgagccgctgtggcatgatctacatggagccccacatgctgggctggaggcccctgatgctgtcctgggtgaacctgctgcctgcctctgtgtctgtcatccagaaggagttcatcatgggcctgtttgacaggatggtgcctgtgtctgtggagttcatcaggaagcacaccaaggagctgagccccaccagtgacaccaacctggtgcgcagcctgatgaacctgattgactgcttcatggatgactttgctgatgaggtgaagctgaaggagagaaatgaccgggagacctacagcctgctggagggcatcttcctgttcagcctcatctggagcgtgggcgccagctgcacagatgatgaccggctgaagttcaacaagatcctgcgggagctgatggagagccccatcagtgacaggaccaggaacaccttcaagctgcagagcggcacagagcagaccagcagcaaggccctgactgtgcccttccctgagaagggcaccatctatgactaccagtttgtgacagagggcatcggcaagtgggagccctggatcaagaagctgaaggaggccccacccatccccaaggatgtgatgtttaatgagatcatcgtgcccaccctggacaccatccgctacagcgccctgatggagctgctgaccacccaccagaagcccagcatctttgtgggccccaccggcaccgggaagtctgtgtacatcaccaacttcctgctgaaccagctgaacaaggagatctacaagcccctgctgatcaacttcagcgcccagaccacagctgcccagacccagaacatcgtgatgagcaagctggacaagaggaggaagggcgtgtttggaccacccctgggcaagaggatggtggtgtttgtggatgatgtgaacatgcctgcccgggaggtgtatggagcccagccccccatcgagctgctgcggcagtggctggaccactggaactggtatgacctgaaggactgcagcatgatcaagctggtggacatccagatcatgtgtgccatgggccccccaggcggcggcagaaatcctgtgaccccccgctacatgaggcacttcaacatcatcaccatcaatgagttcagtgacaagtccatgtacaccatcttcagccgcatcctgacctggcacctggagatctgctacaagttcccagatgagttcctggacctgaccacccagatcgtgaatggcaccatgaccctgtacaaggaggccatgaagaacctgctgcccaccccagccaagagccactacctgttcaacctgcgggacttcagcagggtcatccagggcgtgtgcctgagcaggcctgagaccacagagaccacagaggtgatcaagaggctgtgggtgcatgaggtgctgcgggtgtactatgaccggctgctggacaacacagaccgctcctggctgatcaactacatccaggagatcctgaggaactacatgtatgaggacttccacgagctgttccagaggctggactttgacaatgatggcatggtggaggctgatgacctgcggagcctgatgttctgtgacttccatgaccccaagcgggaggacaccaactaccgggagattgctgatgtggacaacctgaggatgattgtggagatccacctggaggagtacaacaacatcagcaagaagcccatgaacctggtgctcttccgctttgccatcgagcacatcagccgcatcagccgcatcctgaagcagcccaggagccacgccctgctggtgggcgtgggcggcagcggccggcagagcgtgacccggctggccgcccacatggctgactacagcgtcttccaggtggagatcagcaagggctatgacaccacagagtggcatgaggacctgaaggtgatcctgaggaaatgtgccgagggggagatgcagggcgtcttcctgttcacagacacccagatcaaggaggagagcttcctggaggatgtgagcaacctgctgaatgctggggagatccccaacctgtttgccctggatgagaagcaggagatctgtgacaagatgaggcagctggaccggcagagggacaagaccaagcagacagatggcagccccatcgccctcttcaacatgttcatcgaccactgccgcagccagctgcacgtggtgctggccatgagccccatcggagatgccttcaggaaccggctgaggaagtttcctgccctggtgaactgctgcaccatcgactggttccagagctggccagaagatgccctgcaggccgtggccagccgcttcctggaggagattgagatgtctgaggagatcagagatggctgcatcgacatgtgcaagagcttccacaccagcaccatcgacctgagcaagagcttctttgtggagctgcagcgctacaactacgtgacccccaccagctacctggagctgatcagcaccttcaagctgctgctggagaagaagaggtctgaggtgatgaagatgaagaagagatatgaggtgggcctggagaagctggacagcgccagcagccaggtggccaccatgcagatggagctggaggccctgcacccccagctgaaggtggccagcaaggaggtggatgagatgatgatcatgattgagaaggagagcgtggaggtggccaagacagagaagatcgtgaaggcagatgagaccatcgccaatgagcaggccatggccagcaaggccatcaaggatgaatgtgatgctgacctggccggggccctgcccatcctggagagcgccctggccgccctggacaccctgacagcccaggacatcaccgtggtgaagtccatgaagagccccccagctggggtgaagctggtgatggaggccatctgcatcctgaagggcatcaaggctgacaagatcccagaccccaccggcagcggcaagaagattgaggacttctggggccctgccaagaggctgctgggggacatgaggttcctgcagagcctgcatgaatatgacaaggacaacatccccccagcctacatgaacatcatcaggaagaactacatccccaacccagactttgtgcctgagaagatcagaaatgccagcacagctgctgagggcctgtgcaagtgggtgattgccatggacagctatgacaaggtggccaagatcgtggcccccaagaagatcaagctggccgctgctgagggggagctgaagatcgccatggatggcctgaggaagaagcaggccgccctgaaggaggtgcaggacaagctggcccggctgcaggacaccctggagctgaacaagcagaagaaggctgacctggagaaccaggtggacctgtgcagcaagaagctggagcgggcagagcagctgattggaggcctgggcggggagaagacccgctggagccacacagccctggagctgggccagctgtacatcaacctgactggagacatcctgatcagcagcggcgtggtggcctacctgggcgccttcaccagcacctaccggcagaaccagaccaaggagtggaccaccctgtgcaagggccgggacatcccctgcagtgatgactgcagcctgatgggcaccctgggggaggccgtgaccatccgcacctggaacattgctggcctgcccagcgacagcttcagcattgacaatggcatcatcatcatgaatgcccggcgctggcccctgatgattgacccccagagccaggccaacaagtggatcaagaacatggagaaggccaacagcctgtatgtgatcaagctgtctgagccagactatgtgaggaccctggagaactgcatccagtttggcacccctgtgctgctggagaatgtgggggaggagctggaccccatcctggagcccctgctgctgaagcagaccttcaagcagggcggcagcacctgcatccggctgggggacagcaccattgaatatgccccagacttccgcttctacatcaccaccaagctgaggaacccccactacctgcctgagacctctgtgaaggtgaccctgctgaacttcatgatcaccccagagggcatgcaggaccagctgctgggcatcgtggtggcccaggagaggccagacctggaggaggagaagcaggccctgatcctgcagggcgctgagaacaagaggcagctgaaggagattgaggacaagatcctggaggtgctgagcagcagcgagggcaacatcctggaggatgaaacagccatcaagatcctgagcagcagcaaggccctggccaatgagatcagccagaagcaggaggtggccgaggagacagagaagaagattgacaccaccaggatgggctaccggcccatcgccatccacagcagcatcctcttcttcagcctggccgacctggccaacatcgagcccatgtaccagtacagcctgacctggttcatcaacctcttcatcctgagcattgaaaattctgagaagtctgagatcctggccaagaggctgcagatcctgaaggaccacttcacctacagcctgtatgtgaatgtgtgccgcagcctgtttgagaaggacaagctgctcttctccttctgcctgaccatcaacctgctgctgcacgagcgggccatcaacaaggccgagtggaggttcctgctgactggaggcatcggcctggacaacccctatgccaacctgtgcacctggctgccccagaagtcctgggatgagatctgccgcctggatgacctgcctgccttcaagaccatccggcgggagttcatgaggctgaaggatggctggaagaaggtgtatgacagcctggagccccaccacgaggtgtttcctgaggagtgggaggacaaggccaatgagttccagaggatgctgatcatccgctgcctgcggccagacaaggtgatccccatgctgcaggagttcatcatcaaccggctgggccgggccttcatcgagcccccaccatttgacctggccaaggcctttggagacagcaactgctgtgcccccctcatctttgtgctgagccctggagctgaccccatggccgccctgctgaagtttgctgatgaccagggctatggaggcagcaagctgagcagcctgagcctgggccagggccagggccccatcgccatgaagatgctggagaaggctgtgaaggagggcacctgggtggtgctgcagaactgccacctggccacctcctggatgcccaccctggagaaggtgtgtgaggagctgagccctgagagcacccacccagacttcaggatgtggctgaccagctaccccagccccaacttccctgtgtctgtgctgcagaatggagtgaagatgaccaatgaggcccccaagggcctgcgggccaacatcatccgcagctacctgatggaccccatcagtgaccctgagttcttcggcagctgcaagaagccagaggagttcaagaagctgctgtatggcctgtgcttcttccacgccctggtgcaggagaggaggaagtttggccccctgggctggaacatcccctatgagttcaatgaaacagacctgcgcatctctgtgcagcagctgcacatgttcctgaaccagtatgaggagctgccctatgaggccctgcgctacatgactggagagtgcaactacggcggccgggtgacagatgactgggacaggaggaccctgcggagcatcctgaacaagttcttcaaccctgagctggtggagaacagcgactacaagtttgacagcagcggcatctactttgtgccccccagcggggaccacaagagctacatcgagtacaccaagaccctgcccctgaccccagcccctgagatcttcggcatgaatgccaatgctgacatcaccaaggaccagagcgagacccagctgctgtttgacaacatcctgctgacccagagccgctctgctggggccggggccaagagcagtgatgaggtggtgaatgaggtggccagtgacatcctgggcaagctgcccaacaactttgacatcgaggccgccatgaggcgctaccccaccacctacacccagagcatgaacacagtgctggtgcaggagatgggccgcttcaacaagctgctgaagaccatccgggacagctgtgtgaacatccagaaggccatcaagggcctggccgtgatgagcacagacctggaggaggtggtgagcagcatcctgaatgtgaagatccctgagatgtggatgggcaagagctaccccagcctgaagcccctgggcagctatgtgaatgacttcctggcccggctgaagttcctgcagcagtggtatgaggtgggccccccacctgtgttctggctgagcggcttcttcttcacccaggccttcctgaccggggcccagcagaactatgccaggaagtacaccatccccatcgacctgctgggctttgattatgaggtgatggaggacaaggagtacaagcaccccccagaagatggagtcttcatccacggcctcttcctggatggagcctcctggaacaggaagatcaagaagctggccgagagccaccccaagatcctgtatgacacagtgcctgtgatgtggctgaagccctgcaagagagctgacatccccaagaggcccagctatgtggcccccctgtacaagaccagcgagaggagaggagtgctgagcaccaccggccacagcaccaacttcgtcatcgccatgaccctgcccagcgaccagcccaaggagcactggattggccggggcgtggccctgctgtgccagctgaacagctag

SEQ ID NO: 18889 - DNA, 1506 bp, synthetic construct
  source 1..1506: mol_type = other DNA; note = Synthetic coding sequence
atgagcagccggcaggacaagagcgccagcaaggagaagagcaagaagcctgtgcgcttcctgccccagctgtccatggagaagctggccagcaaggagaagttcaaggccccagcccgggccctgccccagctgtccatggtgtccaccaagccccactggcagcaggccgcccccagcttccacctgtctgtgaagcaggatgatgagagccctgagcccttctctgtgaagaatgagcagagccacgccgagtacatggagagatttgggaagaagggcaagctgccccaccaggtggatgacagctatgtgggccccagcaccagcaagagcaagggcaagagcccccacaaggagcgggagaacttccgcagcaccctggtgaatgtcatcatgcagcaggatgctgacctggacagcgctgtgcctgatggcagcaccatccccaagcccacagccagcgccatcgagaaggacatcctgcgctactactactacatccaccacggcatcgacacagaccacgtggcccccatggaggacagctggctggagcacgtgctggacctggtgccccagcacctgaaggtgttcacagacagcatcgtgaccctgagtgatgagatgagggaggactacctgctgtctgtgaggaagagcatcgtggactttgtgctgaaggacccccgggagaagggagatgacaagaagacagatgagctgcctgcccacagagctgagatggagatcctgcccaagccctggaggaagagcttcctggccgccagcagctacatccgggaccacctgaatgccatgaaccccaccatgctggccgtgctggacctgtggcacaccaacttcaagaagctgcggctggtggacatcaaggagttccacaactgccaggatgccctggagctgagcagcttccagaacatcatcatgaggcacatggacagcgccaaggagaccctgctgaagatgtggttccctgaggtgcagaacatctactaccagggcaacaagaagaagcagctgcccaccggggacagcagcgccaagctggagagcttcttcaactgtgccgccgccctgatgaccctgcagctgcaggacctgaccctggtgtccatgcaggacttcacagacctgattgcccagcccccagattctgtgcgggcctttgagcaccctggcttcatcatgaggctcatcctggacaatgacaccatcaagtttgagcctgagctgagtgactacatcgacatcttcctgaatgtgtatgatgtgatgatcaaggctgtgtcctttgtgccccgggtggagaccaagctgtacagcaagtggaggaacaaggccaagccaggccacttctacttcagccacatccagaggtctgtgaccttccagcacagcgaggtgagcagcccccagaacagccacttcaagatcgtgagccccttctctgtgctgggcttcacctggcgctgccagctgtag

SEQ ID NO: 18890 - DNA, 840 bp, synthetic construct
  source 1..840: mol_type = other DNA; note = Synthetic coding sequence
atggccgcccctgtgcggaggaccctgctgggcgtggccggcggctggaggagatttgagcggctgtgggccggcagcctgagcagccgcagcctggccctggccgccgcccccagcagcaatggcagcccctggaggctgctgggcgccctgtgcctgcagaggcctcctgtggtgtccaagcccctgacccccctgcaggaggagatggccagcctgctgcagcagattgaaattgaaagaagcctgtacagcgaccacgagctgcgggccctggatgagaaccagaggctggccaagaagaaggctgacctgcatgatgaagaagatgagcaggacatcctgctggcccaggacctggaggacatgtgggagcagaagttcctgcagttcaagctgggcgcccgcatcacagaagcagatgagaagaatgacaggaccagcctgaacaggaagctggacaggaacctggtgctgctggtgcgggagaagtttggagaccaggatgtgtggatcctgccccaggccgagtggcagcccggggagaccctgcggggcacagctgagaggaccctggccaccctgtctgagaacaacatggaggccaagttcctgggcaatgccccctgtggccactacaccttcaagttcccccaggccatgaggacagagagcaacctgggcgccaaggtgttcttcttcaaggccctgctgctgaccggggacttcagccaggccggcaacaagggccaccacgtgtgggtgaccaaggatgagctgggggactacctgaagcccaagtacctggcccaggtgagaagatttgtgtctgacctgtag

SEQ ID NO: 18891 - DNA, 609 bp, synthetic construct
  source 1..609: mol_type = other DNA; note = Synthetic coding sequence
atggaggccgaggccggcggcctggaggagctgacagatgaggagatggccgccctgggcaaggaggagctggtgcggcggctgcggcgggaggaggccgcccggctggccgccctggtgcagaggggccgcctgatgcaggaggtgaaccggcagctgcagggccacctgggggagatccgggagctgaagcagctgaacagaaggctgcaggctgaaaatcgggagctgcgggacctgtgctgcttcctggacagcgagcggcagaggggccggcgggccgcccggcagtggcagctgtttggcacccaggccagcagagctgtgcgggaggacctgggcggctgctggcagaagctggccgagctggagggccggcaggaggagctgctgcgggagaacctggccctgaaggagctgtgcctggccctgggggaggagtggggcccccggggcggccccagcggggccggcggcagcggggccggccctgcccctgagctggccctgcccccctgtggcccccgggacctgggagatggcagcagcagcactggatctgtgggcagcccagaccagctgcccctggcctgcagcccagatgactag

SEQ ID NO: 18892 - DNA, 1353 bp, synthetic construct
  source 1..1353: mol_type = other DNA; note = Synthetic coding sequence
atgagggagtgcatcagcatccacgtgggccaggccggcgtgcagattggaaatgcctgctgggagctgtactgcctggagcacggcatccagccagatggccagatgcccagcgacaagaccatcggcggcggagatgacagcttcaacaccttcttcagcgagaccggggccggcaagcacgtgcccagggctgtgtttgtggacctggagcccaccgtggtggatgaggtgaggacaggcacctaccggcagctgttccaccctgagcagctgatcaccgggaaggaggatgctgccagcaactatgcccggggccactacaccatcggcaaggagatcgtggacctggtgctggaccgcatcaggaagctggccgacctgtgcaccggcctgcagggcttcctgatcttccacagctttggaggcggcactggaagtggctttgccagcctgctgatggagcggctgtctgtggactacagcaagaagagcaagctggagtttgccatctacccagccccccaggtgtccacagctgtggtggagccctacaacagcatcctgaccacccacaccaccctggagcacagcgactgtgccttcatggtggacaatgaggccatctatgacatctgcagaagaaacctggacatcgagcggcccacctacaccaacctgaaccggctgattggccagatcgtgagcagcatcacagccagcctgcgctttgatggagccctgaatgtggacctgacagagttccagaccaacctggtgccctacccccgcatccacttccccctggccacctacgcccctgtgatctctgctgagaaggcctaccacgagcagctgtctgtggccgagatcaccaatgcctgctttgagcccgccaaccagatggtgaagtgtgaccccaggcatggcaagtacatggcctgctgcatgctgtacagaggagatgtggtgcccaaggatgtgaatgctgccatcgccaccatcaagaccaagaggaccatccagtttgtggactggtgccccaccggcttcaaggtgggcatcaactaccagcccccaacagtggtgcctggaggagacctggccaaggtgcagagagctgtgtgcatgctgagcaacaccacagccatcgccgaggcctgggcccggctggtgcacaagtttgacctgatgtatgccaagtgggcctttgtgcactggtacgtgggggagggcatggaggagggggagttcagcgaggcccgggaggacctggccgccctggagaaggactgtgaggaggtgggcgtggacagcgtggaggccgaggccgaggagggggaggcctactag

SEQ ID NO: 18893 - DNA, 3078 bp, synthetic construct
  source 1..3078: mol_type = other DNA; note = Synthetic coding sequence
atggtggccatggccgaggccgaggccggcgtggccgtggaggtgcggggcctgcccccagctgtgcctgatgagctgctgaccctgtactttgagaacagaagaagaagtggcggcggccctgtgctgtcctggcagaggctgggctgcggcggcgtgctgaccttccgggagccagcagatgctgagcgggtgctggcccaggccgaccacgagctgcacggggcccagctgagcctgcggcctgccccaccccgggccccagcccggctgctgctgcagggcctgcccccaggcaccaccccccagaggctggagcagcacgtgcaggccctgctgcgggccagcggcctgcctgtgcagccctgctgtgccctggccagccccaggccagaccgggccctggtgcagctgcccaagcccctgtctgaggctgatgtgcgggtgctggaggagcaggcccagaacctgggcctggagggcaccctggtgtccctggcccgggtgccccaggcccgggctgtgcgggtggtgggagatggagcctctgtggacctgctgctgctggagctgtacctggagaatgaaagaagaagtggcggcggccccctggaggacctgcagaggctgcccggccccctgggcaccgtggccagcttccagcagtggcaggtggccgagcgggtgctgcagcaggagcaccggctgcagggcagcgagctgagcctggtgccccactatgacatcctggagcctgaggagctggccgagaacaccagcggcggggaccaccccagcacccagggcccccgggccaccaagcacgccctgctgaggactggaggcctggtgacagccctgcagggcgccggcaccgtgaccatgggcagcggggaggagcccggccagagcggggccagcctgaggacaggccccatggtgcagggccggggcatcatgaccaccggcagcggccaggagcccggccagagcggcaccagcctgaggacaggccccatgggcagcctgggccaggccgagcaggtgtcctccatgcccatgggcagcctggagcacgagggcctggtgtccctgcggcctgtgggcctgcaggagcaggagggccccatgagcctgggccctgtgggcagcgctggccctgtggagaccagcaagggcctgctgggccaggagggcctggtggagatcgccatggacagccctgagcaggagggcctggtgggccccatggagatcaccatgggcagcctggagaaggccggccctgtgtccccaggctgtgtgaagctggccggccaggagggcctggtggagatggtgctgctgatggagcccggggccatgaggttcctgcagctgtaccacgaggacctgctggccggcctgggagatgtggccctgctgcccctggagggccctgacatgacaggcttccggctgtgtggggcccaggccagctgccaggccgctgaggagttcctgcggagcctgctgggcagcatcagctgccacgtgctgtgcctggagcaccctggcagcgcccgcttcctgctgggccctgagggccagcacctgctgcagggcctggaggcccagttccagtgtgtgtttggaacagagcggctggccacagccaccctggacaccggcctggaggaggtggaccccacagaggccctgcctgtgctgcctggaaatgcccacaccctgtggaccccagacagcactggaggagaccaggaggatgtgtccctggaggaggtgcgggagctgctggccaccctggagggcctggacctggatggagaggactggctgccccgggagctggaggaggagggcccccaggagcagcctgaggaggaggtgaccccaggccacgaggaggaggagcctgtggcccccagcacagtggccccccgctggctggaggaggaggccgccctgcagctggccctgcacaggagcctggagccccagggccaggtggccgagcaggaggaggccgccgccctgcggcaggccctgaccctgagcctgctggagcagccccccctggaggccgaggagcccccagatggcggcacagatggcaaggcccagctggtggtgcacagcgcctttgagcaggatgtggaggagctggaccgggccctgcgggccgccctggaggtgcacgtgcaggaggagaccgtgggcccctggaggaggaccctgcctgctgagctgcgggcccggctggagcgctgccacggcgtgtctgtggccctgcggggggactgcaccatcctgcggggctttggagcccacccagcccgggccgcccggcacctggtggccctgctggccggcccctgggaccagagcctggccttccccctggccgccagcggccccaccctggccggccagaccctgaagggcccctggaacaacctggagcggctggctgaaaatactggagagttccaggaggtggtgcgggccttctatgacaccctggatgctgcccggagcagcatccgggtggtgcgggtggagcgggtgagccaccccctgctgcagcagcagtatgagctgtaccgggagcggctgctgcagagatgtgagcggcggcctgtggagcaggtgctgtaccacggcaccacagccccagctgtgcctgacatctgtgcccacggcttcaacagaagcttctgtggcagaaatgccaccgtgtatggcaagggcgtgtactttgcccggcgggccagcctgtctgtgcaggaccgctacagccccccaaatgctgatggccacaaggctgtgtttgtggcccgggtgctgaccggggactatggccagggcagaagaggcctgcgggccccacccctgcggggccctggccacgtgctgctgcgctatgattctgctgtggactgcatctgccagcccagcatcttcgtcatcttccatgacacccaggccctgcccacccacctgatcacctgtgagcacgtgccccgggccagcccagatgaccccagcggcctgcccggccgcagcccagacacctag

SEQ ID NO: 18894 - DNA, 390 bp, synthetic construct
  source 1..390: mol_type = other DNA; note = Synthetic coding sequence
atgagccacctgcagagcctgctgctggacaccctgctgggcaccaagcacgtggacagcgctgccctgatcaagatccaggagaggagcctgtgtgtggccagccctggcttcaacgtgacccccagtgatgtgaggaccctggtgaatggatttgccaagaaccccctgcaggcccggcgggagggcctgtacttcaagggcaaggactaccgctgtgtgcgggcagatgagtacagcctgtatgccaagaatgaaaatactggagtggtggtggtgaagacccacctgtacctgctggtggccacctacacagagggcatgtaccccagcatctgtgtggaggccacagagagcctgggggactacctgaggaagaagggcagctag

SEQ ID NO: 18895 - DNA, 945 bp, synthetic construct
  source 1..945: mol_type = other DNA; note = Synthetic coding sequence
atgctgggcaagggcggcaagaggaagtttgatgaacatgaagatggcctggagggcaagatcgtgagcccctgtgatggccccagcaaggtgtcctacaccctgcagaggcagaccatcttcaacatcagcctgatgaagctgtacaaccaccggcccctgacagagcccagcctgcagaagacagtgctgatcaacaacatgctgcggcgcatccaggaggagctgaagcaggagggcagcctgcggcccatgttcacccccagcagccagcccaccacagagcccagcgacagctaccgggaggcccccccagccttcagccacctggccagccccagcagccacccctgtgacctgggcagcaccacccccctggaggcctgcctgaccccagccagcctgctggaggatgatgatgacaccttctgcaccagccaggccatgcagcccacagcccccaccaagctgagccccccagccctgctgcctgagaaggacagcttcagcagcgccctggatgaaattgaggagctgtgccccaccagcaccagcacagaggccgccacagctgccacagattctgtgaagggcaccagcagcgaggccggcacccagaagctggatggcccccaggagagcagagcagatgacagcaagctgatggacagcctgcccggcaactttgagatcaccaccagcacaggcttcctgacagacctgaccctggatgacatcctgtttgctgacatcgacacctccatgtatgactttgacccctgcaccagcagcagcggcacagccagcaagatggcccctgtgtctgcagatgacctgctgaagaccctggccccctacagcagccagcctgtgacccccagccagcccttcaagatggacctgacagagctggaccacatcatggaggtgctggtgggcagctag

SEQ ID NO: 18896 - DNA, 246 bp, synthetic construct
  source 1..246: mol_type = other DNA; note = Synthetic coding sequence
atgaagggcagccgcatcgagctgggagatgtgaccccccacaacatcaagcagctgaagaggctgaaccaggtgatcttccctgtgtcctacaatgacaagttctacaagaagtttggatttgagatcatcgagaccaagaagaactactacaagagaattgaaccagcagatgcccacgtgctgcagaagaacctgaaggtgcccagcggccagaatgctgatgtgcagaagacagacaactag

SEQ ID NO: 18897 - DNA, 1437 bp, synthetic construct
  source 1..1437: mol_type = other DNA; note = Synthetic coding sequence
atggccagcgccacagaggaccctgtgctggagcgctacttcaagggccacaaggccgccatcaccagcctggacctgagccccaacgggaagcagctggccacagcctcctgggacaccttcctgatgctgtggaacttcaagccccacgcccgggcctaccgctacgtgggccacaaggatgtggtgacctctgtgcagttcagcccccacggcaacctgctggccagcgccagccgggacagaacagtgcggctgtggatcccagacaagaggggcaagttcagcgagttcaaggcccacacagcccctgtgcgctctgtggacttcagcgcagatggccagttcctggccacagccagcgaggacaagagcatcaaggtgtggagcatgtaccggcagcgcttcctgtacagcctgtaccgccacacccactgggtgcgctgtgccaagttctccccagatggccgcctgattgtgtcctgcagcgaggacaagaccatcaagatctgggacaccaccaacaagcagtgtgtgaacaacttcagtgacagcgtgggctttgccaactttgtggacttcaaccccagcggcacctgcatcgccagcgctggcagtgaccagacagtgaaggtgtgggatgtgcgggtgaacaagctgctgcagcactaccaggtgcacagcggcggcgtgaactgcatctccttccaccccagcggcaactacctgatcacagccagcagtgatggcaccctgaagatcctggacctgctggagggccgcctcatctacaccctgcagggccacacaggccctgtgttcaccgtgtccttcagcaagggcggggagctgtttgccagcggcggcgctgacacccaggtgctgctgtggaggaccaactttgatgagctgcactgcaagggcctgaccaagaggaacctgaagaggctgcactttgacagccccccccacctgctggacatctaccccaggaccccccacccccatgaggagaaggtggagaccgtggagatcaaccccaagctggaggtgattgacctgcagatcagcaccccacctgtgatggacatcctgagctttgacagcaccaccaccacagagaccagcggccgcaccctgcctgacaagggggaggaggcctgtggctacttcctgaaccccagcctgatgagccctgagtgcctgcccaccaccaccaagaagaagacagaggacatgtctgacctgccctgtgagagccagaggagcatccccctggccgtgacagatgccctggagcacatcatggagcagctgaatgtgctgacccagacagtgtccatcctggagcagaggctgaccctgacagaggacaagctgaaggactgcctggagaaccagcagaagctgttctctgctgtgcagcagaagagctag

SEQ ID NO: 18898 - DNA, 1263 bp, synthetic construct
  source 1..1263: mol_type = other DNA; note = Synthetic coding sequence
atgctgaaggccgtcatcctgattggaggcccccagaagggcacccgcttccggcccctgagctttgaggtgcccaagcccctcttccctgtggccggcgtgcccatgatccagcaccacatcgaggcctgtgcccaggtgcccggcatgcaggagatcctgctgattggcttctaccagccagatgagcccctgacccagttcctggaggccgcccagcaggagttcaacctgcctgtgcgctacctgcaggagtttgcccccctgggcactggaggcggcctgtaccacttccgggaccagatcctggccggcagccctgaggccttctttgtgctgaatgctgatgtgtgcagcgacttccccctgagcgccatgctggaggcccaccggcggcagaggcaccccttcctgctgctgggcaccacagccaacagaacccagagcctgaactacggctgcatcgtggagaacccccagacccatgaggtgctgcactacgtggagaagcccagcaccttcatcagtgacatcatcaactgtggcatctacctgttcagccctgaggccctgaagcccctgagagatgtgttccagaggaaccagcaggacggccagctggaggacagccctggcctgtggccaggagctggcaccatccggctggagcaggatgtgttcagcgccctggccggccagggccagatctacgtgcacctgacagatggcatctggagccagatcaagtctgctggcagcgccctgtatgccagccggctgtacctgagccgctaccaggacacccaccctgagcggctggccaagcacacccctgggggcccctggatcagaggaaatgtgtacatccaccccacagccaaggtggcccccagcgctgtgctgggccccaacgtgtccattggaaaaggagtgacagtgggggagggcgtgcggctgcgggagagcatcgtgctgcacggggccaccctgcaggagcacacctgtgtgctgcacagcatcgtgggctggggcagcacagtgggccgctgggcccgggtggagggcacccccagcgaccccaaccccaatgacccccgggccaggatggattctgagagcctcttcaaggatggcaagctgctgcctgccatcaccatcctgggctgccgggtgcgcatcccagctgaggtgctgatcctgaacagcatcgtgctgccccacaaggagctgagccgctccttcaccaaccagatcatcctgtag

SEQ ID NO: 18899 - DNA, 1215 bp, synthetic construct
  source 1..1215: mol_type = other DNA; note = Synthetic coding sequence
atggaccaggactatgaaagaaggctgctgcggcagatcgtcatccagaatgaaaacaccatgccccgggtgacagagatgaggaggaccctgaccccagccagcagccctgtgagcagccccagcaagcacggggaccgcttcatccccagcagagctggggccaactggagcgtgaacttccaccgcatcaatgaaaatgagaagagccccagccagaacaggaaggccaaggatgccaccagtgacaacgggaaggatggcctggcctacagcgccctgctgaagaatgagctgctgggcgccggcatcgagaaggtgcaggacccccagacagaagatagaaggctgcagcccagcaccccagagaagaagggcctcttcaccgtgacccggctgtgtgacctgtctgtggagggggacagcgtgacctctgtgggctggagcgagcggggcaacctggtggccgtgggcacccacaagggctttgtgcagatctgggatgctgctgctgggaagaagctgtccatgctggagggccacacagcccgggtgggcgccctggcctggaatgctgagcagctgagcagcggcagccgggacaggatgatcctgcagagggacatccgcaccccacccctgcagagcgagcggcggctgcagggccaccggcaggaggtgtgtggcctgaagtggagcacagaccaccagctgctggccagcggcggcaatgacaacaagctgctggtgtggaaccacagcagcctgagccctgtgcagcagtacacagagcacctggccgctgtgaaggccatcgcctggagcccccaccagcacggcctgctggccagcggcggcggcacagctgaccgctgcatccgcttctggaacaccctgaccggccagcccctgcagtgcatcgacaccggcagccaggtgtgcaacctggcctggagcaagcacgccaatgagctggtgtccacccacggctacagccagaaccagatcctggtgtggaagtaccccagcctgacccaggtggccaagctgaccggccacagctacagagtgctgtacctggccatgagcccagatggagaggccatcgtgactggagctggagatgagaccctgcgcttctggaatgtgttcagcaagaccaggagcaccaaggagagcgtgtctgtgctgaacctcttcacccgcatcagatag

SEQ ID NO: 18900 - DNA, 5892 bp, synthetic construct
  source 1..5892: mol_type = other DNA; note = Synthetic coding sequence
atgaagcagaggaagggccagggcagcggcggcagccggggcaggaagaagaggggcctgagtgacatcagccccagcaccagcctgccccccctggtggagggccagctgcgctgcttcctgaagctgactgtgaacagagtcatctggaagatcgccaagccacccacctgtgtgctggtgcgggtgcgctggtggggcgagaccagtgatggcaccctcttctgccccagagatgccctgcagacagagcccaaggctgtgaggaccaccaccaggtatgccatccgctgtggccccaagcagttcaccagctacctgacagacatggctgtgctggtgctggaggtgatcaccaagctggatggcctgcccatcggccgggtgcagatcaatggcctggcccagctgagccccacccaccagatcaatggcttcttcaccatcgtgagcagcaccagcaagaagctgggggagctgcaggtgtccctggccctggagcccctgtctgagacctatgacagctaccaccccctgcccaccacagacatgacagaaaatgtgctgctgagcaagcagggcttcagagaaaatacagagcccagcagcacccagttccaggtgcccagccggccccgggacatccacaccatcaagattgatggcaaggagctggccgccaacagcagccgcagcaccaccccccggggcaaggaccacgtgtgctttgctgaaaatccagacaccatcaaggacagcagctttggcctgcagcacagcctgaacagcggccagagcctggagagcgtgaccctgaagggccgggcccccaggaagcagatgagcctgctgaacagcagcgagttccagccccagatcagaacagtggccaagagccacagcgacagctgcatcctgagcagcaacaacctgcccaccaaggacctgctgagcgccctgctggagcagggcaacaagctgagaaatgccatggtgatcagcgccatgaagagcagccctgagacctccatgctgctggaccaggtgcacccccccatcaatgaagacagcctgcgggccagcacccagatccgggccttcagcaggaaccgcttcaaggaccacatcgaggaccacctgctgcccagcacagagaacaccttctggaggcatgacaccaaggctgacacccgggccatccagctgctgctgggcagcgctgagctgagccagggcaacttctgggatggcctgggcagccccccagacagccccagccctggcagtgatgtgtactgcatcagcgagctgaatgacccccagtatgaccagagcctgctggagaacctcttctacacagcccccaagagtgacaccagcatcagtgacttcctgtctgaggaggatgacatcgtgcccagcaagaagatcagccagagcacagccctggcccggagcagcaaggtgctggagagcagtgaccacaagctgaagaagaggtctgctgggaagaggaacagaaacctggtggagcagcagatgctgtctgagaccccagaagatgcccagaccatgaccctgtctgtggaccggctggccctgctgggccgcacccacagcgtgcgcatcatcatcgagaccatgggcgtgcccccagacagcccccagatgaccccaggcaagaagagctatgccggccccccacccaaggtgaccacagccaagaagaggaccttctttgtggagtaccacttccctgtgggcttcagcgagagcggcctgggcaagacagccctgatcacagaggtggtgcggctggccagcagcaagatcacagatggcaaggtgaagttccagcagagatttgtgtttcctgtgcagtttggaggccccatgattgagcactggtggaacagcaacctgaccttccagatctacgtgaagaagaccccccagaagaagccagaggtgattggctctgtgtccctgagcctgcgggctgtgatccagagcgagctgctgtccttcagtgaccagctgcctgtgcagcaggagaatggccagagccccttcggccccctgaaggtgaccatggagctgatcacagacaacaaggacttcaccggcatcaacaccaagctgagcggcaacacccactacacccccctgtgtgcccccaccagccccaacaaggccctgcctgagctgaaccaggacatgacctgcaccaagaacccccagaacctgaaccagatccacgaggagacagccaagaaggcccagaacctggtgctgcccaacaggaagagccccagccctgtggccccccaccccagcacctttgtggccaccccagccagccacaacctggtgaaccagaccaacggcaccaccaaggagagcgccctgctgctgcacgtgctgctgatggtgcctgatggcaaggacttcatctctggagagagcgagaagcagagcccctgcaatgtgtacctgaactgcaagctgttcagcacagaggaggtgaccaggtctgtgattgcctggggcaccacccagcccgtcttcaacttcagccaggtgattcctgtgtccctgagcagcaagtacctggagcggctgaagaacaacgtgatggtgattgagacctggaacaaggtgcgcagccctggccaggacaagctgctgggcctggtgaagctgcccctgcaccagttctacatgtccttcaaggatgccaagatcagccggctgctgctggatgcccagtaccctgtggtggccgtggacagctacatgcctgtgattgatgtgttcagcggccaccagaatggcagcctgcgggtcttcctggccatgggcagcagcaaccagatcatggccctgcagaggctgaagaatgaggagggcaccctgccccccttcagccccaggcctgcccacttcctggaccagcccacagctgcctctgtggccatggctgaagatagaggaaatggcctgatggagcactgctttgagatccacatcgagatggtgaagggcctggcccccctgcaggccaccgtgtggggcgaggccgactgctacgtgcagtactacttccctgtgcagcacagccagagctctgtgctgaagggccctgagttcctggagaatggcatcaccctgaagcccttcagaacagccaccaccctgtgtgtgcctgaccccatcttcaacagcgagcaccaccacagcctgctgctgcctgctgaggtgcctgtgcagaggctgctgctgagcgccttcagcgcccagggcctggtgcctgggggcggcgtgcagtttgagatctggtgccgctactactaccccaacgtgcgggaccagaaggtggccaagggcaccctgcccctgagccgcatctgtgccatggtgaccacccagcaccgggaggatgtgggcatccagaccttcaacctgcccctgaccccaagaattgagaacaggaaggagctgaggaaccagagcagcggcctgctggatgtgggcctgcgctaccgccgcagccccaggacagctgagggcgtgctggccgccaggacagtgtccatctctgtgcagatcatccgggcctgtggcctgcaggccgccgccaaggccctggccgagcgggagcccgccctgcagttcagcgccaccgtgggcgtgaatgcctctgtgaccacccacctgtccttcctgccccagggcgagcagaggaggacccaccctgtggcctgcagcttctgcccagagttcagccaccacgtggagttcacctgcaacctggtgacccagcactgcagcggggaggcctgcttcctggccgagctgctggagtttgctgaggtgatctttgctgtgtaccacgagaacaccaagagcgccagtgacatcatcagcattgagagctgcaaggagtacctgctgggcgtggtgaaggtgcccaccaaggagctgctgatcaagaggagcggcatcaccggctggtaccccatcatcctgcctgaagatggcggcctgccccacggcctggagctgatgcagaagatcgtgggcggcctggagctgagcatctccttcacccacagaggagaccgggagcgggtgctggaggccgctgagcacctgggctggagctttgagaacagcctgaaggactttgtgaggatggatgaaggagagcccgccaccgtgaccatcagcaccccccggctgtggctgcccatccactgtgtgctgctggccggccacaaccacatccacaagaacacctactgctacctgcgctacaagttctatgaccacgaggccttctggacccccctgaagaagcccaaggagagcgtgaacaagaagcagatcatggtgaccttcaaggccagcaagagagctgaggtgacccggggccccagcctgctgtggtacttccgggaggagcggctggagatccaggtgtggagggcctatggaaatgacagcgtggagcggccccaccagacagacagctggattggcagcgcctacgtggacctggcccggctgggggagaggtctgcccggaccctgactgtgtctggagtgtaccccctgtttggaagaaatgccagcaacctgagcggggccgccctgcgggtgcacgtggtgctgagcagcctgagcagccacctggagcccacccatgagctggacagcatggactgcagcagccacagcgagagcgagcagctgcccaggagaaatgatgaggtgcagctgagccccccagaggtgatcagctgccaccagaagagccctgccagcacccaggtgccctgcagcagcaccacagctgaggtgcggctgacccaggagggccctgctgacctggatggcacctttgctgtgtccatcctggtggagcgggccatgcacctgagcctgaagggcagccccctgacagagaggaaggtgtccatccccagctgctgcgtgtcctttgccacagcagatgagagcagccctgtgtacacccaggtggtggagaacacagacagccccatctggaacttccagcagcagagccggctgagcaaggagctgctgctggacccccagcagaccctggtgttcaaggtgtggcacaagggagatgaggagagggtcatcggctttgcctctgtggacctgagccccctgctgagcggcttccagtttgtgtgtggctggtacaacatcacagacttctctggagagtgccagggccagatcaaggtggccgtgagccccctggagagcctcatccacttcaaggaggagcggcaggcccggcggggcgtggagaccagcaagagcctcatccccatctacagccccttctccttccctgccagtgacacctatgctgccttcagcagccacatggcccggcagaccctggaccagctggcccacgccagcagcaaggagctggacttcagcagccctggccgcagtgacaccaccaggagccaggccagcagacatgaggagcacgtgcagaacatccgccgcttccacgagagcctgcacctgcagggcgaggcccccctgccctgtgatgacaagctgaccaccagccccctgagcagccagaccagcatcctgaccagcctgaggaagaacctgtctgagctggaccagatccagcgctacttccggcagaagctgaccaagcccttcctgcccctgagcccccagacccagacagccatcagccagcaccaggagagctgccgggaccacctgggccctggggccagcagcctggaccccggcagccagtgcatcctggagaagagcagcaacctggtgctgcaggtgagcagcctcatcaccggcagctactag

SEQ ID NO: 18901 - DNA, 5586 bp, synthetic construct
  source 1..5586: mol_type = other DNA; note = Synthetic coding sequence
atgaagcagaggaagggccagggcagcggcggcagccggggcaggaagaagaggggcctgagtgacatcagccccagcaccagcctgccccccctggtggagggccagctgcgctgcttcctgaagctgactgtgaacagagtcatctggaagatcgccaagccacccacctgtgtgctggtgcgggtgcgctggtggggcgagaccagtgatggcaccctcttctgccccagagatgccctgcagacagagcccaaggctgtgaggaccaccaccaggtatgccatccgctgtggccccaagcagttcaccagctacctgacagacatggctgtgctggtgctggaggtgatcaccaagctggatggcctgcccatcggccgggtgcagatcaatggcctggcccagctgagccccacccaccagatcaatggcttcttcaccatcgtgagcagcaccagcaagaagctgggggagctgcaggtgtccctggccctggagcccctgtctgagacctatgacagctaccaccccctgcccaccacagacatgacagaaaatgtgctgctgagcaagcagggcttcagagaaaatacagagcccagcagcacccagttccaggtgcccagccggccccgggacatccacaccatcaagattgatggcaaggagctggccgccaacagcagccgcagcaccaccccccggggcaaggaccacgtgtgctttgctgaaaatccagacaccatcaaggacagcagctttggcctgcagcacagcctgaacagcggccagagcctggagagcgtgaccctgaagggccgggcccccaggaagcagatgagcctgctgaacagcagcgagttccagccccagatcagaacagtggccaagagccacagcgacagctgcatcctgagcagcaacaacctgcccaccaaggacctgctgagcgccctgctggagcagggcaacaagctgagaaatgccatggtgatcagcgccatgaagagcagccctgagacctccatgctgctggaccaggtgcacccccccatcaatgaagacagcctgcgggccagcacccagatccgggccttcagcaggaaccgcttcaaggaccacatcgaggaccacctgctgcccagcacagagaacaccttctggaggcatgacaccaaggctgacacccgggccatccagctgctgctgggcagcgctgagctgagccagggcaacttctgggatggcctgggcagccccccagacagccccagccctggcagtgatgtgtactgcatcagcgagctgaatgacccccagtatgaccagagcctgctggagaacctcttctacacagcccccaagagtgacaccagcatcagtgacttcctgtctgaggaggatgacatcgtgcccagcaagaagatcagccagagcacagccctggcccggagcagcaaggtgctggagagcagtgaccacaagctgaagaagaggtctgctgggaagaggaacagaaacctggtggagcagcagatgctgtctgagaccccagaagatgcccagaccatgaccctgtctgtggaccggctggccctgctgggccgcacccacagcgtgcgcatcatcatcgagaccatgggcgtgcccccagacagcccccagatgaccccaggcaagaagagctatgccggccccccacccaaggtgaccacagccaagaagaggaccttctttgtggagtaccacttccctgtgggcttcagcgagagcggcctgggcaagacagccctgatcacagaggtggtgcggctggccagcagcaagatcacagatggcaaggtgaagttccagcagagatttgtgtttcctgtgcagtttggaggccccatgattgagcactggtggaacagcaacctgaccttccagatctacgtgaagaagaccccccagaagaagccagaggtgattggctctgtgtccctgagcctgcgggctgtgatccagagcgagctgctgtccttcagtgaccagctgcctgtgcagcaggagaatggccagagccccttcggccccctgaaggtgaccatggagctgatcacagacaacaaggacttcaccggcatcaacaccaagctgagcggcaacacccactacacccccctgtgtgcccccaccagccccaacaaggccctgcctgagctgaaccaggacatgacctgcaccaagaacccccagaacctgaaccagatccacgaggagacagccaagaaggcccagaacctggtgctgcccaacaggaagagccccagccctgtggccccccaccccagcacctttgtggccaccccagccagccacaacctggtgaaccagaccaacggcaccaccaaggagagcgccctgctgctgcacgtgctgctgatggtgcctgatggcaaggacttcatctctggagagagcgagaagcagagcccctgcaatgtgtacctgaactgcaagctgttcagcacagaggaggtgaccaggtctgtgattgcctggggcaccacccagcccgtcttcaacttcagccaggtgattcctgtgtccctgagcagcaagtacctggagcggctgaagaacaacgtgatggtgattgagacctggaacaaggtgcgcagccctggccaggacaagctgctgggcctggtgaagctgcccctgcaccagttctacatgtccttcaaggatgccaagatcagccggctgctgctggatgcccagtaccctgtggtggccgtggacagctacatgcctgtgattgatgtgttcagcggccaccagaatggcagcctgcgggtcttcctggccatgggcagcagcaaccagatcatggccctgcagaggctgaagaatgaggagggcaccctgccccccttcagccccaggcctgcccacttcctggaccagcccacagctgcctctgtggccatggctgaagatagaggaaatggcctgatggagcactgctttgagatccacatcgagatggtgaagggcctggcccccctgcaggccaccgtgtggggcgaggccgactgctacgtgcagtactacttccctgtgcagcacagccagagctctgtgctgaagggccctgagttcctggagaatggcatcaccctgaagcccttcagaacagccaccaccctgtgtgtgcctgaccccatcttcaacagcgagcaccaccacagcctgctgctgcctgctgaggtgcctgtgcagaggctgctgctgagcgccttcagcgcccagggcctggtgcctgggggcggcgtgcagtttgagatctggtgccgctactactaccccaacgtgcgggaccagaaggtggccaagggcaccctgcccctgagccgcatctgtgccatggtgaccacccagcaccgggaggatgtgggcatccagaccttcaacctgcccctgaccccaagaattgagaacaggaaggagctgaggaaccagagcagcggcctgctggatgtgggcctgcgctaccgccgcagccccaggacagctgagggcgtgctggccgccaggacagtgtccatctctgtgcagatcatccgggcctgtggcctgcaggccgccgccaaggccctggccgagcgggagcccgccctgcagttcagcgccaccgtgggcgtgaatgcctctgtgaccacccacctgtccttcctgccccagggcgagcagaggaggacccaccctgtggcctgcagcttctgcccagagttcagccaccacgtggagttcacctgcaacctggtgacccagcactgcagcggggaggcctgcttcctggccgagctgctggagtttgctgaggtgatctttgctgtgtaccacgagaacaccaagagcgccagtgacatcatcagcattgagagctgcaaggagtacctgctgggcgtggtgaaggtgcccaccaaggagctgctgatcaagaggagcggcatcaccggctggtaccccatcatcctgcctgaagatggcggcctgccccacggcctggagctgatgcagaagatcgtgggcggcctggagcacctgggctggagctttgagaacagcctgaaggactttgtgaggatggatgaaggagagcccgccaccgtgaccatcagcaccccccggctgtggctgcccatccactgtgtgctgctggccggccacaaccacatccacaagaacacctactgctacctgcgctacaagttctatgaccacgaggccttctggacccccctgaagaagcccaaggagagcgtgaacaagaagcagatcatggtgaccttcaaggccagcaagagagctgaggtgacccggggccccagcctgctgtggtacttccgggaggagcggctggagatccaggtgtggagggcctatggaaatgattctgtggagcggccccaccagacagacagctggattggcagcgcctacgtggacctggcccggctgggggagaggtctgcccggaccctgactgtgtctggagtgtaccccctgtttggaagaaatgccagcaacctgtctggagctgccctgcgggtgcacgtggtgctgagcagcctgagcagccacctggagcccacccatgagctggacagcatggactgcagcagccacagcgagagcgagcagctgcccaggagaaatgatgaggtgcagctgagccccccagaggtgatcagctgccaccagaagagccctgccagcacccaggtgccctgcagcagcaccacagctgaggtgcggctgacccaggagggccctgctgacctggatggcacctttgctgtgtccatcctggtggagcgggccatgcacctgagcctgaagggcagccccctgacagagaggaaggtgtccatccccagctgctgcgtgtcctttgccacagcagatgagagcagccctgtgtacacccaggtggtggagaacacagacagccccatctggaacttccagcagcagagccggctgagcaaggagctgctgctggacccccagcagaccctggtgttcaaggtgtggcacaagggagatgaggagcgggtgattggatttgcctctgtggacctgagccccctgctgagcggcttccagtttgtgtgtggctggtacaacatcacagacttcagcggggagtgccagggccagatcaaggtggccgtgagccccctggagagcctcatccacttcaaggaggagcggcaggccaggagaggagtggagaccagcaagagcctcatccccatctacagccccttctccttccctgccagtgacacctacgccgccttcagcagccacatggcccggcagaccctggaccagctggcccacgccagcagcaaggagctggacttcagcagccctggccgcagtgacaccaccaggagccaggccagcagacatgaggagcacgtgcagaacatccgccgcttccacgagagcctgcacctgcagggcgaggcccccctgccctgtgatgacaagctgaccaccagccccctgagcagccagacctag

SEQ ID NO: 18902 - DNA, 1131 bp, synthetic construct
  source 1..1131: mol_type = other DNA; note = Synthetic coding sequence
atgctgaccttcctgcagcagctgcgggtggactggccagctgccagcgagcgggccagcagccacaccctgcggagccacgccctggaggagctgaccagcgccaatgatggccgcaccctgagccctggcatcctgggccgcctgtgcctgaaggagctggtggaggagcagggccgcacagctggctatgaccccaacctggacaactgcctggtgacagaggacctgctgtctgtgctggccgagctgcaggaggccctgtggcactggccagaggacagccaccctggcctggccggggccagtgacacaggaactggaggctgcctggtggtgcacgtggtgtcctgtgaggaggagttccagcagcagaagctggacctgctgtggcagaagctggtggacaaggcccccctgcggcagaagcacctgatctgtggccctgtgaaggtggccggggcccctggcaccctgatgacagcccctgagtactatgagttccgccacacccaggtgtgcaaggccagcgccctgaagcatggaggagacctggcccaggaccctgcctggacagagatctttggagtgctgtctgtggccaccatcaagtttgagatgctgagcacagccccccagagccagctgttcctggccctggccgacagcagcatcagcaccaagggcaccaagagcggcacctttgtgatgtacaactgtgcccggctggccaccctgtttgagagctacaagtgcagcatggagcagggcctgtaccccaccttcccccctgtgagcagcctggacttcagcctgctgcatgatgaaggagagtggctgctgctcttcaacagcatcctgcccttcccagacctgctgagcaggacagctgtgctggactgcacagcccctggcctgcacatcgctgtgaggacagagatgatctgcaagttcctggtgcagctgtccatggacttcagcagctactacaacagagtgcacatcctgggggagccccggccccacctgtttggccagatgtttgtgcggctgcagctgctgcgggctgtgcgggaggtgctgcacacaggcctggccatgctgggcctgccccccctgagccacatctag

SEQ ID NO: 18903 - DNA, 1572 bp, synthetic construct
  source 1..1572: mol_type = other DNA; note = Synthetic coding sequence
atgaaccagccctgcaacagcatggagccccgggtgatggatgatgacatgctgaagctggccgtgggggaccagggcccccaggaggaggccggccagctggccaagcaggagggcatcctcttcaaggatgtgctgagcctgcagctggacttcaggaacatcctgagaattgacaacctgtggcagtttgagaacctgaggaagctgcagctggacaacaacatcatcgagaagattgagggcctggagaacctggcccacctggtgtggctggacctgtccttcaacaacatcgagaccatcgagggcctggacaccctggtgaacctggaggacctgagcctcttcaacaaccgcatcagcaagattgacagcctggatgccctggtgaagctgcaggtgctgagcctgggcaacaacagaattgacaacatgatgaacatcatctacctgcggcgcttcaagtgcctgcggaccctgagcctgagcaggaaccccatcagcgaggccgaggactacaagatgttcatctgtgcctacctgcctgacctgatgtacctggactacagaagaattgatgaccacaccaagaagctggccgaggccaagcaccagtacagcattgatgagctgaagcaccaggagaacctgatgcaggcccagctggaggatgagcaggcccagcgggaggagctggagaagcacaagacagcctttgtggagcacctgaatggcagcttcctgtttgacagcatgtatgcagaggacagcgagggcaacaacctgagctacctgcccggggtgggggagctgctggagacctacaaggacaagtttgtgatcatctgtgtgaacatctttgaatatggcctgaagcagcaggagaagaggaagacagagctggacaccttctctgaatgtgtgcgggaggccatccaggagaaccaggagcagggcaagaggaagatcgccaagtttgaggagaagcacctgagcagcctgagcgccatccgggaggagctggagctgcccaacatcgagaagatgatcctggagtgcagcgctgacatcagcgagctgtttgatgccctgatgaccctggagatgcagctggtggagcagctggaggagaccatcaacatgtttgaaagaaatattgtggacatggtgggcctcttcattgaaaatgtgcagagcctgatggcccagtgccgggacctggagaaccaccaccacgagaagctgctggagatcagcatcagcaccctggagaagatcgtggagggggacctggatgaggacctgcccaatgacctgcgggccctgtttgtggacaaggacaccatcgtgaatgctgtgggcgccagccatgacatccacctgctgaagattgacaacagagaagatgagctggtgacccgcatcaacagctggtgcacccggctgattgaccgcatccacaaggatgagatcatgaggaacaggaagagggtgaaggagatcaaccagtacatcgaccacatgcagagcgagctggacaacctggagtgtggggacatcctggactag

SEQ ID NO: 18904 - DNA, 1680 bp, synthetic construct
  source 1..1680: mol_type = other DNA; note = Synthetic coding sequence
atgaaggtgatcacctgtgagatcgcctggcacaacaaggagcctgtgtacagcctggacttccagcacggcacagctggccgcatccaccggctggccagcgctggggtggacaccaacgtgcgcatctggaaggtggagaagggcccagatggcaaggccatcgtggagttcctgagcaacctggcccggcacaccaaggctgtgaatgtggtgcgcttcagccccactggagagatcctggccagcggaggagatgatgctgtgatcctgctgtggaaggtgaatgacaacaaggagcctgagcagatcgccttccaggatgaagatgaggcccagctgaacaaggagaactggacagtggtgaagaccctgcggggccacctggaggatgtgtatgacatctgctgggccacagatggcaacctgatggccagcgcctctgtggacaacacagccatcatctgggatgtgtccaagggccagaagatcagcatcttcaatgagcacaagagctatgtgcagggcgtgacctgggaccccctgggccagtatgtggccaccctgagctgtgacagagtgctgcgggtgtacagcatccagaagaagagggtggccttcaacgtgtccaagatgctgagcggcatcggggctgagggggaggcccggagctacaggatgtttcatgatgacagcatgaagagcttcttccggcggctgtccttcaccccagatggcagcctgctgctgaccccagctggctgtgtggagagcggggagaatgtgatgaacaccacctacgtgttcagcaggaagaacctgaagaggcccatcgcccacctgccctgccctgggaaggccaccctggccgtgcgctgctgccctgtgtactttgagctgcggcctgtggtggagaccggggtggagctgatgagcctgccctaccgcctggtgtttgctgtggccagcgaggacagcgtgctgctgtatgacacccagcagagcttccccttcggctacgtgagcaacatccactaccacaccctgagtgacatctcctggagcagtgatggagccttcctggccatcagcagcacagatggctactgcagctttgtgacctttgagaaggatgagctgggcatccccctgaaggagaagcctgtgctgaacatgaggaccccagacacagccaagaagaccaagagccagacccaccggggcagcagccctggccccaggcctgtggagggcaccccagccagcaggacccaggaccccagcagccctggcaccaccccaccccaggcccggcaggccccagcccccaccgtcatccgggaccccccatccatcaccccagctgtgaagagccccctgcccggccccagcgaggagaagaccctgcagcccagcagccagaacaccaaggcccaccccagccggcgggtgaccctgaacaccctgcaggcctggagcaagaccaccccccggcgcatcaacctgacccccctgaagacagacaccccacccagctctgtgcccaccagcgtcatcagcacccccagcacagaggagatccagagcgagaccccaggagatgcccagggcagccccccagagctgaagaggccccggctggatgaaaataaaggaggaacagagagcctggacccctag

SEQ ID NO: 18905 - DNA, 1527 bp, synthetic construct
  source 1..1527: mol_type = other DNA; note = Synthetic coding sequence
atggctgatggccaggtggccgagctgctgctgcggcggctggaggccagtgatggcggcctggacagcgctgagctggccgctgagctgggcatggagcaccaggccgtggtgggcgctgtgaagagcctgcaggccctgggggaggtgattgaagctgagctgcggagcaccaagcactgggagctgacagctgagggggaggagatcgcccgggagggcagccatgaggcccgggtcttccgcagcatccccccagagggcctggcccagagcgagctgatgaggctgcccagcggcaaggtgggcttcagcaaggccatgagcaacaagtggatccgggtggacaagtctgctgctgatggccccagggtcttccgggtggtggacagcatggaggatgaggtgcagaggcggctgcagctggtgcggggcggccaggccgagaagctgggggagaaggagaggtctgagctgaggaagaggaagctgctggccgaggtgaccctgaagacctactgggtgtccaaaggaagtgccttcagcaccagcatcagcaagcaggagacagagctgagccctgagatgatcagcagcggctcctggagggaccggcccttcaagccctacaacttcctggcccatggagtgctgcctgattctggccacctgcaccccctgctgaaggtgcgcagccagttccggcagatcttcctggagatgggcttcacagagatgcccacagacaacttcatcgagagcagcttctggaactttgatgccctcttccagccccagcagcacccagcccgggaccagcacgacaccttcttcctgcgggaccctgctgaggccctgcagctgcccatggactatgtgcagagggtgaagaggacccacagccagggcggctacggcagccagggctacaagtacaactggaagctggatgaggccaggaagaacctgctgcggacccacaccaccagcgccagcgcccgggccctgtaccgcctggcccagaagaagcccttcacccctgtgaagtacttcagcattgacagagtcttcagaaatgagaccctggatgccacccacctggccgagttccaccagattgaaggagtggtggccgaccacggcctgaccctgggccacctgatgggcgtgctgcgggagttcttcaccaagctgggcatcacccagctgcgcttcaagccagcctacaacccctacacagagcccagcatggaggtgttctcctaccaccagggcctgaagaagtgggtggaggtgggcaacagcggggtcttccggcctgagatgctgctgcccatgggcctgcctgaaaatgtgtctgtgattgcctggggcctgagcctggagcggcccaccatgatcaagtatggcatcaacaacatccgggagctggtgggccacaaggtgaacctgcagatggtgtatgacagccccctgtgccgcctggatgctgagccccggcccccacccacccaggaggccgcctag

SEQ ID NO: 18906 - DNA, 1203 bp, synthetic construct
  source 1..1203: mol_type = other DNA; note = Synthetic coding sequence
atgagcagccccctggccagcctgagcaagaccaggaaggtgcccctgcccagcgagcccatgaaccctggaagaagaggcatccgcatctatggagatgaagatgaggtggacatgctgagtgatggctgcggcagcgaggagaagatctctgtgcccagctgctacggcggcattggagcccctgtgtcccggcagggcgacagcctggcccctcctgaggtggactttgaccggctgctggccagcctgcaggacctgtctgagctggtggtggagggggacacccaggtgacccctgtgcctgggggcgcccggctgcggaccctggagcccatccccctgaagctgtacagaaatggcatcatgatgtttgatggccccttccagcccttctatgaccccagcacccagcgctgcctgcgggacatcctggatggcttcttccccagcgagctgcagaggctgtacccaaatggagtgcccttcaaggtgtctgacctgaggaaccaggtgtacctggaggatggcctggaccccttccctggagagggccgggtggtgggccggcagctgatgcacaaggccctggacagagtggaggagcaccctggcagcaggatgacagctgagaagttcctgaaccggctgcccaagtttgtgatccggcagggcgaggtgattgacatccggggccccatccgggacaccctgcagaactgctgccccctgcctgcccgcatccaggagatcgtggtggagacccccaccctggccgctgagcgggagaggagccaggagagccccaacaccccagccccacccctgtccatgctgcgcatcaagtcagaaaatggagagcaggccttcctgctgatgatgcagcctgacaacaccatcggagatgtgcgggccctgctggcccaggcccgggtgatggatgccagcgcctttgagatcttcagcaccttcccccccaccctgtaccaggatgacaccctgaccctgcaggccgccggcctggtgcccaaggccgccctgctgctgcgggcccggcgggcccccaagagcagcctgaagttcagccctggcccctgccccggccctggccctggccccagccctggccctggccctggccccagccctggccctggccctggccccagcccctgccccggccccagccccagcccccagtag

SEQ ID NO: 18907 - DNA, 1350 bp, synthetic construct
  source 1..1350: mol_type = other DNA; note = Synthetic coding sequence
atggccagcgccctgcggcccccccgggtgcccaagcccaagggcgtgctgcccagccactactatgagagcttcctggagaagaagggcccctgtgaccgggactacaagaagttctgggccggcctgcagggcctgaccatctacttctacaacagcaacagagacttccagcacgtggagaagctgaacctgggcgcctttgagaagctgacagatgagatcccctggggcagcagccgggaccccggcacccacttcagcctcatcctgcgggaccaggagatcaagttcaaggtggagaccctggagtgccgggagatgtggaagggcttcatcctgactgtggtggagctgcgggtgcccacagacctgaccctgctgcccggccacctgtacatgatgtctgaggtgctggccaaggaggaggcccggcgggccctggagacccccagctgcttcctgaaggtgtcccggctggaggcccagctgctgctggagcgctacccagaatgtggcaacctgctgctgcggcccagcggagatggagcagatggagtgtctgtgaccacccggcagatgcacaacggcacccacgtggtgcgccactacaaggtgaagcgggagggccccaagtatgtgattgatgtggagcagcccttcagctgcaccagcctggatgctgtggtgaactactttgtgagccacaccaagaaggccctggtgcccttcctgctggatgaggactatgagaaggtgctgggctacgtggaggccgacaaggaaaatggagaaaatgtgtgggtggcccccagcgcccctggccctggccctgccccctgcaccggcggccccaagcccctgagccctgccagcagccaggacaagctgccccccctgccccccctgcccaaccaggaggagaactacgtgacccccatcggagatggccctgctgtggactatgagaaccaggatgtggccagcagctcctggcctgtgatcctgaagcccaagaagctgcccaagcccccagccaagctgcccaagccccctgtgggccccaagcctgtggagaagggcttccaccacgtggcccaggccggcctggagctgctgaccagcagtgacccccccaccagcgccagccagagcgctggcatcactggagtgagccaccacacctggccccacctgagcagcctgcctgagcccaaggtgttcaatggaggcctgggcaggaagctgcctgtgagcagcgcccagcccctcttccccacagctggcctggccgacatgacagctgagctgcagaagaagctggagaagaggcgggccctggagcactag

SEQ ID NO: 18908 - DNA, 1239 bp, synthetic construct
  source 1..1239: mol_type = other DNA; note = Synthetic coding sequence
atggaccccatccgctccttctgtgggaagctgcggagcctggccagcaccctggactgtgaaacagcccggctgcagagggccctggatggagaggagagtgactttgaggactaccccatgaggatcctgtatgacctgcacagcgaggtgcagaccctgaaggatgatgtgaacatcctgctggacaaggcccggctggagaaccaggagggcatcgacttcatcaaggccaccaaggtgctgatggagaagaacagcatggacatcatgaagatccgggagtacttccagaagtatggctacagcccccgggtgaagaagaacagcgtgcatgagcaggaggccatcaacagcgaccctgagctgagcaactgtgagaacttccagaagacagatgtgaaggatgacctgagtgacccccctgtggccagcagctgcatcagcgagaagagccccaggagcccccagctgagtgactttggcctggagcgctacatcgtgtcccaggtgctgcccaaccccccccaggccgtgaacaactacaaggaggagcccgtcatcgtgaccccacccaccaagcagagcctggtgaaggtgctgaagacccccaagtgtgccctgaagatggatgactttgaatgtgtgacccccaagctggagcacttcggcatcagcgagtacaccatgtgcctgaatgaagactacaccatgggcctgaagaatgccaggaacaacaagtctgaggaggccatcgacacagagagccggctgaatgacaacgtgtttgccacccccagccccatcatccagcagctggagaagagtgatgctgagtacaccaacagccccctggtgcccaccttctgcaccccaggcctgaagatccccagcaccaagaacagcatcgccctggtgtccaccaactaccccctgagcaagaccaacagcagcagcaatgacctggaggtggaggacaggaccagcctggtgctgaacagcgacacctgctttgagaacctgacagaccccagcagccccaccatcagcagctatgagaacctgctgcggacccccaccccacctgaggtgaccaagatccctgaggacatcctgcagctgctgagcaagtacaacagcaacctggccacccccatcgccatcaaggctgtgccccccagcaagcgcttcctgaagcacggccagaacatcagagatgtgagcaacaaggaaaattag

SEQ ID NO: 18909 - DNA, 2583 bp, synthetic construct
  source 1..2583: mol_type = other DNA; note = Synthetic coding sequence
atgacagagggcaccaagaagaccagcaagaagttcaagttcttcaagttcaagggcttcggcagcctgagcaacctgcccaggagcttcaccctgcggcgcagcagcgccagcatcagccggcagagccacctggagccagacacctttgaggccacccaggatgacatggtgacagtgcccaagagccccccagcctatgcccggagcagtgacatgtacagccacatgggcaccatgccccggcccagcatcaagaaggcccagaacagccaggccgcccggcaggcccaggaggccggccccaagcccaacctggtgcctgggggcgtgcctgaccccccaggcctggaggccgccaaggaggtgatggtgaaggccaccggccccctggaggacaccccagccatggagcccaaccccagcgctgtggaggtggaccccatcaggaagccagaggtgcccactggagatgtggaggaggagcggcccccaagagatgtgcacagcgagagagctgctggggagcctgaggccggcagtgactatgtgaagttcagcaaggagaagtacatcctggacagcagccctgagaagctgcacaaggagctggaggaggagctgaagctgagcagcacagacctgcggagccacgcctggtaccacggccgcatcccccgggaggtgtctgagaccctggtgcagagaaatggagacttcctgatccgggacagcctgaccagcctgggggactatgtgctgacctgccgctggaggaaccaggccctgcacttcaagatcaacaaggtggtggtgaaggccggggagagctacacccacatccagtacctgtttgagcaggagagctttgaccacgtgcctgccctggtgcgctaccacgtgggcagcaggaaggctgtgtctgagcagagcggggccatcatctactgccctgtgaacagaaccttccccctgcgctacctggaggccagctatggcctgggccagggcagcagcaagccagccagccctgtgagccccagcggccccaagggcagccacatgaagagaagatctgtgaccatgacagatggcctgacagctgacaaggtgaccaggagtgatggctgccccaccagcaccagcctgccccggccccgggacagcatccgcagctgtgccctgtccatggaccagatcccagacctgcacagccccatgagccccatcagcgagagccccagcagccctgcctacagcacagtgaccagggtgcatgctgccccagctgcccccagcgccacagccctgcctgccagccctgtggcccggcgcagcagcgagccccagctgtgccccggcagcgcccccaagacccacggggagagtgacaagggcccccacaccagccccagccacaccctgggcaaggccagccccagccccagcctgagcagctacagcgaccctgacagcggccactactgccagctgcagccccctgtgcggggcagccgggagtgggccgccacagagaccagcagccagcaggcccggagctatggagagcggctgaaggagctgtctgaaaatggagcccctgagggggactggggcaagaccttcaccgtgcccatcgtggaggtgaccagcagcttcaacccagccaccttccagagcctgctgatcccccgggacaaccggcccctggaggtgggcctgctgaggaaggtgaaggagctgctggccgaggtggatgcccggaccctggcccggcacgtgaccaaggtggactgcctggtggcccgcatcctgggcgtgaccaaggagatgcagaccctgatgggcgtgcgctggggcatggagctgctgaccctgccccacggccggcagctgcggctggacctgctggagcgcttccacaccatgagcatcatgctggccgtggacatcctgggctgcaccggcagcgctgaggagcgggccgccctgctgcacaagaccatccagctggccgctgagctgcggggcaccatgggcaacatgttctcctttgctgctgtgatgggcgccctggacatggcccagatcagccggctggagcagacctgggtgaccctgcggcagaggcacacagagggcgccatcctgtatgagaagaagctgaagcccttcctgaagagcctgaatgaaggcaaggagggcccccccctgagcaacaccaccttcccccacgtgctgcccctcatcaccctgctggagtgtgacagcgcccctcctgagggccctgagccctggggcagcacagaacatggagtggaggtggtgctggcccacctggaggccgccaggacagtggcccaccacggcggcctgtaccacaccaatgctgaggtgaagctgcagggcttccaggcccggcctgagctgctggaggtgttcagcacagagttccagatgaggctgctgtggggcagccagggcgccagcagcagccaggccaggagatatgagaagtttgacaaggtgctgacagccctgagccacaagctggagcctgctgtgcgcagcagcgagctgtag

SEQ ID NO: 18910 - DNA, 573 bp, synthetic construct
  source 1..573: mol_type = other DNA; note = Synthetic coding sequence
atgacagtgccctggaggcctgggaagaggcgcatcacctacaaggaggaggaggacctgaccctgcagcccaggcctgccagcagcgcccctgagagcctggtgggcctgcaggagggcaagagcacagagcagggcaaccacgaccagctgaaggagctgtacagcgctggcaacctgactgtgctggccacagaccccctgctgcaccaggaccctgtgcagctggacttccacttccggctgaccagccagaccagcgcccactggcacggcctgctgtgtgacagaagactcttcctggacatcccctaccaggccctggaccagggcaaccgggagagcctgacagccaccctggagtatgtggaggagaagaccaacgtggacagcgtgtttgtgaacttccagaatgacagaaatgacagaggagccctgctgcgggccttctcctacatgggctttgaggtggtgcggccagaccacccagccctgccccccctggacaacgtcatcttcatggtgtaccccctggagagagatgtgggccacctgcccagcgagcccccatag

SEQ ID NO: 18911 - DNA, 1527 bp, synthetic construct
  source 1..1527: mol_type = other DNA; note = Synthetic coding sequence
atggccacagactggctgggcagcatcgtgtccatcaactgtggggacagcctgggcgtgtaccagggccgggtgtctgctgtggaccaggtgtcccagaccatcagcctgacccggcccttccacaatggagtgaagtgcctggtgcctgaggtgaccttccgggccggggacatcacagagctgaagatcctggagatccctggccctggggacaaccagcactttggagacctgcaccagacagagctgggccccagcggggccggctgccaggtgggcatcaaccagaatggcaccgggaagtttgtgaagaagccagccagcagcagcagcgccccccagaacatccccaagaggacagatgtgaagagccaggatgtggccgtgagcccccagcagcagcagtgcagcaagagctatgtggacagacacatggagagcctgagccagagcaagagcttcagaagaagacacaacagctggagcagcagcagccgccaccccaaccaggccacccccaagaagagcggcctgaagaatggccagatgaagaacaaggatgatgagtgctttggagatgacatcgaggagatcccagacacagactttgattttgagggcaacctggccctgtttgacaaggctgctgtgtttgaggagattgacacctatgaaagaagaagtggcaccaggagccggggcatccccaatgaaagacccacccgctacagacatgatgagaacatcctggagagcgagcccatcgtgtaccgccgcatcatcgtgccccacaacgtgtccaaggagttctgcacagattctggcctggtggtgcccagcatctcctatgagctgcacaagaagctgctgtctgtggccgagaagcacggcctgaccctggagcggcggctggagatgactggagtgtgtgccagccagatggccctgaccctgctgggcggccccaaccggctgaaccccaagaatgtgcaccagaggcccaccgtggccctgctgtgtggcccccacgtgaagggggcccagggcatcagctgtggccgccacctggccaaccatgatgtgcaggtgatcctcttcctgcccaactttgtgaagatgctggagagcatcaccaatgagctgagcctcttcagcaagacccagggccagcaggtgagcagcctgaaggacctgcccaccagccctgtggacctggtgatcaactgcctggactgcccagaaaatgtgttcctgcgggaccagccctggtacaaggctgctgtggcctgggccaaccagaacagagcccctgtgctgagcattgacccccctgtgcatgaggtggagcagggcattgatgccaagtggagcctggccctgggcctgcccctgcccctgggggagcacgccggccgcatctacctgtgtgacatcggcatcccccagcaggtgttccaggaggtgggcatcaactaccacagccccttcggctgcaagtttgtgatccccctgcacagcgcctag

SEQ ID NO: 18912 - DNA, 1158 bp, synthetic construct
  source 1..1158: mol_type = other DNA; note = Synthetic coding sequence
atgggccgctggtgccagacagtggcccggggccagaggcccaggaccagcgcccccagccgggccggggccctgctgctgctgctgctgctgctgcggtctgctggctgctggggcgctggggaggcccctggggccctgagcacagctgaccctgctgaccagagcgtgcagtgtgtgcccaaggccacctgccccagcagccggccccggctgctgtggcagacccccaccacccagaccctgcccagcaccaccatggagacccagtttcctgtgtctgagggcaaggtggacccctaccgcagctgtggcttctcctatgagcaggaccccaccctgcgggaccctgaggccgtggcccggcgctggccctggatggtgtctgtgcgggccaacggcacccacatctgtgccggcaccatcatcgccagccagtgggtgctgactgtggcccactgcctgatctggagagatgtgatctacagcgtgcgggtgggcagcccctggattgaccagatgacccagacagccagtgatgtgcctgtgctgcaggtgatcatgcacagccgctaccgggcccagcgcttctggagctgggtgggccaggccaatgacatcggcctgctgaagctgaagcaggagctgaagtacagcaactacgtgcggcccatctgcctgcccggcacagattatgtgctgaaggaccacagccgctgcaccgtgacaggctggggcctgagcaaggcagatggcatgtggccccagttccgcaccatccaggagaaggaggtgatcatcctgaacaacaaggaatgtgacaacttctaccacaacttcaccaagatccccaccctggtgcagatcatcaagagccagatgatgtgtgccgaggacacccaccgggagaagttctgctatgagctgaccggggagcccctggtgtgcagcatggagggcacctggtacctggtgggcctggtgtcctggggcgccggctgccagaagtctgaggccccacccatctacctgcaggtgagcagctaccagcactggatctgggactgcctgaatggccaggccctggccctgcctgcccccagcaggaccctgctgctggccctgcccctgcccctgagcctgctggccgccctgtag

SEQ ID NO: 18913 - DNA, 750 bp, synthetic construct
  source 1..750: mol_type = other DNA; note = Synthetic coding sequence
atggtggaccggctggccaacagcgaggccaacacccggcgcatcagcatcgtggagaactgcttcggggctgctggccagcccctgaccatccctggccgggtgctgattggagagggcgtgctgaccaagctgtgcaggaagaagcccaaggcccggcagttcttcctgttcaatgacatcctggtgtatggcaacatcgtcatccagaagaagaagtacaacaagcagcacatcatccccctggagaatgtgaccatcgacagcatcaaggatgaaggagacctgagaaatggctggctgatcaagacccccaccaagagctttgctgtgtatgctgccacagccacagagaagtctgagtggatgaaccacatcaacaagtgtgtgacagacctgctgagcaagagcggcaagacccccagcaatgaacatgctgctgtgtgggtgcctgattctgaggccaccgtgtgcatgcgctgccagaaggccaagttcacccctgtgaacagaagacaccactgcaggaaatgtggctttgtggtgtgtggcccctgcagcgagaagcgcttcctgctgcccagccagagcagcaagcctgtgcgcatctgtgacttctgctatgacctgctgtctgctggggacatggccacctgccagcctgcccggagtgacagctacagccagagcctgaagagccccctgaatgacatgtctgatgatgatgatgatgatgacagcagtgactag

SEQ ID NO: 18914 - DNA, 2745 bp, synthetic construct
  source 1..2745: mol_type = other DNA; note = Synthetic coding sequence
atgggagacagccgggacctgtgcccccacctggacagcatcggggaggtgaccaaggaggacctgctgctgaagagcaagggcacctgccagagctgtggggtgacaggccccaacctgtgggcctgcctgcaggtggcctgcccctacgtgggctgtggggagagctttgctgaccacagcaccatccacgcccaggccaagaagcacaacctgactgtgaacctgaccaccttccggctgtggtgctacgcctgtgagaaggaggtgttcctggagcagaggctggccgcccccctgctgggcagcagcagcaagttcagcgagcaggacagccccccacccagccaccccctgaaggctgtgcccatcgctgtggctgatgaaggagagagcgagagtgaagatgatgacctgaagccccggggcctgaccggcatgaagaacctgggcaacagctgctacatgaatgctgccctgcaggccctgagcaactgcccccccctgacccagttcttcctggagtgtggcggcctggtgaggacagacaagaagccagccctgtgcaagagctaccagaagctggtgtctgaggtgtggcacaagaagaggcccagctatgtggtgcccaccagcctgagccacggcatcaagctggtgaaccccatgttccggggctacgcccagcaggacacccaggagttcctgcgctgcctgatggaccagctgcacgaggagctgaaggagcctgtggtggccaccgtggccctgacagaggcccgggacagcgacagcagtgacacagatgagaagcgggagggggacaggagccccagtgaagatgagttcctgagctgtgacagcagcagtgacagaggagaaggagatggccagggccggggcggcggcagcagccaggccgagacagagctgctgatcccagatgaagctggccgggccatcagcgagaaggagaggatgaaggacaggaagttctcctggggccagcagaggaccaacagcgagcaggtggatgaagatgctgatgtggacacagccatggccgccctggatgaccagcctgctgaggcccagccccccagccccaggagcagcagcccctgcaggaccccagagccagacaatgatgcccacctgcggagcagcagccggccctgcagccctgtgcaccaccacgagggccacgccaagctgagcagcagccccccccgggccagccctgtgaggatggcccccagctatgtgctgaagaaggcccaggtgctgtctgctggcagcagaagaaggaaggagcagcgctacagaagtgtcatcagtgacatctttgatggcagcatcctgagcctggtgcagtgcctgacctgtgacagagtgtccaccaccgtggagaccttccaggacctgagcctgcccatccctgggaaggaggacctggccaagctgcacagcgccatctaccagaatgtgcctgccaagccaggggcctgtggggacagctatgctgcccagggctggctggccttcatcgtggagtacatcagaagatttgtggtgtcctgcacccccagctggttctggggccctgtggtgaccctggaggactgcctggccgccttctttgctgctgatgagctgaagggggacaacatgtacagctgtgagcgctgcaagaagctgagaaatggagtgaagtactgcaaggtgctgcggctgcctgagatcctgtgcatccacctgaagcgcttcagacatgaggtgatgtacagcttcaagatcaacagccacgtgtccttccccctggagggcctggacctgcggcccttcctggccaaggaatgtaccagccagatcaccacctatgacctgctgagcgtcatctgccaccacggcacagctggcagcggccactacatcgcctactgccagaatgtcatcaatggccagtggtatgaatttgatgaccagtatgtgacagaggtgcatgagaccgtggtgcagaatgctgagggctacgtgctcttctacaggaagagcagcgaggaggccatgagggagcggcagcaggtggtgtccctggccgccatgagggagcccagcctgctgcgcttctacgtgtcccgggagtggctgaacaagttcaacacctttgctgagcccggccccatcaccaaccagaccttcctgtgcagccacggcggcatccccccccacaagtaccactacattgatgacctggtggtgatcctgccccagaatgtgtgggagcacctgtacaacagatttggaggcggccctgctgtgaaccacctgtatgtgtgcagcatctgccaggtggagattgaggccctggccaagagaagacgcatcgagattgacaccttcatcaagctgaacaaggccttccaggccgaggagagccctggggtcatctactgcatctccatgcagtggttccgggagtgggaggcctttgtgaagggcaaggacaatgaacctcctggccccatcgacaacagccgcatcgcccaggtgaagggcagcggccacgtgcagctgaagcagggcgctgactatggccagatcagcgaggagacctggacctacctgaacagcctgtatggaggcggccctgagatcgccatccggcagagcgtggcccagcccctgggccctgagaacctgcacggggagcagaagattgaagctgagaccagggctgtgtag

SEQ ID NO: 18915 - DNA, 1341 bp, synthetic construct
  source 1..1341: mol_type = other DNA; note = Synthetic coding sequence
atgagagctgcccggcggggcctgcactgtgccggggctgagcggccccggcggcggggccgcctgtgggacagcagcggcgtgccccagaggcagaagaggcctggcccctggaggacccagacccaggagcagatgagcagagatgtgtgcatccacacctggccctgcacctactacctggagcccaagaggcgctgggtgacaggccagctgagcctgaccagcctgagcctgcgcttcatgacagacagcactggagagatcctggtgtccttccccctgagcagcatcgtggagatcaagaaggaggccagccacttcatcttcagcagcatcaccatcctggagaagggccacgccaagcactggttcagcagcctgcggcccagcagaaatgtggtgttcagcatcatcgagcacttctggagggagctgctgctgagccagcctggagctgtggctgatgcctctgtgcccaggaccagaggagaggagctgaccggcctgatggccggcagccagaagaggctggaggacacagcccgggtgctgcaccaccagggccagcagctggacagcgtgatgaggggcctggacaagatggagagtgacctggaggtggccgaccggctgctgacagagctggagagccctgcctggtggcccttcagcagcaagctgtggaagaccccacctgagaccaagcccagagaagatgtgtccatgaccagctgtgagccctttgggaaggagggcatcctgatcaagatcccagctgtgatcagccacaggacagagagccacgtgaagccaggccgcctgactgtgctggtgtctggcctggagatccatgacagcagcagcctgctgatgcacagatttgagcgggaggatgtggatgacatcaaggtgcacagcccctatgagatcagcatccggcagcgcttcatcggcaagccagacatggcctaccgcctcatcagcgccaagatgcctgaggtgatccccatcctggaggtgcagttcagcaagaagatggagctgctggaggatgccctggtgctgcggagcgcccggaccagcagccctgctgagaagagctgcagcgtgtggcacgccgccagcggcctgatgggccgcaccctgcaccgggagcccccagctggggaccaggagggcacagccctgcacctgcagaccagcctgcctgccctgtctgaggccgacacccaggagctgacccagggcttccggcccatgagcctgagcacccagacagtgctggtgatgctgtgcagcgagagcgctggggccctgtggaggcagaggctgtcctag

SEQ ID NO: 18916 - DNA, 1896 bp, synthetic construct
  source 1..1896: mol_type = other DNA; note = Synthetic coding sequence
atggccatcgtgcagaccctgcctgtgcccctggagcccgcccctgaggccgccacagccccccaggcccctgtgatgggctctgtgagcagcctcatcagcggccggccctgccctgggggccctgccccacccaggcaccacggccccccaggccccaccttcttccggcagcaggacggcctgctgcggggcggctatgaggcccaggagcccctgtgcccagctgtgccccccaggaaggctgtgcctgtgaccagcttcacctacatcaatgaagacttcagaacagagagcccccccagccccagcagtgatgtggaggatgcccgggagcagagggcccacaatgcccacctgcggggccccccacccaagctgatccctgtgtctgggaagctggagaagaacatggagaagatcctgatccggcccacagccttcaagcctgtgctgcccaagcccaggggggcccccagcctgcccagcttcatgggcccccgggccaccggcctgagcggcagccagggcagcctgacccagctgtttggaggccctgccagcagcagcagcagcagcagcagcagcagcgctgctgacaagcccctggccttcagcggctgggccagcggctgccccagcggcaccctgagtgacagcggcaggaacagcctgagcagcctgcccacctacagcactggaggagctgagcccaccaccagcagccctgggggccacctgcccagccacggcagcggccgcggggccctgcccggccctgcccggggcgtgcccaccggccccagccacagcgacagcggccgcagcagcagcagcaagagcacaggcagcctgggcggccgggtggccggcggcctgctgggcagcggcacccgggccagcccagacagcagcagctgtggggagaggagccccccacctcctcctcctccacccagtgatgaggccctgctgcactgtgtgctggagggcaagctgcgggaccgggaggccgagctgcagcagctgcgggacagcctggatgaaaatgaggccaccatgtgccaggcctatgaggagcggcagaggcactggcagcgggagcgggaggccctgcgggaggactgtgccgcccaggcccagagggcccagagggcccagcagctgctgcagctgcaggtgttccagctgcagcaggagaagaggcagctgcaggatgactttgcccagctgctgcaggagcgggagcagctggagcggcgctgtgccaccctggagcgggagcagcgggagctgggcccccggctggaggagaccaagtgggaggtgtgccagaagtctggagagatcagcctgctgaagcagcagctgaaggagagccaggccgagctggtgcagaagggcagcgagctggtggccctgcgggtggccctgcgggaggcccgggccaccctgcgggtgtctgagggccgggcccggggcctgcaggaggccgcccgggcccgggagctggagctggaggcctgcagccaggagctgcagaggcaccggcaggaggccgagcagctgcgggagaaggccggccagctggatgctgaggccgccggcctgcgggagccccctgtgcccccagccacagctgaccccttcctgctggccgagagtgatgaggccagcgccacagccaaccctgtgcaccggcgcttccagcccaccccagcccggggagctgggaagaagaagggcctgccccccctgcacatccccccagaccccaaggcccgggagagccagatggccccagctgccccagatgtgcctgcccacatcggcggccagggccgggcctgggcccgcttccctggcctgagcagcgctgccagcctgctggagtag

SEQ ID NO: 18917 - DNA, 1473 bp, synthetic construct
  source 1..1473: mol_type = other DNA; note = Synthetic coding sequence
atgaatggagccctggaccacagcgaccagcctgaccctgatgccatcaagatgtttgtgggccagatccccaggtcctggagcgagaaggagctgaaggagctgtttgagccctatggagctgtgtaccagatcaacgtgctgcgggacaggagccagaaccccccccagagcaagggctgctgctttgtgaccttctacaccaggaaggccgccctggaggcccagaatgccctgcacaacatcaagaccctgcccggcatgcaccaccccatccagatgaagccagctgacagcgagaagagcaatgctgtggaggacaggaagctgttcatcggcatggtgtccaagaagtgcaatgaaaatgacatccgggtgatgttcagccccttcggccagatcgaggagtgccgcatcctgcggggcccagatggcctgagccggggctgtgcctttgtgaccttcagcacccgggccatggcccagaatgccatcaaggccatgcaccagagccagaccatggagggctgcagcagccccatcgtggtgaagtttgctgacacccagaaggacaaggagcagaggcggctgcagcagcagctggcccagcagatgcagcagctgaacacagccacctggggcaacctgaccggcctgggcggcctgaccccccagtacctggccctgctgcagcaggccaccagcagcagcaacctgggcgccttcagcggcatccagcagatggccggcatgaatgccctgcagctgcagaacctggccaccctggccgctgctgctgctgctgcccagaccagcgccaccagcaccaatgccaaccccctgagcaccaccagcagcgccctgggcgccctgaccagccctgtggccgccagcacccccaacagcacagctggggccgccatgaacagcctgaccagcctgggcaccctgcagggcctggccggggccaccgtgggcctgaacaacatcaatgccctggccgtggcccagatgctgagcggcatggccgccctgaatggaggcctgggcgccaccggcctgaccaacggcacagctggcaccatggatgccctgacccaggcctacagcggcatccagcagtatgctgctgctgccctgcccaccctgtacagccagagcctgctgcagcagcagagcgctgctggcagccagaaggagggccctgagggcgccaacctcttcatctaccacctgccccaggagtttggagaccaggacatcctgcagatgttcatgccctttggaaatgtcatcagcgccaaggtgttcatcgacaagcagaccaacctgagcaagtgcttcggctttgtgtcctatgacaaccctgtgtctgcccaggccgccatccaggccatgaatggcttccagatcggcatgaagaggctgaaggtgcagctgaagaggagcaagaatgacagcaagccctactag

SEQ ID NO: 18918 - DNA, 627 bp, synthetic construct
  source 1..627: mol_type = other DNA; note = Synthetic coding sequence
atggccgcctctgtggagcagcgggagggcaccatccaggtgcagggccaggccctcttcttccgggaggccctgcccggcagcggccaggcccgcttctctgtgctgctgctgcacggcatccgcttcagcagcgagacctggcagaacctgggcaccctgcaccggctggcccaggccggctacagagctgtggccatcgacctgcccggcctgaagggggagcccccagcccaggagcccctgctgagccagagccgggccagcttcctggccgctgtggtggatgccctggagctgggcccccctgtggtgatcagccccagcctgagcggcatgtacagcctgcccttcctgacagcccctggcagccagctgcccggctttgtgcctgtggcccccatctgcacagacaagatcaatgctgccaactatgcctctgtgaagaccccagccctgattgtgtatggagaccaggaccccatgggccagaccagctttgagcacctgaagcagctgcccaaccaccgggtgctgatcatgaagggggccggccacccctgctacctggacaagccagaggagtggcacacaggcctgctggacttcctgcagggcctgcagtag

SEQ ID NO: 18919 - DNA, 546 bp, synthetic construct
  source 1..546: mol_type = other DNA; note = Synthetic coding sequence
atggagagccgctctgtggcccaggccggcgtgcagtggtgtgacctgggcagcctgcagcccccacctcctggcttcaagcagttctcctacttcagcctgcagagctcctgggactaccgctacgtgcccccctgcccagccaactttgtgttcctggtggagatgggcttcctgcacgtggaccaggccggcctgaagctgctgaccagcggcatcgactttgccaccaggaagatcgccaagctgctgaagccccagaaggtgattgagcagaatggagacagcttcaccatccacaccaacagcagcctgaggaactactttgtgaagttcaaggtgggggaggagtttgatgaggacaacagaggcctggacaacaggaagtgcaagagcctggtgatctgggacaatgaccggctgacctgcatccagaagggggagaagaagaacagaggctggacccactggattgaaggagacaagctgcacctggagatgttctgtgagggccaggtgtgcaagcagaccttccagagggcctag

SEQ ID NO: 18920 - DNA, 1647 bp, synthetic construct
  source 1..1647: mol_type = other DNA; note = Synthetic coding sequence
atgtctgccagcctgaactacaagagcttcagcaaggagcagcagaccatggacaacctggagaagcagctgatctgccccatctgcctggagatgttcaccaagcctgtggtgatcctgccctgccagcacaacctgtgcaggaaatgtgccagtgacatcttccaggccagcaacccctacctgcccacccggggcggcaccaccatggccagcggcggccgcttccgctgccccagctgcagacatgaggtggtgctggacagacatggagtgtatggcctgcagaggaacctgctggtggagaacatcatcgacatctacaagcaggagagcaccaggcctgagaagaagagtgaccagcccatgtgtgaggagcacgaggaggagcgcatcaacatctactgcctgaactgtgaggtgcccacctgcagcctgtgcaaggtgtttggagcccacaaggactgccaggtggcccccctgacccacgtgttccagaggcagaagtctgagctgagtgatggcatcgccatcctggtgggcagcaatgacagagtgcagggcgtcatcagccagctggaggacacctgcaagaccatcgaggagtgctgcaggaagcagaagcaggagctgtgtgagaagtttgactacctgtatggcatcctggaggagaggaagaatgagatgacccaggtgatcaccaggacccaggaggagaagctggagcacgtgcgggccctgatcaagaagtacagcgaccacctggagaatgtgtccaagctggtggagagcggcatccagttcatggatgagcctgagatggctgtgttcctgcagaatgccaagaccctgctgaagaagatcagcgaggccagcaaggccttccagatggagaagattgagcacggctatgagaacatgaaccacttcaccgtgaacctgaaccgggaggagaagatcatccgggagattgacttctacagagaagatgaagatgaggaggaggaggagggcggggagggggagaaggagggggagggggaggtgggcggggaggccgtggaggtggaggaggtggagaatgtgcagacagagttccctggagaagatgaaaatcctgagaaggccagcgagctgagccaggtggagctgcaggccgcccctggggccctgcctgtgagcagccctgagcccccaccagccctgcccccagctgctgatgcccctgtgacccagggcgaggtggtgcccaccggcagcgagcagaccacagagagcgagacccctgtgcctgctgctgctgagacagctgaccccctcttctaccccagctggtacaagggccagaccaggaaggccaccaccaaccccccctgcaccccaggcagcgagggcctgggccagatcggccccccaggcagcgaggacagcaatgtgaggaaggccgaggtggccgctgctgctgccagcgagagagctgctgtgtctgggaaggagaccagcgccccagctgccaccagccagattggatttgaggccccacccctgcagggccaggccgccgccccagccagcggcagcggggctgacagcgagcccgcccggcacatcttctccttctcctggctgaacagcctgaatgaatag

SEQ ID NO: 18921 - DNA, 1374 bp, synthetic construct
  source 1..1374: mol_type = other DNA; note = Synthetic coding sequence
atgttccccaagttcagcctgcgctccatgttccacggggccggcggcggcaatgacatccagtggtgcttcagccaggtgaagggagctgtggatgatgatgtggccgaggccgacatcatcagcacagtggagttcaaccacagcggggagctgctggccactggagacaagggcggccgggtggtgatcttccagcaggagcaggagaacaagatccagagccacagcagaggagagtacaacgtgtacagcaccttccagagccatgagcctgagtttgactacctgaagagcctggagattgaggagaagatcaacaagatccgctggctgccccagaagaatgctgcccagttcctgctgagcaccaatgacaagaccatcaagctgtggaagatcagcgagcgggacaagaggcctgagggctacaacctgaaggaggaggatggccgctacagagaccccaccaccgtgaccaccctgcgggtgcctgtgttccggcccatggacctgatggtggaggccagcccccggcgcatctttgccaatgcccacacctaccacatcaacagcatcagcatcaacagcgactatgagacctacctgtctgcagatgacctgcgcatcaacctgtggcacctggagatcacagaccgctccttcaacatcgtggacatcaagccagccaacatggaggagctgacagaggtgatcacagctgctgagttccaccccaacagctgcaacacctttgtgtacagcagcagcaagggcaccatccggctgtgtgacatgagggccagcgccctgtgtgacagacacagcaagctgtttgaggagcctgaggaccccagcaacagaagcttcttcagcgagatcatcagcagcatcagtgatgtgaagttcagccacagcggccgctacatgatgacccgggactacctgtctgtgaagatctgggacctgaacatggagaacagacctgtggagacctaccaggtgcatgagtacctgcggagcaagctgtgcagcctgtatgaaaatgactgcatctttgacaagtttgagtgctgctggaatggaagtgacagcgtggtgatgacaggcagctacaacaacttcttcaggatgtttgacaggaacaccaagagggacatcaccctggaggccagccgggagaacaacaagcccaggacagtgctgaagcccaggaaggtgtgtgccagcggcaagaggaagaaggatgagatctctgtggacagcctggacttcaacaagaagatcctgcacacagcctggcaccccaaggagaacatcatcgctgtggccaccaccaacaacctgtacatcttccaggacaaggtgaactag

SEQ ID NO: 18922 - DNA, 738 bp, synthetic construct
  source 1..738: mol_type = other DNA; note = Synthetic coding sequence
atggccggcctggagctgctgagtgaccagggctacagagtggatggaagaagagctggggagctgaggaagatccaggccaggatgggcgtgtttgcccaggctgatggcagcgcctacatcgagcagggcaacaccaaggccctggccgtggtgtatggcccccatgagatccggggcagccgggcccgggccctgcctgaccgggccctggtgaactgccagtacagcagcgccaccttcagcactggagagaggaagaggcggccccatggagacaggaagagctgtgagatgggcctgcagctgcggcagacctttgaagctgccatcctgacccagctgcaccccaggagccagattgacatctacgtgcaggtgctgcaggctgatggcggcacctacgccgcctgtgtgaatgctgccaccctggccgtgctggatgctggcatccccatgagggactttgtgtgtgcctgcagcgctggctttgtggatggaacagccctggccgacctgagccacgtggaggaggccgccggcggcccccagctggccctggccctgctgcctgccagcggccagatcgccctgctggagatggatgcccggctgcacgaggaccacctggagcgggtgctggaggccgccgcccaggccgccagagatgtgcacaccctgctggacagagtggtgcggcagcacgtgcgggaggccagcatcctgctgggggactag

SEQ ID NO: 18923 - DNA, 2631 bp, synthetic construct
  source 1..2631: mol_type = other DNA; note = Synthetic coding sequence
atgatggctgatggagctgctgctggggccggcggcagccccagcctgcgggagctgcgggccaggatggtggccgccgccaatgagatcgccaaggagaggaggaagcaggatgtggtgaacagagtggccacccacagcagcaacatccgcagcaccttcaagcctgtgattgatggctccatgctgaagaatgacatcaagcagaggctggcccgggagcggcgggaggagaagaggcggcagcaggatgccaacaaggagacccagctgctggagaaggagaggaagaccaagctgcagtatgagaagcagatggaggagcggcagaggaagctgaaggagaggaaggagaaggaggagcagaggagaattgctgctgaggagaagaggcaccagaaggatgaggcccagaaggagaagttcaccgccatcctgtaccgcaccctggagcggcggcggctggctgatgactaccagcagaagcgctggagctggggcggcagcgccatggccaacagcgagagcaagacagccaacaagaggtctgccagcacagagaagctggagcagggcaccagcgccctgatccggcagatgcccctgagcagcgctggcctgcagaacagcgtggccaagaggaagacagacaaggagaggagcagcagcctgaacagaagagacagcaacctgcacagcagcacagacaaggagcaggccgagaggaagccccgggtgactggagtgaccaactacgtgatgcagtatgtgacagtgcccctgaggaagtgcaccagtgatgagctgcgggctgtgatgttccccatgagcaccatgaagatccccccccagaccaaggtggaggagagccccctggagaaggtggagaccccacccaaggcctctgtggatgccccaccccaggtgaatgtggaggtgttctgcaacacctccatggaggccagccccaaggccggcgtgggcatggcccctgaggtgtccacagacagcttccctgtggtgtctgtggatgtgtcccctgtggtgtccacctatgacagcgagatgtccatggatgccagccctgagctgagcattgaggccctgcccaaggtggacctggagaccgtgcccaaggtgtccatcgtggccagccctgaggccagcctggaggcccctcctgaggtgtccctggaggccctgcctgaggtgtctgtggaggccgcccctgagggcagcctggaggccccacccaagggcagcgctgaggtggcccccaaggagagcgtgaagggcagccccaaggagagcatggaggccagccctgaggccatggtgaaggccagccccaagaccagcctggaggcctccatggaggccagccccaaggccaaggccagagatgcccccaagaagtctgagatggacaagcaggccctgatccccatcgccaagaagaggctgagcagctacacagagtgctacaagtggagcagcagcccagaaaatgcctgtggcctgcccagccccatcagcaccaaccggcagatccagaagaactgcccccccagccccctgcccctcatcagcaagcagagcccccagaccagcttcccctacaagatcatgcccatccagcacaccctgtctgtgcagagcgccagcagcacagtgaagaagaagaaggagaccgtgtccaagaccaccaacagatgtgaggccctgagccagaggcacatgatctatgaggagagcggcaacaagagcacagctggcatcatgaatgctgaggccgccaccaagatcctgacagagctgcggcggctggcccgggagcagcgggagaaggaggaggaggagcggcagcgggaggagatgcagcagagggtcatcaagaagagcaaggacatggccaaggaggccgtgggcggccaggccgaggaccacctgaagctgaaggatggccagcagcagaatgagaccaagaagaagaagggctggctggaccaggaggaccaggaggcccccctgcagaagggagatgccaagatcaaggcccaggaggaggccgacaagaggaagaaggagcacgagcgcatcatgctgcagaacctgcaggagcggctggagaggaagaagagaattgaggagatcatgaagaggaccaggaagacagatgtgaatgccagcaaggtgacagagaccagcagccatgacatctatgaggaggccgaggccgacaatgaggagagtgacaaggacagcctgaatgagatgttccccagcgccatcctgaatggcaccggcagccccaccaagttcaagatgcccttcaacaatgccaagaagatgacccacaagctggtgttcctggaggatggcaccagccaggtgaggaaggagcccaagacctacttcaatggagacctgaagaacttccggcagaagtccatgaaggacaccagcatccaggaggtggtgtcccggcccagcagcaagaggatgaccagccacaccaccaagaccaggaaggcagatgagaccaacaccaccagccgcagcagcgcccagaccaagtctgagggcttccatgacatcctgcccaagagcagtgacaccttccggcagtag

SEQ ID NO: 18924 - DNA, 6291 bp, synthetic construct
  source 1..6291: mol_type = other DNA; note = Synthetic coding sequence
atgtgcagcaccccaggcatgcctgcccctggggccagcctggccctgcgggtgtcctttgtggatgtgcacccagatgtgattcctgtgcagctgtggggcctggtgggggagaggagaggagagtacctgcggctgagccgggagatccaggaggccgccgccacccggggccagtgggccctgggcagcgccagcgccagccctggagagctgtgcctggtgcaggtgggcctgctgtggcaccgctgccgggtggtgtcccggcaggcccaggagagcagggtcttcctgctggatgagggccgcaccatcacagctggagctggcagcctggcccctggccggcgggagttcttcaacctgcccagcgaggtgctgggctgtgtgctggccggcctggtgcctgctggctgtggggccggcagcggggagcccccccagcactggccagcagatgctgtggacttcctgagcaacctgcagggcaaggaggtgcacggctgtgtgctggatgtgctgctgctgcaccggctggtgctgctggaggtgcctgatgtgttccagcagatgagggagctgggcctggcccggcgggtgcctgacagcctcttccgcagcctgctggagcgctacctgacagctgccacagcctctgtgggcagcggcgtgcctgtgctgagccgggtgcccctgaagcagaagcagcccggcctggactacttctacccccagctgcagctgggcgtgacagaagctgtggtgatcacccaggtgtgccacccccaccgcatccactgccagctgcggtctgtgtcccaggagatccaccggctgtctgagagcatggcccaggtgtaccggggcagcactggaactggagatgagaacagcaccagcgccacctgggaggagcgggaggagagcccagacaagccaggcagcccctgtgccagctgtggcctggatggccactggtaccgggccctgctgctggagaccttccggccccagagatgtgcccaggtgctgcacgtggactatggcaggaaggagctggtgtcctgcagcagcctgcgctacctgctgcctgagtacttcaggatgcctgtggtgacctacccctgtgccctgtatggcctgtgggatggcggccggggctggagccgcagccaggtgggggacctgaagaccctcatcctgggcaaggctgtgaatgccaagattgagttctactgcagctttgaacatgtgtactacgtgtccctgtatggagaagatggcatcaacctgaacagagtgtttggagtgcagagctgctgcctggccgacagagtgctgcagagccaggccacagaggaggaggagcctgagaccagccagagccagagccctgctgaggaggtggatgaggagatcagcctgcctgccctgcggagcatccggctgaagatgaatgccttctatgatgcccaggtggagtttgtgaagaaccccagcgagttctggatccggctgaggaagcacaacgtgaccttcagcaagctgatgaggaggatgtgtggcttctacagcagcgccagcaagctggatggagtggtgctgaagccagagccagatgacctgtgctgcgtgaagtggaaggaaaatggctactaccgggccatcgtgaccaagctggatgacaagtctgtggatgtgttcctggtggaccggggcaacagtgaaaatgtggactggtatgatgtgaggatgctgctgccccagttccggcagctgcccatcctggccgtgaagtgcaccctggccgacatctggcccctgggcaagacctggagccaggaggccgtgtccttcttcaagaagacagtgctgcacaaggagctggtgatccacatcctggacaagcaggaccaccagtatgtgattgagatcctggatgagagcaggactggagaggagaacatcagcaaggtgattgcccaggccggctacgccaagtaccaggagtttgagaccaaggagaacatcctggtgaatgcccacagccctggccacgtgagcaaccacttcaccacagagagcaacaagatcccctttgccaagacaggagagggggagcagaaggccaagcgggagaacaagaccacctctgtgtccaaggccctgagtgacaccaccgtggtgaccaacggcagcacagagctggtggtgcaggagaaggtgaagagggcctctgtgtacttccccctgatgcagaactgcctggagatcaagccaggcagcagcagcaaaggagagctggaggtgggcagcacagtggaggtgcgggtgtcctatgtggagaaccctggctacttctggtgccagctgaccaggaacatccagggcctgaagaccctgatgtctgacatccagtactactgcaagaacacagctgccccccaccagaggaacaccctggcctgcctggccaagaggacagtgaaccggcagtggagccgggccctgatcagcggcatccagagcgtggagcacgtgaatgtgacctttgtggactatggagaccgggagatggtgtctgtgaagaacatctacagcatcagcgaggagttcctgaaggtgaaggcccaggccttccgctgcagcctgtacaacctgatccagcctgtgggccagaacccctttgtgtgggatgtgaaggccatccaggccttcaatgagttcatcgacaatgcctggcagaagaacctggagctgaagtgcaccatctttgccctggccagcatcaatgaggagctgttcaacatcgtggacctgctgacccccttccagagcgcctgccacttcctggtggagaagaggctggcccggcctgtgaagctgcagaagcccctggagagctctgtgcagctgcacagctacttctacagcacccatgacatgaagattggcagcgaggagctggtgtacatcacccacattgatgacccctggaccttctactgccagctggccagaaatgccaacatcctggagcagctgagctgcagcatcacccagctgagcaaggtgctgctgaacctgaagaccagccccctgaaccctggcaccctgtgcctggccaagtacacagatggcaactggtaccggggcatcgtgattgagaaggagcccaagaaggtgttctttgtggactttggaaacatctacgtggtgaccagtgatgacctgctgcccatccccagtgatgcctatgatgtgctgctgctgcccatgcaggccgtgcgctgcagcctgagtgacatcccagaccacatccctgaggaggtggtggtgtggttccaggagaccatcctggacaagagcctgaaggccctggtggtggccaaggaccctgatggcaccctcatcatcgagctgtatggagacaacatccagatcagcgccagcatcaacaagaagctgggcctgctgagctacaaggaccgcatcaggaagaaggagagcgaggtgctgtgcagcaccacagagaccctggaggagaagaatgaaaacatgaagctgccctgcacagagtacctgagcaagtctgtgggctacaagctgcccaacaaggagatcctggaggagagctacaagccccagatcaacagcagctacaaggagctgaagctgctgcagagcctgaccaagaccaacctggtgacccagtaccaggacagcgtgggcaacaagaacagccaggtgttccccctgaccacagagaagaaggaggagatctctgctgagacccccctgaagacagcccgggtggaggccaccctgtctgagaggaagattggagacagctgtgacaaggacctgcccctgaagttctgtgagttcccccagaagaccatcatgcctggcttcaagaccaccgtgtatgtgagccacatcaatgacctgagtgacttctacgtgcagctgattgaagatgaagctgagatcagccacctgtctgagcggctgaacagcgtgaagaccaggcctgagtactacgtgggcccccccctgcagagaggagacatgatctgtgctgtgtttcctgaggacaacctgtggtaccgggccgtcatcaaggagcagcagcccaatgacctgctgtctgtgcagttcatcgactatggaaatgtgtctgtggtgcacaccaacaagattggccgcctggacctggtgaatgccatcctgcccggcctgtgcatccactgcagcctgcagggctttgaggtgcctgacaacaagaacagcaagaagatgatgcactacttcagccagaggaccagcgaggccgccatccgctgtgaatttgtgaagttccaggaccgctgggaggtgatcctggctgatgagcacggcatcatcgcagatgacatgatcagccgctatgccctgtctgagaagagccaggtggagctgagcacccaggtgatcaagagcgccagcagcaagtctgtgaacaagagtgacatcgacaccagcgtcttcctgaactggtacaaccctgagaagaagatgatccgggcctatgccaccgtgattgatggccctgagtacttctggtgccagtttgctgacacagagaagctgcagtgcctggaggtggaggtgcagacagctggggagcaggtggccgacagaagaaactgcatcccctgcccctacatcggggacccctgcatcgtgcgctaccgggaggatggccactactaccgggccctgatcaccaacatctgtgaggactacctggtgtctgtgcggctggtggactttggaaatattgaggactgtgtggaccccaaggccctgtgggccatccccagcgagctgctgtctgtgcccatgcaggccttcccctgctgcctgagcggcttcaacatcagcgagggcctgtgcagccaggagggcaatgactacttctatgagatcatcacagaagatgtgctggagatcaccatcctggagatcagaagagatgtgtgtgacatccccctggccatcgtggacctgaagagcaagggcaagagcatcaatgagaagatggagaagtacagcaagacaggcatcaagagcgccctgccctatgagaacatcgacagcgagatcaagcagaccctgggcagctacaacctggatgtgggcctgaagaagctgagcaacaaggctgtgcagaacaagatctacatggagcagcagacagatgagctggccgagatcacagagaaggatgtgaacatcatcggcaccaagcccagcaacttccgggaccccaagacagacaacatctgtgagggctttgagaacccctgcaaggacaagattgacacagaggagctggagggggagctggagtgccacctggtggacaaggccgagtttgatgacaagtacctgatcaccggcttcaacaccctgctgccccacgccaatgagaccaaggagatcctggagctgaacagcctggaggtgcccctgagcccagatgatgagagcaaggagttcctggagctggagagcattgagctgcagaacagcctggtggtggatgaggagaagggggagctgagccctgtgcccccaaatgtgcccctgagccaggagtgtgtgaccaagggggccatggagctgttcaccctgcagctgcccctgagctgtgaggccgagaagcagcctgagctggagctgcccacagcccagctgcccctggatgacaagatggaccccctgagcctgggcgtgtcccagaaggcccaggagagcatgtgcacagaggacatgaggaagagcagctgtgtggagagctttgatgaccagaggaggatgagcctgcacctgcacggggctgactgtgaccccaagacccagaatgagatgaacatctgtgaggaggagtttgtggagtacaagaacagagatgccatcagcgccctgatgcccctcttcagcgaggaggagagcagtgatggcagcaagcacaacaacggcctgcctgaccacatcagcgcccagctgcagaacacctacaccctgaaggccttcaccgtgggcagcaaatgtgtggtgtggagcagcctgaggaacacctggagcaaatgtgagatcctggagacagctgaggagggcaccagggtgctgaacctgagcaatggcatggaggagatcgtgaacccagaaaatgtgtggaatggcatccccaagctggacaagagccccccagagaagaggggcctggaggtgatggagatctag

SEQ ID NO: 18925 - DNA, 690 bp, synthetic construct
  source 1..690: mol_type = other DNA; note = Synthetic coding sequence
atgggcaagagctgcaaggtggtggtgtgtggccaggcctctgtgggcaagaccagcatcctggagcagctgctgtatggcaaccacgtggtgggcagcgagatgattgagacccaggaggacatctacgtgggcagcattgaaacagaccggggcgtgcgggagcaggtgcgcttctatgacacccggggcctgagagatggagctgagctgcccaggcactgcttcagctgcacagatggctacgtgctggtgtacagcacagacagccgggagagcttccagagggtggagctgctgaagaaggagattgacaagagcaaggacaagaaggagggcctgaccctgcccccccggctggagtgcagcggcatgatcacagcccactgcagcctgaacctgccccggctgcgctggagcagctgcctgagccccctgctgcggctgcaggtgaccatcgtggtgctgggcaacaagtgtgacctgcaggagcagaggagagtggaccctgatgtggcccagcactgggccaagtctgagaaggtgaagctgtgggaggtgtctgtggccgaccggcgcagcctgctggagccctttgtgtacctggccagcaagatgacccagccccagagcaagagcgccttccccctgagcaggaagaacaagggcagcggcagcctggatggatag

SEQ ID NO: 18926 - DNA, 2412 bp, synthetic construct
  source 1..2412: mol_type = other DNA; note = Synthetic coding sequence
atggagagcggccccagggctgagctgggcgctggggcccccccagctgtggtggcccggaccccacctgagccccggcccagccctgagggggaccccagccccccacctccacccatgtctgccctggtgcctgacaccccaccagacaccccaccagccatgaagaatgccaccagcagcaagcagctgcccctggagcctgagagccccagcggccaggtgggccccaggcctgccccaccccaggaggagagccccagcagcgaggccaagagccggggccccaccccaccagccatgggccccagagatgcccggcccccccggcgcagcagccagcccagccccacagctgtgcctgccagtgacagcccccccaccaagcaggaggtgaagaaggccggggagcggcacaagctggccaaggagcggcgggaggagcgggccaagtacctggccgccaagaaggctgtgtggctggagaaggaggagaaggccaaggccctgcgggagaagcagctgcaggagaggagaagaaggctggaggagcagaggctgaaggccgagcagaggcgggccgccctggaggagcggcagaggcagaagctggagaagaacaaggagagatatgaagctgccatccagaggtctgtgaagaagacctgggccgagatccggcagcagcgctggagctgggccggggccctgcaccacagcagccctggccacaagaccaacagaagcctgcagctgagcgcctgggagagcagcatcgtggaccggctgatgacccccaccctgtccttcctggcccggagccgctctgctgtgaccctgcccagaaatggccgggaccagggccggggctgtgaccccggccggggccccacctggggccgggccggggccagcctggcccggggcccccagcctgacaggacccaccccagcgctgctgtgcctgtgtgccccaggtctgccagcgccagccccctgaccccctgcagcgtgaccaggtctgtgcaccgctgtgccccagctggggagcggggggagaggaggaagcccaatgccggcggcagccctgcccctgtgagaagaagacctgaggccagccctgtgcagaagaaggagaagaaggacaaggagcgggagaatgagaaggagaagagcgccctggcccgggagaggagcctgaagaagaggcagagcctgcctgccagcccccgggcccggctgagcgccagcacagccagcgagctgagccccaagagcaaggcccggcccagcagccccagcacctcctggcacaggcctgccagcccctgccccagccctggccctggccacaccctgccccccaagccacccagcccccggggcaccacagccagccccaagggccgggtgcggaggaaggaggaggccaaggagagccccagcgctgctggccctgaggacaagagccagagcaagaggcgggccagcaatgagaaggagagcgctgccccagccagccctgcccccagccctgcccccagccccaccccagccccaccccagaaggagcagcccccagctgagacccccacagatgctgctgtgctgaccagccccccagccccagcccctcctgtgacccccagcaagcccatggccggcaccacagaccgggaggaggccacccggctgctggccgagaagaggcggcaggcccgggagcagcgggagcgggaggagcaggagcggcggctgcaggccgagcgggacaagaggatgagggaggagcagctggcccgggaggccgaggcccgggcagagcgggaggccgaggccaggagaagagaggagcaggaggcccgggagaaggcccaggccgagcaggaggagcaggagcggctgcagaagcagaaggaggaggccgaggcccggagccgggaggaggccgagcggcagaggctggagcgggagaagcacttccagcagcaggagcaggagcggcaggagaggaggaagaggctggaggagatcatgaagaggaccaggaagtctgaggtgtctgagaccaagaagcaggacagcaaggaggccaatgccaacggcagcagccctgagcctgtgaaggctgtggaggcccggagccctggcctgcagaaggaggccgtgcagaaggaggagcccatcccccaggagccccagtggagcctgcccagcaaggagctgcctgccagcctggtgaatggcctgcagcccctgcctgcccaccaggagaatggcttcagcaccaacggccccagcggggacaagagcctgagcaggaccccagagaccctgctgccctttgctgaggccgaggccttcctgaagaaggctgtggtgcagagcccccaggtgacagaggtgctgtag

SEQ ID NO: 18927 - DNA, 1125 bp, synthetic construct
  source 1..1125: mol_type = other DNA; note = Synthetic coding sequence
atgagggcccccatgctgcagaagcagcaggcccccaggatggacaccccacctcctgaggagcggctggagaagcagaatgagaagctgaacaaccaggaggaggagacagagttcaaggagctggatggcctgcgggaggccctggccaacctgcggggcctgtctgaggaggagaggtctgagaaggccatgctgcggagccgcatcgaggagcagagccagctgatctgcatcctgaagagaagaagtgatgaggccctggagcgctgccagatcctggagctgctgaatgctgagctggaggagaagatgatgcaggaggccgagaagctgaaggcccagggcgagtacagcaggaagctggaggagcgcttcatgaccctggccgccaaccacgagctgatgctgcgcttcaaggatgagtacaagtctgagaacatcaagctgcgggaggagaatgagaagctgcggctggagaacagcagcctcttcagccaggccctgaaggatgaggaggccaaggtgctgcagctgactgtgcgctgtgaggccctgactggagagctggagaccctgaaggagcgctgtgcccaggatgcctgccaggcccaggcccgggagaaggagctgctggagctgcagagccagcaggcctgcacccacaccaaggagacagagcagctgcggagccagctgcagaccctgaagcagcagcaccagcaggccgtggagcagatcgccaaggccgaggagacccacagcagcctgagccaggagctgcaggcccggctgcagacagtgacccgggagaaggaggagctgctgcagctgagcattgaaagaggcaaggtgctgcagaacaagcaggccgagatctgccagctggaggagaagctggagatcgccaatgaagacaggaagcacgccctggagagatttgagcaggaggccgtggccgtggacagcaacctgcgggtgcgggagctgcagaggaaggtggatggcatccagaaggcctatgatgagctgcggctgcagagcgaggccttcaagaagcacagcctggacctgctgagcaaggagcgggagctgaatggcaagctgcggcacctgagcccctag

SEQ ID NO: 18928 - DNA, 585 bp, synthetic construct
  source 1..585: mol_type = other DNA; note = Synthetic coding sequence
atggaggatggcctgctggagatcatgaccaaggatggaggagacatgcctgcccccctggaggtgtccacagtgcctgctgtgggagatgtgatctctggagagtacaatggaggcatgaaggagctgatggagcacctgaaggcccagctgcaggccctgtttgaagatgtgcgggccatgagaggagccctggatgagcaggccagccacatccaggtgctgagtgatgatgtgtgtgccaaccagagggccatcgtgtccatgtgccagatcatgaccacagccccccggcagggcggcctgggcgtggtgggcggcaagggcagcttccagagcgacccccaggagcctgagacccccagccctggcattggagacagcggcctgctgggccgggaccctgaagatgaggaggaggaggaggaggagaaggagatgcccagccctgccacccccagcagccactgtgagaggcctgagagcccctgtgccggcctgctgggcggagatggccccctggtggagcccctggacatgccagacatcaccctgctgcagctggagggggaggccagcctgtag

SEQ ID NO: 18929 - DNA, 1281 bp, synthetic construct
  source 1..1281: mol_type = other DNA; note = Synthetic coding sequence
atggcccacctgcggggctttgccaaccagcacagccgggtggaccctgaggagctgttcaccaagctggaccgcatcggcaagggcagctttggagaggtgtacaagggcatcgacaaccacaccaaggaggtggtggccatcaagatcatcgacctggaggaggctgaagatgaaattgaggacatccagcaggagatcaccgtgctgagccagtgtgacagcccctacatcacccgctacttcggcagctacctgaagagcaccaagctgtggatcatcatggagtacctgggcggcggcagcgccctggacctgctgaagccaggccccctggaggagacctacatcgccaccatcctgcgggagatcctgaagggcctggactacctgcacagcgagaggaagatccaccgggacatcaaggccgccaacgtgctgctgtctgagcagggagatgtgaagctggccgactttggagtggccggccagctgacagacacccagatcaagaggaacacctttgtgggcacccccttctggatggcccctgaggtgatcaagcagagcgcctatgacttcaaggctgacatctggagcctgggcatcacagccatcgagctggccaagggggagccccccaacagcgacctgcaccccatgagggtgctcttcctgatccccaagaacagcccccccaccctggagggccagcacagcaagcccttcaaggagtttgtggaggcctgcctgaacaaggacccccgcttccggcccacagccaaggagctgctgaagcacaagttcatcacccgctacaccaagaagaccagcttcctgacagagctgattgaccgctacaagcgctggaagtctgagggccatggagaggagagcagcagcgaggacagcgacattgatggagaggctgaagatggagagcagggccccatctggaccttcccccccaccatccggcccagcccccacagcaagctgcacaagggcacagccctgcacagcagccagaagccagctgagcctgtgaagaggcagcccaggagccagtgcctgagcaccctggtgcggcctgtgtttggagagctgaaggagaagcacaagcagagcggcggctctgtgggcgccctggaggagctggagaatgccttcagcctggccgaggagagctgccccggcatcagtgacaagctgatggtgcacctggtggagcgggtgcagcgcttcagccacaacagaaaccacctgaccagcaccaggtag

SEQ ID NO: 18930 - DNA, 1350 bp, synthetic construct
  source 1..1350: mol_type = other DNA; note = Synthetic coding sequence
atgatgctgagcacagagggccgggagggctttgtggtgaaggtgcggggcctgccctggagctgcagcgcagatgaggtgatgaggttcttcagtgactgcaagatccagaatggcaccagcggcatccgcttcatctacacccgggagggccggcccagcggggaggcctttgtggagctggagagcgaggaggaggtgaagctggccctgaagaaggaccgggagaccatgggccaccgctacgtggaggtgttcaagagcaacagcgtggagatggactgggtgctgaagcacacaggccccaacagcccagacacagccaatgatggctttgtgcggctgcggggcctgcccttcggctgcagcaaggaggagatcgtgcagttcttcagcggcctggagatcgtgcccaacggcatgaccctgcctgtggacttccagggccgcagcactggagaggcctttgtgcagtttgccagccaggagattgctgagaaggccctgaagaagcacaaggagcgcatcggccaccgctacatcgagatcttcaagagcagcagagctgaggtgaggacccactatgacccccccaggaagctgatggccatgcagaggcctggcccctatgacaggcctggagctggccggggctacaacagcatcggccgcggggccggctttgagaggatgagaagaggagcctacggcggcggctacggcggctatgatgattatggaggctacaatgatggctacggctttggaagtgaccgcttcggccgggacctgaactactgcttcagcggcatgtctgaccacagatatggagatggcggcagcagcttccagagcaccaccggccactgtgtgcacatgaggggcctgccctaccgggccacagaaaatgacatctacaacttcttcagccccctgaaccccatgagggtgcacattgaaattggaccagatggccgggtgactggagaggctgatgtggagtttgccacccatgaagatgctgtggccgccatggccaaggacaaggccaacatgcagcaccgctacgtggagctgttcctgaacagcacagctggcaccagcggcggggcctatgaccacagctatgtggagctgttcctgaacagcacagctggggccagcggcggggcctacggcagccagatgatgggcggcatgggcctgagcaaccagagcagctatggaggccctgccagccagcagctgagcggcggctacggcggcggctacggcggccagagctccatgagcggctatgaccaggtgctgcaggagaacagcagtgactaccagagcaacctggcctag

SEQ ID NO: 18931 - DNA, 1317 bp, synthetic construct
  source 1..1317: mol_type = other DNA; note = Synthetic coding sequence
atgtgccccaagaatgccagctactacggcaacagagctgccaccctgatgatgctgggccgcttccgggaggccctgggagatgcccagcagagcgtgcggctggatgacagctttgtgcggggccacctgcgggagggcaagtgccacctgagcctgggcaatgccatggccgcctgccgctccttccagagggccctggagctggaccacaagaatgcccaggcccagcaggagttcaagaatgccaatgctgtgatggagtatgagaagattgctgagacagactttgagaagagggacttcaggaaggtggtgttctgcatggaccgggccctggagtttgccccagcctgccaccgcttcaagatcctgaaggccgagtgcctggccatgctgggccgctacccagaggcccagagcgtggccagtgacatcctgaggatggacagcaccaatgctgatgccctgtatgtgcggggcctgtgcctgtactatgaggactgcatcgagaaggctgtgcagttctttgtgcaggccctgaggatggccccagaccacgagaaggcctgcatcgcctgcagaaatgccaaggccctgaaggccaagaaggaggatggcaacaaggccttcaaggagggcaactacaagctggcctatgagctgtacacagaggccctgggcatcgaccccaacaacatcaagaccaatgccaagctgtactgcaacagaggcaccgtgaacagcaagctgaggaagctggatgatgccatcgaggactgcaccaatgctgtgaagctggatgacacctacatcaaggcctacctgcggcgggcccagtgctacatggacacagagcagtatgaggaggccgtgcgggactatgagaaggtgtaccagacagagaagaccaaggagcacaagcagctgctgaagaatgcccagctggagctgaagaagagcaagaggaaggactactacaagatcctgggcgtggacaagaatgcctctgaagatgagatcaagaaggcctacaggaagagggccctgatgcaccacccagacagacacagcggggccagcgctgaggtgcagaaggaggaggagaagaagttcaaggaggtgggggaggccttcaccatcctgagtgaccccaagaagaagaccaggtatgattctggccaggacctggatgaggagggcatgaacatgggagactttgaccccaacaacatcttcaaggccttctttggaggccctgggggcttctcctttgaggccagcggccctggcaacttcttcttccagtttggatag

SEQ ID NO: 18932 - DNA, 165 bp, synthetic construct
  source 1..165: mol_type = other DNA; note = Synthetic coding sequence
atgcctgggaagaaggccaggaagaatgcccagcccagccctgcccgggccccagctgagctggaggtggagtgtgccacccagctgcggagatttggagacaagctgaacttccggcagaagctgctgaacctgatcagcaagctgttctgcagcggcacctag

SEQ ID NO: 18933 - DNA, 1404 bp, synthetic construct
  source 1..1404: mol_type = other DNA; note = Synthetic coding sequence
atggcctctgtggccgccgcccgggctgtgcctgtgggcagcggcctgcggggcctgcagaggaccctgcccctggtggtgatcctgggcgccaccggcaccgggaagagcaccctggccctgcagctgggccagaggctgggcggggagatcgtgtctgctgacagcatgcaggtgtatgagggcctggacatcatcaccaacaaggtgtctgcccaggagcagaggatctgccgccaccacatgatcagctttgtggaccccctggtgaccaactacacagtggtggacttcaggaacagagccacagccctgattgaggacatctttgcccgggacaagatccccatcgtggtgggcggcaccaactactacatcgagagcctgctgtggaaggtgctggtgaacaccaagccccaggagatgggcacagagaaggtgattgacaggaaggtggagctggagaaggaggatggcctggtgctgcacaagaggctgagccaggtggaccctgagatggccgccaagctgcacccccatgacaagaggaaggtggcccggagcctgcaggtgtttgaggagaccggcatcagccacagcgagttcctgcaccggcagcacacagaggagggcggcggccccctgggcggccccctgaagttcagcaacccctgcatcctgtggctgcatgctgaccaggccgtgctggatgagcggctggacaagagggtggatgacatgctggccgccggcctgctggaggagctgcgggacttccaccggcgctacaaccagaagaatgtgtctgagaacagccaggactaccagcacggcatcttccagagcatcggcttcaaggagttccacgagtacctgatcacagagggcaagtgcaccctggagaccagcaaccagctgctgaagaagggcatcgaggccctgaagcaggtgaccaagagatatgccaggaagcagaaccgctgggtgaagaaccgcttcctgagcaggcctggccccatcgtgccccctgtgtatggcctggaggtgtctgatgtgtccaagtgggaggagagcgtgctggagcccgccctggagatcgtgcagagcttcatccagggccacaagcccacagccacccccatcaagatgccctacaatgaagctgagaacaagaggagctaccacctgtgtgacctgtgtgaccgcatcatcattggagaccgggagtgggccgcccacatcaagagcaagagccacctgaaccagctgaagaagagaagaaggctggacagtgatgctgtgaacaccatcgagagccagagcgtgtccccagaccacaacaaggagcccaaggagaagggcagccctggccagaatgaccaggagctgaagtgcagcgtgtag

SEQ ID NO: 18934 - DNA, 558 bp, synthetic construct
  source 1..558: mol_type = other DNA; note = Synthetic coding sequence
atgggcgtgaacctgaccaggagcaacaaggagaccgtgaagcacagtgatgtgctcttcctggccgtgaagccccacatcatccccttcatcctggatgaaattggagcagatgtgcaggcccggcacatcgtggtgtcctgtgccgccggcgtgaccatcagctctgtggagaagaagctgatggccttccagcctgcccccaaggtgatccgctgcatgaccaacacccctgtggtggtgcaggagggcgccaccgtgtatgccaccggcacccacgccctggtggaggatggccagctgctggagcagctgatgagctctgtgggcttctgcacagaggtggaggaggacctgattgatgctgtgacaggcctgagcggcagcggccctgcctaccagagcatggctgaccaggagaagatcagccctgctgccctgaagaagaccctgctggacagagtgaagctggagagccccaccgtgtccaccctgacccccagcagccctgggaagctgctgaccaggagcctggccctgggcggcaagaaggactag

SEQ ID NO: 18935 - DNA, 960 bp, synthetic construct
  source 1..960: mol_type = other DNA; note = Synthetic coding sequence
atgtctgtgggcttcatcggggccggccagctggccatgctgtggaggggggccagccggccccagcaccctgtgggcagccaggacaacagccagctgcccagaaatgagcccgcccacggcgtgcgggcccaggaggatggctgtgagccagacacccagcagcagggagatggagaggcccagaggaggcctgtgtctggctgtgaggcccacatcatccccttcatcctggatgaaattggagcagatgtgcaggcccggcacatcgtggtgtcctgtgccgccggcgtgaccatcagctctgtggagaagaagctgatggccttccagcctgcccccaaggtgatccgctgcatgaccaacacccctgtggtggtgcaggagggcgccaccgtgtatgccaccggcacccacgccctggtggaggatggccagctgctggagcagctgatgagctctgtgggcttctgcacagaggtggaggaggacctgattgatgctgtgacaggcctgagcggcagcggccctgcctatgccttcatggccctggatgccctggctgatggaggagtgaagatgggcctgccccggcggctggccatccagctgggcgcccaggccctgctgggcgccgccaagatgctgctggacagcgagcagcacccctgccagctgaaggacaacgtgtgcagccctggaggagccaccatccacgccctgcacttcctggagagcggcggcttccgcagcctgctgatcaatgctgtggaggccagctgcatccgcacccgggagctgcagagcatggctgaccaggagaagatcagccctgctgccctgaagaagaccctgctggacagagtgaagctggagagccccaccgtgtccaccctgacccccagcagccctgggaagctgctgaccaggagcctggccctgggcggcaagaaggactag

SEQ ID NO: 18936 - DNA, 708 bp, synthetic construct
  source 1..708: mol_type = other DNA; note = Synthetic coding sequence
atgctgagcgccacccggcgggcctgccagctgctgctgctgcacagcctcttccctgtgcccaggatgggcaacagcgccagcaacatcgtgagcccccaggaggccctgcccggcaggaaggagcagacccctgtggccgccaagcaccacgtgaatggaaacagaacagtggagcccttccctgagggcacccagatggctgtgtttggcatgggctgcttctggggcgctgagaggaagttctgggtgctgaagggcgtgtacagcacccaggtgggctttgctgggggctacaccagcaaccccacctacaaggaggtgtgcagcgagaagacaggccacgccgaggtggtgcgggtggtgtaccagcctgagcacatgagctttgaggagctgctgaaggtgttctgggagaaccacgaccccacccagggcatgaggcagggcaatgaccacggcacccagtacagaagtgccatctaccccaccagcgccaagcagatggaggccgccctgagcagcaaagaaaactaccagaaggtgctgtctgagcacggcttcggccccatcaccacagacatccgggagggccagaccttctactatgcagaggactaccaccagcagtacctgagcaagaaccccaacggctactgcggcctgggcggcactggagtgtcctgccctgtgggcatcaagaagtag

SEQ ID NO: 18937 - DNA, 3873 bp, synthetic construct
  source 1..3873: mol_type = other DNA; note = Synthetic coding sequence
atgagcggccccctggagggcgcagatggcggcggggaccccaggcctggagagagcttctgccctgggggcgtgcccagccctggccccccccagcaccggccctgccccggccccagcctggctgatgacacagatgccaacagcaatggcagcagtggaaatgaaagcaatggccacgagagcagaggagccagccagaggagcagccacagcagcagcagtggaaatggcaaggacagcgccctgctggagaccacagagagcagcaagagcaccaacagccagagccccagcccccccagcagcagcatcgcctacagcctgctgagcgccagcagcgagcaggacaaccccagcaccagcggctgcagcagcgagcagagcgcccgggcccggacccagaaggagctgatgacagccctgcgggagctgaagctgcggctgcccccagagcggcggggcaagggccgcagcggcaccctggccaccctgcagtatgccctggcctgtgtgaagcaggtgcaggccaaccaggagtactaccagcagtggagcctggaggagggggagccctgcagcatggacatgagcacctacaccctggaggagctggagcacatcaccagcgagtacaccctgcagaaccaggacaccttctctgtggccgtgtccttcctgaccggcagaattgtgtacatcagcgagcaggccgctgtgctgctgcgctgcaagagagatgtgttccggggcacccgcttcagcgagctgctggccccccaggatgtgggcgtcttctacggcagcacagcccccagccggctgcccacctggggcaccggggccagcgctggcagcggcctgcgggacttcacccaggagaagagcgtcttctgccgcatccggggcggccctgaccgggaccccggcccccgctaccagcccttccggctgaccccctacgtgaccaagatccgggtgtctgatggagccccagcccagccctgctgcctgctgattgctgagcgcatccacagcggctatgaggccccccgcatccccccagacaagaggatcttcaccaccaggcacacccccagctgcctcttccaggatgtggatgaaagagctgcccccctgctgggctacctgccccaggacctgctgggcgcccctgtgctgctcttcctgcaccctgaggaccggcccctgatgctggccatccacaagaagatcctgcagctggccggccagccctttgaccacagccccatccgcttctgtgccagaaatggagaatatgtgaccatggacacctcctgggccggctttgtgcacccctggagcaggaaggtggcctttgtgctgggccgccacaaggtgaggacagcccccctgaatgaagatgtgttcaccccaccagcccccagccctgcccccagcctggacacagacatccaggagctgtctgagcagatccaccggctgctgctgcagcctgtgcacagccccagccccaccggcctgtgtggggtgggcgctgtgaccagccctggccccctgcacagccctggcagcagcagtgacagcaatggaggagatgctgagggccctggccccccagcccctgtgaccttccagcagatctgcaaggatgtgcacctggtgaagcaccagggccagcagctgttcatcgagagccgggcccggccccagagccggccccggctgcctgccaccggcaccttcaaggccaaggccctgccctgccagagcccagaccctgagctggaggccggcagcgcccctgtgcaggcccccctggccctggtgcctgaggaggccgagaggaaggaggccagcagctgcagctaccagcagatcaactgcctggacagcatcctgcgctacctggagagctgcaacctgcccagcaccaccaagaggaaatgtgccagcagcagcagctacaccaccagcagcgccagtgatgatgaccggcagaggacaggccctgtgtctgtgggcaccaagaaggaccccccatctgctgccctgtctggagagggcgccacccccaggaaggagcctgtggtgggcggcaccctgagccccctggccctggccaacaaggccgagagcgtggtgtctgtgaccagccagtgcagcttcagcagcaccatcgtgcacgtgggggacaagaagcccccagagagtgacatcatcatgatggaggacctgcccggcctggcccctggccctgcccccagccctgcccccagccccaccgtggccccagaccctgccccagatgcctacagacctgtgggcctgaccaaggctgtgctgagcctgcacacccagaaggaggagcaggccttcctgagccgcttccgggacctgggccgcctgcggggcctggacagcagcagcacagcccccagcgccctgggggagcggggctgccaccacggccctgccccacccagcagaagacaccactgccgcagcaaggccaagaggagccgccaccaccagaaccccagggctgaggccccctgctacgtgagccaccccagccctgtgccccccagcaccccctggcccaccccaccagccaccacccccttccctgctgtggtgcagccctaccccctgcctgtgttcagcccccggggcggcccccagcccctgcccccagcccccacctctgtgcccccagctgccttccctgcccccctggtgacccccatggtggccctggtgctgcccaactacctgttccccacccccagcagctacccctacggggccctgcagaccccagctgagggcccccccaccccagccagccacagccccagccccagcctgcctgccctggcccccagccccccccacaggccagacagccccctcttcaacagccgctgcagcagccccctgcagctgaacctgctgcagctggaggagctgcccagggctgagggcgctgctgtggccggcggccctggcagcagcgctggccccccaccacccagcgctgaggccgctgagcctgaggcccggctggccgaggtgacagagagcagcaaccaggatgccctgagcggcagcagtgacctgctggagctgctgctgcaggaggacagccgctctggaactggatctgctgccagcggcagcctgggcagcggcctgggcagcggcagcggcagcggcagccatgagggcggcagcaccagcgccagcatcaccaggagcagccagagcagccacaccagcaagtacttcggcagcattgacagcagcgaggccgaggccggggccgcccggggcggcgctgagcccggggaccaggtgatcaagtatgtgctgcaggaccccatctggctgctgatggccaatgctgaccagagggtgatgatgacctaccaggtgcccagccgggacatgacctctgtgctgaagcaggaccgggagcggctgcgggccatgcagaagcagcagccccgcttcagcgaggaccagaggcgggagctgggcgctgtgcacagctgggtgaggaagggccagctgccccgggccctggatgtgatggcctgtgtggactgtggcagcagcacccaggaccccggccacccagatgaccccctcttcagcgagctggatggcctgggcctggagcccatggaggagggcggcggggagcagggcagcagcggcggcggcagcggggagggggagggctgtgaggaggcccagggcggggccaaggccagcagcagccaggacctggccatggaggaggaggaggagggccgcagcagcagcagccctgccctgcccacagctggcaactgcaccagctag

SEQ ID NO: 18938 - DNA, 2022 bp, synthetic construct
  source 1..2022: mol_type = other DNA; note = Synthetic coding sequence
atggagaaggctgtgaatgatggcagccacagcgaggagctgttctgccacctgaagaccatcagcgagaaggaggacctgccccgctgcaccagcgagagccacctgagctgcctgaagcaggacatcctgaatgagaagacagagctggaggccaccctgaaggaggccgagctggtgacccacagcgtggagctgctgctgcccctcttcaaggacaccatcgagaagatcaactttgaaaatgccaacctgagcgccctgaacctgaagatcagcgagcagaaggagatcctgatcaaggagctggacaccttcaagtctgtgaagctggccctggagcacctgctgaggaagagggactacaagcagacaggagacaacctgagctccatgctgctggagaacctgacagacaatgaaagtgagaacaccaacctgaagaagaaggtgtttgagaaggaggcccacatccaggagctgagctgcctcttccagagcgagaaggccaacaccctgaaggccaaccgcttcagccagagcgtgaaggtggtgcatgagcggctgcagatccagatccacaagcgggaggctgaaaatgacaagctgaaggagtatgtgaagagcctggagaccaagatcgccaagtggaacctgcagagcaggatgaacaagaatgaggccatcgtgatgaaggaggccagccggcagaagacagtggccctgaagaaggccagcaaggtgtacaagcagaggctggaccacttcaccggggccatcgagaagctgaccagccagatccgggaccaggaggccaagctgtctgagaccatcagcgccagcaatgcctggaagagccactatgagaagatcgtgattgagaagacagagctggaggtgcagatcgagaccatgaagaagcagatcatcaacctgctggaggacctgaagaagatggaggaccacggcaagaacagctgtgaggagatcctgaggaaggtgcacagcattgaatatgaaaatgagaccctgaacctggagaacaccaagctgaagctgcgcttcccctgccgcatcacagagagcaagaacatgaacatcctgattgtgctggacatgctgtgctacatcagcagcgagaagaccaccctggccgccctgaaggatgaggtggtgtctgtggagaatgagctgtctgagctgcaggaggtggagaagaagcagaagaccctcatcgagatgtacaagacccaggtgcagaagctgcaggaggccgctgagatcgtgaagagccgctgtgagaacctgctgcacaagaacaaccagatcaccaagaccaagaacaagaatgtggagaagatgaggggccagatggagagccacctgaaggagctggagcgggtgtgtgacagcctgacagctgctgagcggcggctgcacgagtgccaggagagcctgcagtgctgcaagggcaaatgtgccgaccaggagcacaccatccgggagctgcagggccaggtggatggcaaccacaacctgctgaccaagctgagcctggaggaggagaactgcctgatccagctgaagtgtgagaacctgcagcagaagctggagcagatggatgctgagaacaaggagctggagaagaagctggccaaccaggaggagtgcctgaagcacagcaacctgaagttcaaggagaagtctgctgagtacacagccctggcccggcagctggaggccgccctggaggagggccggcagaaggtggccgaggagattgagaagatgagcagccgggagagcgccctgcagatcaagatcctggacctggagacagagctgaggaagaagaatgaggagcagaaccagctggtgtgcaagatgaacagcaaggcccagcaccaggaggtgtgcctgaaggaggtgcagaacagcctggagaagtctgagaaccagaatgaaagcatcaagaactacctgcagttcctgaagaccagctatgtgaccatgtttgaatag

SEQ ID NO: 18939 - DNA, 798 bp, synthetic construct
  source 1..798: mol_type = other DNA; note = Synthetic coding sequence
atggatgacaaggcctctgtgggcaagatctctgtgtccagtgacagcgtgtccaccctgaacagtgaagattttgtgctggtgtcccggcagggagatgagacccccagcaccaacaacggcagtgatgatgagaagacaggcctgaagatcgtgggcaatggcagcgagcagcagctgcagaaggagctggctgatgtgctgatggacccccccatggatgaccagcctggagagaaggagctggtgaagaggagccagctggatggagaaggagatggccccctgagcaaccagctgagcgccagcagcaccatcaaccctgtgcccctggtgggcctgcagaagccagagatgagcctgcctgtgaagccaggccagggcgacagcgaggccagcagccccttcacccctgtggctgatgaggacagcgtggtgttcagcaagctgacctacctgggctgtgcctctgtgaatgcccccaggtctgaggtggaggccctgaggatgatgagcatcctgcggagccagtgccagatcagcctggatgtgaccctgtctgtgcccaacgtgtctgagggcatcgtgcggctgctggacccccagaccaacacagaaattgccaactaccccatctacaagatcctcttctgtgtgcggggccatgatggcaccccagagagtgactgctttgccttcacagagagccactacaatgctgagctgttccgcatccacgtgttccgctgtgagatccaggaggccgtgagcccccaggagaagaccctgtgcaagtag

SEQ ID NO: 18940 - DNA, 636 bp, synthetic construct
  source 1..636: mol_type = other DNA; note = Synthetic coding sequence
atgtgggccagcctgagcctggaccaccccagcgccaaggagaaccaggccctgcggctgattgagatgagggaggagaatggaaatgtgcccaagacagagcaggccggcagcctgaagcccctgcgggacaccgggaagagcaacctgaaggagaagaaggccaacagcaagctgaagcagatcgagaaggagtacacccagaagctggccaagagcagccagatcatcgccgagctgcagaccaccatcagcagcctgaaggaggagaacagccagcagcagctggccgctgagcggcggctgcaggatgtgcggcagaagtttgaagatgagaagaagcagctgatccgggacaatgaccaggccatcaaggtgctgcaggatgagctggagaacagaagcaaccaggtgcgctgtgccgagaagaagctgcagcacaaggagctggagagccaggagcagatcacctacatccggcaggagtatgagaccaagctgaagggcctgatgcctgccagcctgcggcaggagctggaggacaccatcagcagcctgaagagccaggtgaacttcctgcagaagagggccagcatcctgcaggaggagctgaccacctaccagggcagaagatag

SEQ ID NO: 18941 - DNA, 867 bp, synthetic construct
  source 1..867: mol_type = other DNA; note = Synthetic coding sequence
atgagcagctccatgtggtacatcatgcagagcatccagagcaagtacagcctgtctgagcggctcatccgcaccatcgccgccatccgctccttcccccatgacaacgtggaggacctgatccggggcggcgcagatgtgaactgcacccacggcaccctgaagcccctgcactgtgcctgcatggtgtctgatgctgactgtgtggagctgctgctggagaagggagctgaggtgaatgccctggatggctacaacagaacagccctgcactatgctgctgagaaggatgaggcctgtgtggaggtgctgctggagtatggagccaaccccaatgccctggatggcaacagagacacccccctgcactgggccgccttcaagaacaatgcagaatgtgtgcgggccctgctggagagcggggcctctgtgaatgccctggactacaacaatgacacccccctgtcctgggccgccatgaagggcaacctggagagcgtgtccatcctgctggactatggagctgaggtgcgggtcatcaacctgattggccagacccccatcagccggctggtggccctgctggtgcggggcctgggcacagagaaggaggacagctgctttgagctgctgcacagagctgtgggccactttgagctgaggaagaatggcaccatgccccgggaggtggcccgggacccccagctgtgtgagaagctgactgtgctgtgcagcgcccctggcaccctgaagaccctggcccgctatgctgtgagaagaagcctgggcctgcagtacctgcctgatgctgtgaagggcctgcccctgcctgccagcctgaaggagtacctgctgctgctggagtag

SEQ ID NO: 18942 - DNA, 1341 bp, synthetic construct
  source 1..1341: mol_type = other DNA; note = Synthetic coding sequence
atgagggagatcgtgcacatccaggccggccagtgtggcaaccagatcggcaccaagttctgggaggtgatcagtgatgagcacggcatcgaccctgctgggggctacgtgggggacagcgccctgcagctggagcgcatcaacgtgtactacaatgaaagcagcagccagaagtatgtgcccagggctgccctggtggacctggagcccggcaccatggattctgtgcgcagcggccccttcggccagctgttccggccagacaacttcatcttcggccagacaggagctggcaacaactgggccaagggccactacacagaaggagctgagctggtggatgctgtgctggatgtggtgaggaaagaatgtgagcactgtgactgcctgcagggcttccagctgacccacagcctgggcggcggcactggaagtggcatgggcaccctgctgatcagcaagatccgggaggagttcccagaccgcatcatgaacaccttctctgtgatgcccagccccaaggtgtctgacacagtggtggagccctacaatgccaccctgtctgtgcaccagctggtggagaacacagatgagacctactgcatcgacaatgaggccctgtatgacatctgcttccgcaccctgaagctgaccacccccacctacggggacctgaaccacctggtgtctgccaccatgtctggagtgaccaccagcctgcgcttccctggccagctgaatgctgacctgaggaagctggccgtgaacatggtgcccttcccccggctgcacttcttcatgcctggctttgcccccctgaccagccggggcagccagcagtaccgggccctgactgtgcctgagctgacccagcagatgtttgatgccaggaacatgatggccgcctgtgaccccaggcatggccgctacctgactgtggccaccgtcttccggggccccatgtccatgaaggaggtggatgagcagatgctggccatccagagcaagaacagcagctactttgtggagtggatccccaacaacgtgaaggtggccgtgtgtgacatccccccccggggcctgaagatggccagcaccttcatcggcaacagcacagccatccaggagctgttcaagaggatcagcgagcagttcagcgccatgttccggaggaaggccttcctgcactggttcaccggggagggcatggatgagatggagttcacagaagctgagagcaacatgaatgacctggtgtctgagtaccagcagtaccaggatgccacagccaatgatggagaggaggcctttgaagatgaggaggaggagattgatggatag

SEQ ID NO: 18943 - DNA, 792 bp, synthetic construct
  source 1..792: mol_type = other DNA; note = Synthetic coding sequence
atgctgagcagcaagggcctgactgtggtggatgtgtaccagggctggtgtggcccctgcaagcctgtggtgtccctcttccagaagatgagaattgaggtgggcctggacctgctgcactttgccctggccgaggccgaccggctggatgtgctggagaagtaccggggcaaatgtgagcccaccttcctgttctacgccatcaaggatgaggccctgagtgatgaagatgaatgtgtgagccacggcaagaacaacggggaggatgaggacatggtgtcctctgagaggacctgcaccctggccatcatcaagccagatgctgtggcccacggcaagacagatgagatcatcatgaagatccaggaggccggctttgagatcctgaccaatgaggagaggaccatgacagaagctgaggtgcggctcttctaccagcacaaggccggggaggaggcctttgagaagctggtgcaccacatgtgcagcggccccagccacctgctgatcctgaccaggacagagggctttgaagatgtggtgaccacctggaggacagtgatgggcccccgggaccccaacgtggcccggcgggagcagcctgagagcctgcgggcccagtatggaacagagatgcccttcaatgctgtgcacggcagccgggaccgggaggatgctgaccgggagctggccctgctcttccccagcctgaagttcagtgacaaggacacagaggccccccagggcgagagcagcacccagccccggctgaagatcacagacctggactag

SEQ ID NO: 18944 - DNA, 1089 bp, synthetic construct
  source 1..1089: mol_type = other DNA; note = Synthetic coding sequence
atgctgaagaacaagggccacagcagcaagaaggacaacctggccgtgaatgctgtggccctgcaggaccacatcctgcatgacctgcagctgaggaacctgtctgtggccgaccacagcaagacccaggtgcagaagaaggagaacaagagcctgaagagggacaccaaggccatcatcgacaccggcctgaagaagaccacccagtgccccaagctggaggacagcgagaaggagtatgtgctggaccccaagcccccacccctgaccctggcccagaagctgggcctcatcggccccccacctccacccctgagcagtgatgagtgggagaaggtgaagcagaggagcctgctgcagggcgacagcgtgcagccctgccccatctgcaaggaggagtttgagctgcggccccaggtgctgctgagctgcagccacgtgttccacaaggcctgcctgcaggcctttgagaagttcaccaacaagaagacctgccccctgtgcaggaagaaccagtaccagaccagggtcatccatgatggagcccggctcttccgcatcaagtgtgtgacccgcatccaggcctactggaggggctgtgtggtgaggaagtggtacagaaacctgaggaagacagtgcccccaacagatgccaagctgaggaagaagttctttgagaagaagttcacagagatcagccaccgcatcctgtgcagctacaacaccaacatcgaggagctgtttgctgagattgaccagtgcctggccatcaacagatctgtgctgcagcagctggaggagaagtgtggccacgagatcacagaggaggagtgggagaagatccaggtgcaggccctgcggcgggagacccatgagtgcagcatctgcctggcccccctgtctgctgctgggggccagagggtgggcgccggccgccgcagccgggagatggccctgctgagctgcagccacgtgttccaccacgcctgcctgctggccctggaggagttctctgtgggggacaggcctcccttccacgcctgccccctgtgccgcagctgctaccagaagaagatcctggagtgctag

SEQ ID NO: 18945 - DNA, 291 bp, synthetic construct
  source 1..291: mol_type = other DNA; note = Synthetic coding sequence
atgattgagaagatgcagggcagcaggatggatgagcagcgctgcagcttccccccacccctgaagacagaggaggactacatcccctaccccagcgtgcatgaggtgctgggccgggagggccccttccccctcatcctgctgccccagtttggaggctactggattgagggcaccaaccacgagatcaccagcatccctgagacagagcccctgcagagccccaccaccaaggtgaagctggagtgcaaccccacagcccgcatctacaggaagcacttcctgggctag

SEQ ID NO: 18946 - DNA, 459 bp, synthetic construct
  source 1..459: mol_type = other DNA; note = Synthetic coding sequence
atggccggcctgccccggcgcatcatcaaggagacccagaggctgctggccgagcctgtgcccggcatcaaggccgagccagatgagagcaatgcccgctacttccacgtggtgattgctggcccccaggacagcccctttgaaggaggcaccttcaagctggagctgttcctgcctgaggagtaccccatggccgcccccaaggtgcgcttcatgaccaagatctaccaccccaacgtggacaagctgggccgcatctgcctggacatcctgaaggacaagtggagccctgccctgcagatcagaacagtgctgctgagcatccaggccctgctgagcgcccccaacccagatgaccccctggccaatgatgtggccgagcagtggaagaccaatgaggcccaggccattgaaacagcccgggcctggacccggctgtatgccatgaacaacatctag

SEQ ID NO: 18947 - DNA, 3354 bp, synthetic construct
  source 1..3354: mol_type = other DNA; note = Synthetic coding sequence
atgtaccgcagcagcgcccggagctctgtgagcagccaccggcccaaggatgatggcggcggcggccccaggagcggccgcagcagcggcagcagcagcggccctgcccggcgcagcagccccccacctccacccagcggcagcagcagcaggaccccagcccggcggcccaggagccccagcggccaccggggccggcgggccagccccagccccccccggggccggcgggtgagccccagccccccccgggcccggcggggcagccccagccccccccggggccggcggctcttccccccaggccctgctggcttccggggcagcagcagaggagagagcagagctgactatgccagagatggccgcggggaccaccctggggacagcggcagcagaagaagaagccctggcctgtgcagcgacagcctggagaagagcctgcgcatcaccgtgggcaatgaccacttctgtgtgtccaccccagagcggcggcggctgagtgaccggctgggcagccctgtggacaacctggaggacatggacagagatgacctgacagatgacagcgtcttcaccaggagcagccagtgcagccggggcctggagcgctacatcagccaggaggagggccccctgagccccttcctgggccagctggatgaggactaccgcaccaaggagaccttcctgcacagaagtgactacagcccccacatcagctgccatgatgagctgctgcggggcacagagaggaaccgggagaagctgaagggctacagcatccgctctgaggagaggagccgggaggccaagaggcccaggtatgatgacacagtgaagatcaacagcatgggcggggaccaccccagcttcaccagcggcaccaggaactaccggcagaggagaagaagccccagcccccgcttcctggaccctgagttccgggagctggacctggcccggaggaagcgggaggaggaggaggagaggagccgcagcctgagccaggagctggtgggcgtggatggcggcggcaccggctgcagcatccctggcctgtctggagtgctgacagccagcgagcccggctacagcctgcacaggcctgaggaggtgtctgtgatgcccaagaagagcatcctgaagaagagaattgaggtggacatcatggagcccagcatgcagctggagagcttcagcagcagcaccagcagcagccaggaccaccccctgtacagcggccaccccagcctgcccctgagcggggccatcgccgcctttgccagcgagattgaaaataaaggcaccatggtggagacagccctgaaggagccccagggcaacctgtaccagtggggccccctgcccggcatccccaaggacaacagccccctgcgggagaagtttggcagcttcctgtgccacaaggacaacctggacctgaaggccgagggccctgagcggcacacagacttcctgctgccccatgagcgggccagccaggacggcagcggcttcagccgcatcctgtccatgctggccgacagcaccagcacccaggagaagagaagaagaagcttcccagacattgaagatgaggagaagttcctgtatggagatgaggaggaggacctgaaggccgagagcgtgcccaagcccctgggcagcagcgagagcgaggtgatgaggcagaaggccagcagcctgcccagcagcgccccagctgtgaagctggagagcctggaggagaccaacccagaatatgccaagatccatgacctgctgaagaccatcggcctggacattggagtggccgagatcagccagctggccgcccggacccaggagcggctgcacggcaagaagcccagcctgcggagcagcgctgaccggcgcagctctgtggaccgctacttctctgctgaccactgcagctctgtggaccaccgcttctctgctgaccgctgcagctctgtggaccactgcttctctgctgaccggcgcagcagtgacccccaccggctggagagccgggaggcccaccacagcaacacccacagccctgaggtgagccacccccacccccccagccctgtggacccctacctgctgaccaagaacagcccccccttcctgaagagtgaccaccctgtgggccacatcagcggccctgaggtggtgggcagcggcttccagagctctgtggccgtgcgctgcatgctgcccagcgcccccagcgcccccatccggctgccccacacagctgccctgagccagttccacatgccccgggccagccagtttgctgctgcccgcatcccccccaactaccagggccctgccatccccccagccagctttgatgcctaccgccactacatggcctatgctgccagccgctggcccatgtaccccaccagccagcccagcaaccaccctgtgcctgagccccaccgcatcatgcccatcaccaagcaggccaccaggagccggcccaacctgcgggtcatccccaccgtgaccccagacaagcccaagcagaaggagagcctgcggggcagcatcccagctgcccaggtgcctgtgcaggtgtccatccccagcctcatccgctacaaccctgagaagatcagtgatgagaagaacagagccagccagaagcagaaggtgattgaggagcgggagaagctgaagaatgaccgggaggcccggcagaagaagatgtactacctgaggacagagctggagcggctgcacaagcagcagggcgagatgctgaggaagaagagaagagagaaggatggccacaaggaccccctgctggtggaggtgtcccggctgcaggacaacatcatgaaggacattgctgagctgcggcaggaggccgaggaggccgagaagaagcagagcgagctggacaaggtggcccagatcctgggcatcaacatctttgacaagagccagaagagcctgagtgacagccgggagcccacagagaagccaggcaaggccgagaagagcaagagccctgagaaggtgagcagcttcagcaacagcagcagcaacaaggagagcaaggtgaacaatgagaagttccgcaccaagagccccaagccagctgagagcccccagagcgccaccaagcagctggaccagcccacagctgcctatgagtactatgatgctggcaaccactggtgcaaggactgcaacaccatctgtggcaccatgtttgacttcttcacccacatgcacaacaagaagcacacccagggccagttccagaagagcagtgacttccagaaggagggcctgcagcagaccttcctgcccccagagcggcagggctag

SEQ ID NO: 18948 - DNA, 576 bp, synthetic construct
  source 1..576: mol_type = other DNA; note = Synthetic coding sequence
atgtatgtgtgcctgtgtgtgtctgtggccaaggtgaccatggctgacagagctgctgctgagcgggcctgcaaggaccccaaccccatcattgatggcaggaaggccaacgtgaacctggcctacctgggcgccaagccccgcatcatgcagcccggctttgccttcggcgtgcagcagctgcacccagccctgatccagaggcccttcggcatcccagcccactacgtgtacccccaggcctttgtgcagcccggggtggtgatcccccacgtgcagcccacagctgctgctgccagcaccaccccctacatcgactacaccggggccgcctatgcccagtacagcgctgctgctgctgctgctgctgctgctgctgcctatgaccagtacccctatgctgccagccctgctgctgctggctacgtgacagctgggggctacggctatgctgtgcagcagcccatcacagctgctgcccctggaacagctgctgctgctgctgctgctgctgctgctgctgctgccttcggccagtaccagccccagcagctgcagacagacaggatgcagtag

SEQ ID NO: 18949 - DNA, 330 bp, synthetic construct
  source 1..330: mol_type = other DNA; note = Synthetic coding sequence
atggccggggcccccaccgtgtccctgcctgagctgcggagcctgctggccagcggccgggcccggctgtttgatgtgcgcagccgggaggaggccgccgccggcaccatccctggggccctgaacatccctgtgtctgagctggagagcgccctgcagatggagcctgctgccttccaggccctgtacagcgctgagaagcccaagctggaggatgagcacctggtgttcttctgccagatgggcaagaggggcctgcaggccacccagctggcccggagcctgggctacacaggctacggggaggtgtggctgctggccggccgctag

SEQ ID NO: 18950 - DNA, 630 bp, synthetic construct
  source 1..630: mol_type = other DNA; note = Synthetic coding sequence
atggccctgctggccgagcacctgctgaagcccctgcctgctgacaagcagatcgagaccggccccttcctggaggccgtgagccacctgccccccttctttgactgcctgggcagccctgtgttcacccccatcaaggctgacatcagcggcaacatcaccaagatcaaggctgtgtatgacaccaacccagccaagttccgcaccctgcagaacatcctggaggtggagaaggagatgtatggagctgagtggcccaaggtgggcgccaccctggccctgatgtggctgaagaggggcctgcgcttcatccaggtgttcctgcagagcatctgtgatggagagagagatgagaaccaccccaacctgatccgggtgaatgccaccaaggcctatgagatggccctgaagaagtaccacggctggatcgtgcagaagatcttccaggccgccctgtatgctgccccctacaagagtgacttcctgaaggccctgagcaagggccagaatgtgacagaggaggagtgcctggagaagatccgcctcttcctggtgaactacacagccaccattgatgtgatctatgagatgtacacccagatgaatgctgagctgaactacaaggtgtag

SEQ ID NO: 18951 - DNA, 474 bp, synthetic construct
  source 1..474: mol_type = other DNA; note = Synthetic coding sequence
atggaggaggcccagaggaagaggacccagctgcgggaggcctttgagcagctgcaggccaagaagcagatggccatggagaagagaagagctgtgcagaaccagtggcagctgcagcaggagaagcacctgcagcacctggccgaggtgtctgctgaggtgcgggagaggaagacaggcacccagcaggagctggacagagtcttccagaagctgggcaacctgaagcagcaggccgagcaggagcgggacaagctgcagcgctaccagaccttcctgcagctgctgtacaccctgcagggcaagctgctcttccctgaggccgaggccgaggccgagaacctgcctgatgacaagccccagcagcccacccggccccaggagcagagcactggagacaccatgggccgggaccccggggtgtccttcaaggctgtgggcctgcagcctgctggagatgtgaacctgccctag

SEQ ID NO: 18952 - DNA, 639 bp, synthetic construct
  source 1..639: mol_type = other DNA; note = Synthetic coding sequence
atggaggtgctgcggcgcagctctgtgtttgctgctgagatcatggatgcctttgacaggagccccacagacaaggagctggtggcccaggccaaggccctgggccgggagtatgtgcacgcccggctgctgcgggccggcctgtcctggagcgcccctgagcgggccgcccctgtgcccggccgcctggccgaggtgtgtgctgtgctgctgcggctgggagatgagctggagatgatccggcccagcgtgtacagaaatgtggcccggcagctgcacatcagcctgcagagcgagcctgtggtgacagatgccttcctggccgtggccggccacatcttctctgctggcatcacctggggcaaggtggtgtccctgtatgctgtggccgccggcctggccgtggactgtgtgcggcaggcccagcctgccatggtgcacgccctggtggactgcctgggggagtttgtgaggaagaccctggccacctggctgcggaggagaggaggctggacagatgtgctgaagtgtgtggtgtccacagatcctggcctgcggagccactggctggtggccgccctgtgcagctttggccgcttcctgaaggccgccttctttgtgctgctgcctgagaggtag

SEQ ID NO: 18953 - DNA, 2148 bp, synthetic construct
  source 1..2148: mol_type = other DNA; note = Synthetic coding sequence
atgagccagagcggggctgtgtcctgctgccctggggccaccaacggcagcctgggccgcagtgatggagtggccaagatgagccccaaggacctgtttgagcagaggaagaagtacagcaacagcaatgtcatcatgcatgagaccagccagtaccacgtgcagcacctggccaccttcatcatggacaagtctgaggccatcacctctgtggatgatgccatcaggaagctggtgcagctgagcagcaaggagaagatctggacccaggagatgctgctgcaggtgaatgaccagagcctgcggctgctggacatcgagagccaggaggagctggaggacttccccctgcccaccgtgcagaggagccagacagtgctgaaccagctgcgctaccccagcgtgctgctgctggtgtgccaggacagcgagcagagcaagccagatgtgcacttcttccactgtgatgaggtggaggccgagctggtgcatgaagatattgaaagtgccctggccgactgccgcctgggcaagaagatgaggccccagaccctgaagggccaccaggagaagatccggcagaggcagagcatcctgcccccaccccagggccctgcccccatccccttccagcaccggggcggggacagccctgaggccaagaacagagtgggcccccaggtgcccctgtctgagcccggcttcagaagaagagagagccaggaggagcccagggctgtgctggcccagaagattgagaaggagacccagatcctgaactgtgccctggatgacatcgagtggtttgtggcccggctgcagaaggctgctgaggccttcaagcagctgaaccagaggaagaagggcaagaagaagggcaagaaggccccagctgagggcgtgctgaccctgcgggcccggccccccagcgagggggagttcatcgactgcttccagaagatcaagctggccatcaacctgctggccaagctgcagaagcacatccagaaccccagcgctgctgagctggtgcacttcctgtttggccccctggacctgattgtgaacacctgcagcggccctgacatcgcccggtctgtgtcctgccccctgctgagcagagatgctgtggacttcctgcggggccacctggtgcccaaggagatgagcctgtgggagagcctgggggagagctggatgaggcccaggtctgagtggccccgggagccccaggtgcccctgtatgtgcccaagttccacagcggctgggagccccctgtggatgtgctgcaggaggccccctgggaggtggagggcctggccagcgcccccatcgaggaggtgtcccctgtgtcccggcagagcatccggaacagccagaagcacagccccaccagcgagcccaccccacctggagatgccctgccccctgtgagcagcccccacacccaccggggctaccagcccaccccagccatggccaagtatgtgaagatcctgtatgacttcaccgccagaaatgccaatgagctgtctgtgctgaaggatgaggtgctggaggtgctggaggatggccggcagtggtggaagctgcggagccgcagcggccaggccggctacgtgccctgcaacatcctgggggaggcccggccagaagatgctggggccccctttgagcaggccggccagaagtactggggccctgccagccccacccacaagctgccccccagcttccctggcaacaaggatgagctgatgcagcacatggatgaggtgaatgatgagctgatcaggaagatcagcaacatccgggcccagccccagaggcacttccgggtggagaggagccagcctgtgtcccagcccctgacctatgagagcggcccagatgaggtgcgggcctggctggaggccaaggccttcagcccccgcatcgtggagaacctgggcatcctgaccggcccccagctgttcagcctgaacaaggaggagctgaagaaggtgtgtggggaggagggcgtgcgggtgtacagccagctgaccatgcagaaggccttcctggagaagcagcagagcggcagcgagctggaggagctgatgaacaagttccacagcatgaaccagaggagaggagaggacagctag

SEQ ID NO: 18954 - DNA, 600 bp, synthetic construct
  source 1..600: mol_type = other DNA; note = Synthetic coding sequence
atggcctggccctgcatcagccggctgtgctgcctggcccggcgctggaaccagctggacagaagtgatgtggccgtgcccctgaccctgcacggctacagcgacctggacagcgaggagcccggcactggaggagctgccagcagaagaggccagcccccagctggggcccgggacagcggcagagatgtgcccctgacccagtaccagagggactttggcctgtggaccaccccagctggccccaaggaccccccacctggccggggccctggagctgggggccggcggggcaagagcagcgcccagagcagcgcccccccagcccctggggcccggggcgtgtatgtgctgcccatcggagatgctgatgctgctgctgctgtgaccaccagctaccggcaggagttccaggcctggacaggagtgaagcccagccgcagcaccaagaccaagccagcccgggtcatcaccacccacaccagcggctgggacagcagccctggggccggcttccaggtgcctgaggtgaggaagaagttcacccccaaccccagcgccatcttccaggccagcgccccccgcatcctgaatgtgtag

SEQ ID NO: 18955 - DNA, 5106 bp, synthetic construct
  source 1..5106: mol_type = other DNA; note = Synthetic coding sequence
atgggcaacagcgacagccagtacaccctgcagggcagcaagaaccacagcaacaccatcactggagccaagcagatcccctgcagcctgaagatccggggcatccacgccaaggaggagaagagcctgcacggctggggccacggcagcaatggagctggctacaagagccgcagcctggcccggagctgcctgagccacttcaagagcaaccagccctatgccagccggctgggcggccccacctgcaaggtgtcccggggcgtggcctacagcacccacaggaccaatgcccctgggaaggacttccagggcatctctgctgccttcagcacagaaaatggcttccacagcgtgggccacgagctggccgacaaccacatcaccagccgggactgcaatggccacctgctgaactgctatggaagaaatgaaagcatcgccagcaccccacctggagaggacaggaagagcccccgggtgctgatcaagaccctgggcaagctggatggctgcctgcgggtggagttccacaatggaggcaaccccagcaaggtgcctgctgaggactgcagcgagcctgtgcagctgctgcgctacagccccaccctggccagcgagaccagccctgtgcctgaggcccggcggggcagcagcgctgacagcctgcccagccaccggcccagccccacagacagccggctgcggagcagcaagggcagcagcctgagcagcgagagctcctggtatgacagcccctggggcaatgctggggagctgtctgaggccgagggcagcttcctggcccctggcatgccagaccccagcctgcacgccagcttccccccaggagatgccaagaagcccttcaaccagagcagcagcctgagcagcctgcgggagctgtacaaggatgccaacctgggcagcctgagccccagcggcatccggctgagtgatgagtacatgggcacccacgccagcctgagcaacagagtgtcctttgccagtgacattgatgtgcccagccgggtggcccatggagaccccatccagtacagcagcttcaccctgccctgcaggaagcccaaggcctttgtggaggacacagccaagaaggacagcctgaaggccaggatgaggcgcatcagtgactggacaggcagcctgagcaggaagaagaggaagctgcaggagcccaggagcaaggagggcagtgactactttgacagcagaagtgatggcctgaacacagatgtgcagggcagcagccaggccagcgccttcctgtggagcggcggcagcacccagatcctgagccagaggtctgagagcacccacgccatcggcagtgaccccctgcggcagaacatctatgagaacttcatgagggagctggagatgagcaggaccaacacagagaacatcgagaccagcacagaaacagctgagagcagcagcgagagcctgagcagcctggagcagctggacctgctgtttgagaaggagcagggcgtggtgaggaaggccggctggctgttcttcaagcccctggtgacagtgcagaaggagaggaagctggagctggtggcccggaggaagtggaagcagtactgggtgaccctgaagggctgcaccctgctcttctatgagacctacggcaagaacagcatggaccagagcagcgccccccgctgtgccctgtttgctgaagattccatcgtgcagagcgtgcctgagcaccccaagaaggaaaatgtgttctgcctgagcaacagctttggagatgtgtacctgttccaggccaccagccagacagacctggagaactgggtgacagctgtgcacagcgcctgtgccagcctgtttgccaagaagcacggcaaggaggacaccctgcggctgctgaagaaccagaccaagaacctgctgcagaagattgacatggacagcaagatgaagaagatggccgagctgcagctgtctgtggtgtctgaccccaagaacaggaaggccatcgagaaccagatccagcagtgggagcagaacctggagaagttccacatggacctcttcaggatgcgctgctacctggccagcctgcagggcggggagctgcccaaccccaagagcctgctggccgccgccagccggcccagcaagctggccctgggccgcctgggcatcctgtctgtgagcagcttccacgccctggtgtgcagcagagatgattctgccctgaggaagaggaccctgagcctgacccagagaggaagaaacaagaagggcatcttcagcagcctgaagggcctggacaccctggccaggaagggcaaggagaagaggcccagcatcacccaggtggatgagctgctgcacatctacggcagcacagtggatggagtgccccgggacaatgcctgggagatccagacctacgtgcacttccaggacaaccacggcgtgacagtgggcatcaagccagagcaccgggtggaggacatcctgaccctggcctgcaagatgaggcagctggagcccagccactacggcctgcagctgaggaagctggtggatgacaacgtggagtactgcatcccagccccctatgagtacatgcagcagcaggtgtatgatgaaattgaggtgttccccctgaatgtgtatgatgtgcagctgaccaagacaggctctgtgtgtgactttggatttgctgtgacagcccaggtggatgagcggcagcacctgagccgcatcttcatcagtgatgtgctgcctgatggcctggcctatggagagggcctgaggaaaggaaatgagatcatgaccctgaatggagaggccgtgtctgacctggacctgaagcagatggaggccctcttcagcgagaagtctgtgggcctgaccctgattgcccggcccccagacaccaaggccaccctgtgcacctcctggagcgacagcgacctcttcagccgggaccagaagagcctgctgcccccacccaaccagagccagctgctggaggagttcctggacaacttcaagaagaacacagccaatgacttcagcaatgtgcctgacatcaccaccggcctgaagaggagccagacagatggcaccctggaccaggtgagccaccgggagaagatggagcagaccttccgctctgctgagcagatcacagccctgtgccgctccttcaatgacagccaggccaacggcatggagggcccccgggagaaccaggaccccccacccaggagcctggcccggcacctgagtgatgctgaccggctgaggaaggtgatccaggagctggtggacacagagaagagctatgtgaaggacctgagctgcctgtttgagctgtacctggagcccctgcagaatgagaccttcctgacccaggatgagatggagagcctgtttggcagcctgcctgagatgctggagttccagaaggtgttcctggagaccctggaggatggcatcagcgccagcagtgacttcaacaccctggagacccccagccagttcaggaagctgctcttcagcctgggcggcagcttcctgtactatgctgaccacttcaagctgtacagcggcttctgtgccaaccacatcaaggtgcagaaggtgctggagcgggccaagacagacaaggccttcaaggccttcctggatgccaggaaccccaccaagcagcacagcagcaccctggagagctacctgatcaagcctgtgcagagggtgctgaagtaccccctgctgctgaaggagctggtgtccctgacagaccaggagagcgaggagcactaccacctgacagaggccctgaaggccatggagaaggtggccagccacatcaatgagatgcagaagatctatgaggactatggcaccgtgtttgaccagctggtggccgagcagagcggcacagagaaggaggtgacagagctgtccatgggagagctgctgatgcacagcacagtgtcctggctgaaccccttcctgagcctgggcaaggccaggaaggacctggagctgactgtgtttgtgttcaagagagctgtgatcctggtgtacaaggagaactgcaagctgaagaagaagctgcccagcaacagcaggcctgcccacaacagcacagacctggaccccttcaagttccgctggctgatccccatcagcgccctgcaggtgcggctgggcaacccagctggaacagagaacaacagcatctgggagctgatccacaccaagtcagaaattgagggccggcctgagaccatcttccagctgtgctgcagcgacagcgagagcaagaccaacatcgtgaaggtgatccgcagcatcctgcgggagaacttcagaagacacatcaagtgtgagctgcccctggagaagacctgcaaggaccggctggtgcccctgaagaacagagtgcctgtgtctgccaagctggccagcagccgcagcctgaaggtgctgaagaacagcagcagcaatgagtggacaggagagaccgggaagggcaccctgctggacagtgatgagggcagcctgagcagcggcacccagagcagcggctgccccacagctgagggccggcaggacagcaagagcaccagccctgggaagtacccccaccctggcctggccgactttgctgacaacctgatcaaggagagtgacatcctgagtgatgaagatgatgaccaccggcagacagtgaagcagggcagccccaccaaggacatcgagatccagttccagaggctgcgcatcagtgaagatcctgatgtgcaccctgaggccgagcagcagcccggccctgagagcggggagggccagaagggcggggagcagcccaagctggtgcggggccacttctgccccatcaagaggaaggccaacagcaccaagagggaccggggcaccctgctgaaggcccagatccgccaccagagcctggacagccagagtgaaaatgccaccatcgacctgaacagcgtgctggagcgggagttctctgtgcagagcctgacctctgtggtgtctgaggagtgcttctatgaaacagagagccacggcaagagctag

SEQ ID NO: 18956 - DNA, 3177 bp, synthetic construct
  source 1..3177: mol_type = other DNA; note = Synthetic coding sequence
atggacctgggccccctgaacatctgtgaggagatgaccatcctgcacggcggcttcctgctggccgagcagctgttccaccccaaggccctggccgagctgaccaagagtgactgggagcgggtgggccggcccatcgtggaggccctgcgggagatcagcagcgctgctgcccacagccagccctttgcctggaagaagaaggccctgatcatcatctgggccaaggtgctgcagccccaccctgtgacccccagcgacacagagacccgctggcaggaggacctcttcttctctgtgggcaacatgatccccaccatcaaccacaccatcctgtttgagctgctgaagagcctggaggccagcggcctcttcatccagctgctgatggccctgcccaccaccatctgccacgccgagctggagcgcttcctggagcacgtgacagtggacaccagcgcagaagatgtggccttcttcctggatgtgtggtgggaggtgatgaagcacaagggccacccccaggaccccctgctgagccagttcagcgccatggcccacaagtacctgcctgccctggatgagttcccccacccccccaagaggctgcggagtgaccctgatgcctgccccaccatgcccctgctggccatgctgctgcggggcctgacccagatccagagccgcatcctgggccctggcaggaagtgctgtgccctggccaacctggccgacatgctgactgtgtttgccctgacagaagatgacccccaggaggtgtctgccaccgtgtacctggacaagctggccaccgtcatctctgtgtggaacagcgacacccagaacccctaccaccagcaggccctggccgagaaggtgaaggaggccgagagagatgtgtccctgaccagcctggccaagctgcccagcgagaccatctttgtgggctgtgagttcctgcaccacctgctgcgggagtggggcgaggagctgcaggccgtgctgcggagcagccagggcaccagctatgacagctaccgcctgtgtgacagcctgaccagcttcagccagaatgccaccctgtacctgaacagaaccagcctgagcaaagaagatcggcaggtggtgtctgagctggctgaatgtgtgcgggacttcctgaggaagaccagcacagtgctgaagaacagagccctggaggacatcacagccagcatcgccatggctgtgatccagcagaagatggacagacacatggaggtgtgctacatctttgccagcgagaagaagtgggccttcagtgatgagtgggtggcctgcctgggcagcaacagagccctcttccggcagcctgacctggtgctgcggctgctggagaccgtgattgatgtgtccacagctgaccgggccatccctgagagccagatccggcaggtgatccacctgatcctggagtgctacgccgacctgagcctgcccgggaagaacaaggtgctggccggcatcctgcgctcctggggcaggaagggcctgtctgagaagctgctggcctacgtggagggcttccaggaggacctgaacaccaccttcaaccagctgacccagagcgccagcgagcagggcctggccaaggctgtggcctctgtggcccggctggtgattgtgcaccctgaggtgacagtgaagaagatgtgcagcctggccgtggtgaacctgggcacccacaagttcctggcccagatcctgacagccttccctgccctgcgctttgtggaggagcagggccccaacagcagcgccaccttcatggtgtcctgcctgaaggagaccgtgtggatgaagttcagcacccccaaggaggagaagcagttcctggagctgctgaactgcctgatgagccctgtgaagccccagggcatccctgtggccgccctgctggagccagatgaggtgctgaaggagtttgtgctgcccttcctgcggctggatgtggaggaggtggacctgagcctgcgcatcttcatccagaccctggaggccaatgcctgccgggaggagtactggctgcagacctgcagccccttccccctgctcttcagcctgtgccagctgctggaccgcttcagcaagtactggcagctgcccaaggagaagcgctgcctgagcctggacaggaaggacctggccatccacatcctggagctgctgtgtgaaattgtgtctgccaatgctgagaccttctccccagatgtgtggatcaagagcctgtcctggctgcacaggaagctggagcagctggactggacagtgggcctgcggctgaagagcttctttgagggccacttcaagtgtgaggtgcctgccaccctgtttgagatctgcaagctgtctgaagatgagtggaccagccaggcccaccctggctatggagctggcaccggcctgctggcctggatggagtgctgctgcgtgagcagcggcatcagcgagaggatgctgagcctgctggtggtggatgtgggcaaccctgaggaggtgcggctcttcagcaagggcttcctggtggccctggtgcaggtgatgccctggtgcagcccccaggagtggcagaggctgcaccagctgacccggcggctgctggagaagcagctgctgcacgtgccctacagcctggagtacatccagtttgtgcccctgctgaacctgaagccctttgcccaggagctgcagctgtctgtgctcttcctgcggaccttccagttcctgtgcagccacagctgccgggactggctgcccctggagggctggaaccacgtggtgaagctgctgtgtggcagcctgacccggctgctggacagcgtgcgggccatccaggccgccggcccctgggtgcagggccctgagcaggacctgacccaggaggccctgtttgtgtacacccaggtgttctgccacgccctgcacatcatggccatgctgcaccctgaggtgtgtgagcccctgtatgtgctggccctggagaccctgacctgctatgagaccctgagcaagaccaaccccagcgtgagcagcctgctgcagagggcccacgagcagcgcttcctgaagagcattgctgagggcatcggccctgaggagcggcggcagaccctgctgcagaagatgagcagcttctag

SEQ ID NO: 18957 - DNA, 267 bp, synthetic construct
  source 1..267: mol_type = other DNA; note = Synthetic coding sequence
atgagcggcctgcgggtgtacagcacctctgtgacaggcagccgggagatcaagagccagcagagcgaggtgacccgcatcctggatggcaagaggatccagtaccagctggtggacatcagccaggacaatgccctgagagatgagatgagggccctggccggcaaccccaaggccaccccaccccagatcgtgaatggagaccagtactgcggcgtgtgggccggcggccggggcggcggcggctctgtgggccggggcctgtag

SEQ ID NO: 18958 - DNA, 933 bp, synthetic construct
  source 1..933: mol_type = other DNA; note = Synthetic coding sequence
atggatggcagctttgtgcagcacagcgtgcgggtgctgcaggagctgaacaagcagcgggagaagggccagtactgtgatgccaccctggatgtgggcggcctggtgttcaaggcccactggagcgtgctggcctgctgcagccacttcttccagagcctgtatggagatggcagcggcggctctgtggtgctgcctgctggctttgctgagatcttcggcctgctgctggacttcttctacacaggccacctggccctgaccagcggcaacagagaccaggtgctgctggccgcccgggagctgcgggtgcctgaggccgtggagctgtgccagagcttcaagcccaagacctctgtgggccaggccgccggcggccagagcggcctgggccccccagccagccagaatgtgaacagccacgtgaaggagcccgccggcctggaggaggaggaggtgtccaggaccctgggcctggtgccccgggaccaggagccccggggcagccacagcccccagaggccccagctgcacagccctgcccagagcgagggccccagcagcctgtgtgggaagctgaagcaggccctgaagccctgccccctggaggacaagaagccagaggactgcaaggtgcccccccggcccctggaggccgagggcgcccagctgcagggcggcagcaatgagtgggaggtggtggtgcaggtggaggatgatggagatggagactacatgtctgagcctgaggccgtgctgaccaggaggaagagcaatgtcatcaggaagccctgtgccgctgagcccgccctgtctgctggcagcctggccgctgagcctgctgagaacagaaaaggaacagctgtgcctgtggagtgccccacctgccacaagaagttcctgagcaagtactacctgaaggtgcacaactag

SEQ ID NO: 18959 - DNA, 600 bp, synthetic construct; identical to SEQ ID NO: 18469
  source 1..600: mol_type = other DNA; note = Synthetic coding sequence

SEQ ID NO: 18960 - DNA, 513 bp, synthetic construct
  source 1..513: mol_type = other DNA; note = Synthetic coding sequence
atgtctgtggccggcggggagatccggggggacacaggaggagaggacacagctgcccctggccgcttctccttcagccctgagcccaccctggaggacatccggcggctgcatgctgagtttgctgctgagcgggactgggagcagttccaccagcccaggaacctgctgctggccctggtgggggaggtgggggagctggccgagctgttccagtggaagacagatggagagcccggcccccagggctggagcccccgggagcgggccgccctgcaggaggagctgagtgatgtgctgatctacctggtggccctggccgcccgctgccgggtggacctgcccctggccgtgctgagcaagatggacatcaacagaagacgctacccagcccacctggcccggagcagcagcaggaagtacacagagctgccccacggggccatcagcgaggaccaggccgtgggccctgctgacatcccctgtgacagcacaggccagaccagcacctag

SEQ ID NO: 18961 - DNA, 702 bp, synthetic construct
  source 1..702: mol_type = other DNA; note = Synthetic coding sequence
atgtctgccaagagagctgagctgaagaagacccacctgagcaagaactacaaggctgtgtgcctggagctgaagccagagcccaccaagacctttgactacaaggctgtgaagcaggagggccgcttcaccaaggccggcgtgacccaggacctgaagaatgagctgcgggaggtgcgggaggagctgaaggagaagatggaggagatcaagcagatcaaggacctgatggacaaggactttgacaagctgcatgaatttgtggagatcatgaaggagatgcagaaggacatggatgagaagatggacatcctgatcaacacccagaagaactacaagctgcccctgcggcgggcccccaaggagcagcaggagctgcggctgatgggcaagacccaccgggagccccagctgcggcccaagaagatggatggagccagcggcgtgaatggagccccctgtgccctgcacaagaagaccatggccccccagaagaccaagcagggcagcctggaccccctgcaccactgcggcacctgctgtgagaagtgcctgctgtgtgccctgaagaacaactacaacagaggcaacatccccagcgaggccagcggcctgtacaagggcggggaggagcctgtgaccacccagcccagcgtgggccatgctgtgcctgcccccaagagccagacagagggccgctag

SEQ ID NO: 18962 - DNA, 2196 bp, synthetic construct
  source 1..2196: mol_type = other DNA; note = Synthetic coding sequence
atgtctgtgaccctgacctctgtgaagagggtgcagagcagccccaacctgctggccgccggccgggacagccagagcccagattctgcctggaggagctacaatgatggcaaccaggagaccctgaatggagatgccacctacagcagcctggccgccaagggcttccgctctgtgcggcccaacctgcaggacaagaggagccccacccagagccagatcaccgtgaatggaaacagcggcggcgctgtgagccccatgagctactaccagaggcccttcagccccagcgcctacagcctgcctgccagcctgaacagcagcatcgtgatgcagcacggcaccagcctggacagcacagacacctacccccagcacgcccagagcctggatggcaccaccagcagcagcatccccctgtaccgcagcagcgaggaggagaagagggtgaccgtcatcaaggccccccactacccaggcatcggccctgtggatgaaagtggcatccccacagccatccgcaccaccgtggaccggcccaaggactggtacaagaccatgttcaagcagatccacatggtgcacaagccagatgatgacacagacatgtacaacaccccctacacctacaatgccggcctgtacaaccccccctacagcgcccagagccaccctgctgccaagacccagacctaccggcccctgagcaagagccacagcgacaacagccccaatgccttcaaggatgccagcagccctgtgcccccaccccacgtgcccccacctgtgccccccctgcggccccgggacaggagcagcacagagaagcatgactgggaccccccagacaggaaggtggacaccaggaagttccgctctgagcccaggagcatctttgaatatgagcccgggaagagcagcatcctgcagcacgagcggcccccacccctgcccaccacccccacccctgtgccccgggagcccggcaggaagcccctgagcagcagccggctgggggaggtgacaggcagccccagccccccacccaggtctggggcccccacccccagcagccgggccccagccctgagccccacccggccccccaagaagcccctggactatgtgcaggaccacagcagtggagtcttcaatgaggccagcctgtaccagagcagcattgacaggagcctggagcggcccatgagcagcgcctccatggccagtgacttcaggaagaggaggaagtctgagcctgctgtgggccccccccggggcctgggggaccagagcgccagcaggaccagccctggccgggtggacctgcccggcagcagcaccaccctgaccaagagcttcaccagcagcagccccagcagccccagccgggccaaggaccgggagagccccaggagctacagcagcaccctgacagacatgggccgcagcgccccccgggagcggcggggcaccccagagaaggagaagctgcctgccaaggctgtgtatgacttcaaggcccagaccagcaaggagctgtccttcaagaagggggacacagtgtacatcctgaggaagattgaccagaactggtatgaaggagagcaccacggccgggtgggcatcttccccatctcctatgtggagaagctgaccccacctgagaaggcccagcctgcccggcccccacctccagcccagcccggggagattggagaggccatcgccaagtacaacttcaatgctgacaccaacgtggagctgagcctgaggaagggggacagagtcatcctgctgaagagggtggaccagaactggtatgagggcaagatccctggcaccaaccggcagggcatcttccctgtgtcctatgtggaggtggtgaagaagaacaccaagggagctgaggactacccagacccccccatcccccacagctacagcagtgaccgcatccacagcctgagcagcaacaagccccagaggcctgtgttcacccatgagaacatccagggcggcggggagcccttccaggccctgtacaactacaccccaagaaatgaagatgagctggagctgcgggagagtgatgtgattgatgtgatggagaagtgtgatgatggctggtttgtgggcaccagcaggaggaccaagttcttcggcaccttccctggcaactacgtgaagaggctgtag

SEQ ID NO: 18963 - DNA, 969 bp, synthetic construct
  source 1..969: mol_type = other DNA; note = Synthetic coding sequence
atgaccctggaggccatccgctacagccggggcagcctgcagatcctggaccagctgctgctgcccaagcagagccgctatgaagctgtgggctctgtgcaccaggcctgggaggccatccgggccatgaaggtgcggggggccccagccatcgccctggtgggctgcctgagcctggccgtggagctgcaggccggggccggcggccctggcctggccgccctggtggcctttgtgcgggacaagctgtccttcctggtgacagcccggcccacagctgtgaacatggcccgggccgcccgggacctggctgatgtggccgcccgggaggccgagcgggagggcgccacagaggaggccgtgcgggagcggcgggagacagagctgtgtgagcactgggaggagcacacccggcagcgggagctgcccctgcggggccccctgggcggcaccgtgctggagacccggccctacaaccagggcgcccggctgacagcctttgagctggtgtatgagcagatcccagccaccctcatcacagacagcatggtggccgccgccatggcccaccggggcgtgtctgctgtggtggtgggcgctgacagagtggtggccaacggggacacagccaacaaggtgggcacctaccagctggccatcgtggccaagcaccacggcatccccttctacgtggccgcccccagcagcagctgtgacctgcggctggagaccgggaaggagatcatcatcgaggagcggcccggccaggagctgacagatgtgaatggagtgagaattgctgcccctggcattggagtgtggaacccagcctttgatgtgacccctcatgacctgatcactggaggcatcatcacagagctgggcgtgtttgcccctgaggagctgaggacagccctgaccaccaccatcagcagcagagatggcaccctggatggcccccagatgtag

SEQ ID NO: 18964 - DNA, 5169 bp, synthetic construct
  source 1..5169: mol_type = other DNA; note = Synthetic coding sequence
atgggcaaccaggacggcaagctgaagaggtctgctggagatgccctgcatgaaggaggcggcggcgcagaagatgccctgggccccagagatgtggaggccaccaagaagggcagcggcggcaagaaggccctgggcaagcacggcaagggcggcggcggcggcggcggcggcggggagagcggcaagaagaagagcaagagtgacagccgggcctctgtgttcagcaacctgcgcatcaggaagaacctgagcaagggcaagggggccggcggcagcagagaagatgtgctggacagccaggccctgcagacaggagagctggacagcgcccacagcctgctgaccaagaccccagacctgagcctgtctgcagatgaggccggcctgagtgacacagaatgtgccgacccctttgaggtgacaggccctgggggccctggccctgctgaggcccgggtgggcggccggcccatcgcagaagatgtggagacagctgctggggcccaggacggccagaggaccagcagcggcagtgacacagacatctacagcttccacagcgccacagagcaggaggacctgctgagtgacatccagcaggccatccggctgcagcagcagcagcagcagcagctgcagctgcagctgcagcagcagcagcagcagcagcagctgcagggcgctgaggagcctgctgccccacccacagctgtgagcccccagcccggggccttcctgggcctggaccgcttcctgctgggccccagcggcggggccggggaggcccctggcagcccagacacagagcaggccctgagcgccctgagtgacctgcctgagagcctggccgctgagccccgggagccccagcagccccccagccctgggggcctgcctgtgtctgaggcccccagcctgcctgctgcccagcctgctgccaaggacagccccagcagcacagccttccccttccctgaggccggccctggagaggaggccgccggggcccctgtgcggggggccggggacacagatgaggagggggaggaggatgcctttgaagatgccccccggggcagccctggagaggagtgggcccctgaggtgggggaggatgccccccagaggctgggggaggagcctgaggaggaggcccagggcccagatgccccagctgctgccagcctgcccggcagccctgcccccagccagcgctgcttcaagccctaccccctcatcaccccctgctacatcaagaccaccacccggcagctgagcagccccaaccacagccccagccagagccccaaccagagcccccgcatcaagagaagacctgagcccagcctgagccggggcagcaggacagccctggcctctgtggccgccccagccaagaagcacagagcagatggcggcctggccgccggcctgagccgctctgctgactggacagaggagctgggcgcccggaccccccgggtgggcggcagcgcccacctgctggagcggggcgtggccagtgacagcggcggcggcgtgtccccagccctggccgccaaggccagcggggccccagctgctgctgatggcttccagaatgtgttcaccggccgcaccctgctggagaagctgttcagccagcaggagaatggccccccagaggaggccgagaagttctgcagccgcatcatcgccatgggcctgctgctgcccttcagtgactgcttccgggagccctgcaaccagaatgcccagaccaatgctgccagctttgaccaggaccagctgtacacctgggccgctgtgtcccagcccacccacagcctggactacagcgagggccagttcccccggcgggtgcccagcatgggcccccccagcaagcccccagatgaggagcaccggctggaggatgctgagacagagagccagagcgctgtgtctgagaccccccagaagagaagtgatgctgtgcagaaggaggtggtggacatgaagtctgagggccaggccaccgtcatccagcagctggagcagaccatcgaggacctgcggaccaagattgctgagctggagcggcagtacccagccctggacacagaggtggccagcggccaccagggcctggagaatggagtgacagccagcggagatgtgtgcctggaggccctgcggctggaggagaaggaggtgcgccaccaccgcatcctggaggccaagagcatccagaccagccccacagaggagggcggcgtgctgaccctgccccctgtggatggcctgcccggccggcccccctgccccccaggagctgagagcggcccccagaccaagttctgcagcgagatcagcctcatcgtgagcccccggcgcatctctgtgcagctggacagccaccagcccacccagagcatcagccagcccccacctccacccagcctgctgtggagcgctggccagggccagcccggcagccagcccccccacagcatcagcacagagttccagaccagccatgagcacagcgtgtcctctgccttcaagaacagctgcaacatccccagccccccacccctgccctgcacagagagcagcagctccatgcctggcctgggcatggtgcccccacctcctccacccctgcccggcatgacagtgcccaccctgcccagcacagccatcccccagcccccacccctgcagggcacagagatgctgcccccacctcctccacccctgcccggggccggcatccccccacctccacccctgcctggagctggcatcctgcccctgccccccctgcccggggccggcatccccccacctccacccctgcctggagctgccatccccccacctccacccctgcccggggccggcatccccctgcccccacccctgcctggagctggcatccccccacctccacccctgcccggggccggcatccccccacctccacccctgcctggagctggcatccccccacctccacccctgcccggggccggcatccccccacctccacccctgcctggagctggcatccccccacctccacccctgcccggggccggcatccccccacctccacccctgcctggagctggcatccccccacctccacccctgcccggggccggcatccccccacctccacccctgcctggagctggcatccccccacctccacccctgcccggggccggcatccccccacctccacccctgcctggagctggcatccccccacctccacccctgcccggggccggcatccccccacctccacccctgcccggggtgggcatccccccacctccacccctgcccggggccggcatccccccacctccacccctgcctggagctggcatccccccacctccacccctgcccggggccggcatccccccacctccacccctgccccgggtgggcatccccccacctccacccctgcccggggccggcatccccccacctccacccctgcctggagctggcatccccccacctccacccctgcccggggtgggcatccccccacctccacccctgcccggggtgggcatccccccacctccacccctgcccggggccggcatccccccacctccacccctgcccggcatgggcatccccccagccccagccccacccctgcccccacctggcaccggcatccccccaccacccctgctgcctgtgtctggcccccccctgctgccccaggtgggcagcagcaccctgcccaccccccaggtgtgtggcttcctgcccccacccctgcccagcggcctgtttggcctgggcatgaaccaggacaagggcagcaggaagcagcccatcgagccctgccggcccatgaagcccctgtactggacccgcatccagctgcacagcaagagggacagcagcaccagcctcatctgggagaagattgaggagcccagcattgactgccacgagtttgaggagctgttcagcaagacagctgtgaaggagaggaagaagcccatcagtgacaccatcagcaagaccaaggccaagcaggtggtgaagctgctgagcaacaagaggagccaggccgtgggcatcctgatgagcagcctgcacctggacatgaaggacatccagcacgctgtggtgaacctggacaacagcgtggtggacctggagaccctgcaggccctgtatgagaacagagcccagagtgatgagctggagaagattgagaagcacggccgcagcagcaaggacaaggaaaatgccaagagcctggacaagccagagcagttcctgtatgagctgagcctcatccccaacttcagcgagagggtcttctgcatcctcttccagagcaccttcagcgagagcatctgcagcatccggaggaagctggagctgctgcagaagctgtgtgagaccctgaagaatggacctggggtgatgcaggtgctgggcctggtgctggcctttggaaactacatgaatggaggcaacaagacccggggccaggctgatggcttcggcctggacatcctgcccaagctgaaggatgtgaagagcagtgacaacagccgcagcctgctgagctacatcgtgtcctactacctgaggaactttgatgaagatgctgggaaggagcagtgcctcttccccctgcctgagccccaggacctcttccaggccagccagatgaagtttgaggacttccagaaggacctgaggaagctgaagaaggacctgaaggcctgtgaggtggaggccggcaaggtgtaccaggtgagcagcaaggagcacatgcagcccttcaaggagaacatggagcagttcatcatccaggccaagattgaccaggaggccgaggagaacagcctgacagagacccacaagtgcttcctggagaccacagcctacttcttcatgaagcccaagctgggggagaaggaggtgagccccaatgccttcttcagcatctggcatgagttcagcagtgacttcaaggacttctggaagaaggagaacaagctgctgctgcaggagcgggtgaaggaggccgaggaggtgtgccggcagaagaagggcaagagcctgtacaagatcaagcccaggcatgacagcggcatcaaggccaagatctccatgaagacctag

SEQ ID NO: 18965 - DNA, 3048 bp, synthetic construct
  source 1..3048: mol_type = other DNA; note = Synthetic coding sequence
atgacagtgtcccagaagggcggcccccagcccacccccagccctgctggccctggcacccagctgggccccatcaccggggagatggatgaggccgacagcgccttcctgaagttcaagcagacagcagatgacagcctgagcctgaccagccccaacacagagagcatctttgtggaggacccctacacagccagcctgcggagtgaaattgaaagtgatggccacgagtttgaggccgagagctggagcctggccgtggatgctgcctatgccaagaagcagaagcgggaggtggtgaagaggcaggatgtgctgtatgagctgatgcagacagaggtgcaccacgtgaggaccctgaagatcatgctgaaggtgtacagccgggccctgcaggaggagctgcagttcagcagcaaggccatcggccgcctcttcccctgtgctgatgacctgctggagacccacagccacttcctggcccggctgaaggagcggcggcaggagagcctggaggagggcagtgacagaaattatgtgatccagaagatcggggacctgctggtgcagcagttctctggagaaaatggagagaggatgaaggagaagtatggagtcttctgcagcggccacaatgaggccgtgagccactacaagctgctgctgcagcagaacaagaagttccagaacctgatcaagaagattggcaacttcagcatcgtgcggcggctgggcgtgcaggagtgcatcctgctggtgacccagaggatcaccaagtaccctgtgctggtggagcgcatcatccagaacacagaagctggaacagaggactatgaggacctgacccaggccctgaacctgatcaaggacatcatcagccaggtggatgccaaggtgtctgaatgtgagaagggccagaggctgcgggagattgctgggaagatggacctgaagagcagcagcaagctgaagaatggcctgaccttcaggaaggaggacatgctgcagaggcagctgcacctggagggcatgctgtgctggaagaccaccagcggccgcctgaaggacatcctggccatcctgctgacagatgtgctgctgctgctgcaggagaaggaccagaagtatgtgtttgcctctgtggacagcaagccccctgtgatcagcctgcagaagctgattgtgcgggaggtggccaatgaggagaaggccatgttcctgatcagcgccagcctgcagggccctgagatgtatgagatctacaccagcagcaaggaggacagaaatgcctggatggcccacatccagagagctgtggagagctgcccagatgaggaggagggccccttcagcctgcctgaggaggagaggaaggtggtggaggcccgggccacccggctgcgggacttccaggagcggctgtccatgaaggaccagctgattgcccagagcctgctggagaagcagcagatctacctggagatggccgagatgggcggcctggaggacctgccccagccccggggcctcttccggggcggggaccccagcgagaccctgcagggcgagctgatcctgaagagcgccatgtctgaaattgagggcatccagagcctcatctgccggcagctgggcagcgccaacggccaggccgaggatggcggcagcagcacaggccccccccggcgggcagagacctttgctggctatgactgcaccaacagccccaccaagaatggcagcttcaagaagaaggtgagcagcacagacccccggccccgggactggaggggcccccccaacagcccagacctgaagctgagtgacagcgacatccctggcagcagcgaggagagcccccaggtggtggaggcccctggaacagaaagtgacccccggctgcccaccgtgctggagagcgagctggtgcagaggatccagaccctgagccagctgctgctgaacctgcaggccgtcatcgcccaccaggacagctatgtggagacccagagagctgccatccaggagcgggagaagcagttccggctgcagagcacccggggcaacctgctgctggagcaggagcggcagaggaactttgagaagcagcgggaggagcgggccgccctggagaagctgcagagccagctgcggcatgagcagcagcgctgggagcgggagcggcagtggcagcaccaggagctggagcgggccggggcccggctgcaggagcgggagggggaggcccggcagctgcgggagcggctggagcaggagagagctgagctggagcggcagaggcaggcctaccagcacgacctggagcggctgcgggaggcccagagagctgtggagcgggagcgggagcggctggagctgctgcggcggctgaagaagcagaacacagcccctggggccctgcccccagacaccctggccgaggcccagccccccagccaccccccatccttcaatggagagggcctggagggcccccgggtgtccatgctgcccagcggcgtgggcccagaatatgcagagaggcctgaggtggcccggcgggacagcgcccccacagagaaccggctggccaagagtgatgtgcccatccagctgctgagcgccaccaaccagttccagaggcaggccgctgtgcagcagcagatccccaccaagctggccgccagcaccaagggcggcaaggacaagggcggcaagagccggggcagccagcgctgggagagcagcgccagctttgacctgaagcagcagctgctgctgaacaagctgatgggcaaggatgagagcaccagcaggaacagaagaagcctgagccccatcctgcccggccgccacagccctgcccctcctccagaccccggcttccctgcccccagccccccacctgctgacagccccagcgagggcttcagcctgaaggccggcggcacagccctgctgcccggccccccagcccccagccccctgcctgccacccccctgagcgccaaggaggatgccagcaaggaggatgtgatcttcttctag

SEQ ID NO: 18966 - DNA, 2544 bp, synthetic construct
  source 1..2544: mol_type = other DNA; note = Synthetic coding sequence
atggaggccctgggccctggaggagaccgggccagccctgccagcagcaccagcagcctggacctgtggcacctgtccatgagagctgacagcgcctacagcagcttctctgctgccagcggcggccctgagcccaggacccagagccctggaacagacctgctgccctacctggactgggactatgtgcgggtggtgtggggcggccctggccctgcccccccagatgctgccctgtgcaccagcccccggcccaggcctgctgtggccgcccggagcggcccccagcccacagaggtgcccggcaccccaggccccctgaaccggcaggccacccccctgctgtatgccctggccgctgaggccgaggccgccgcccaggccgctgagccccccagccccccagccagcagagctgcctaccggcagaggctgcagggcgcccagaggagagtgctgcgggagaccagcttccagaggaaggagctgaggatgagcctgcctgcccggctgcggcccaccgtgcctgcccggcccccagccacccaccccaggtctgccagcctgagccaccctggaggagagggggagcccgcccggagccgggccccagcccctggaacagctggccggggccccctggccaaccagcagaggaagtggtgcttcagcgagcccgggaagctggacagagtgggccggggcggcggccctgccagagaatgtctgggggaggcctgcagcagcagcggcctgcccggccctgagcccctggagttccagcacccagccctggccaagtttgaagatcatgaggtgggctggctgcctgagacccagccccagggctccatgaacctggacagcggcagcctgaagctgggagatgccttccggcctgccagccgcagccgcagcgccagcggggaggtgctgggctcctggggcggcagcggcggcaccatccccatcgtgcaggccgtgccccagggcgctgagaccccccggcccctcttccagaccaagctgagccgcttcctgccccagaaggaggccgctgtgatgtacccagctgagctgccccagagcagccctgctgacagcgagcagagggtgtctgagacctgcatcgtgcctgcctggctgcccagcctgcctgatgaggtgttcctggaggaggcccccctggtgaggatgaggagccccccagacccccacgccagccagggccccccagcctctgtgcacgccagtgaccagccctacggcaccggcctgggccagaggacaggccaggtgacagtgcccacagagtaccccctgcatgaatgtcctggaacagctggagcagatgactgctggcagggcgtgaatggatctgtgggcatcagccggcccaccagccacacccccaccggcacagccaatgacaacatccccaccatcgaccccaccggcctgaccaccaaccccccaacagctgctgagagtgacctgctgaagcctgtgcctgcagatgccctgggcctgtctggaaatgacaccccaggccccagccacaacacagccctggcccggggcaccggccagcccggcagccggcccacctggcccagccagtgcctggaggagctggtgcaggagctggcccggctggaccccagcctgtgtgaccccctggccagccagcccagccctgagccccccctgggcctgctggatggcctcatccccctggccgaggtgcgggccgccatgaggcctgcctgtggggaggccggggaggaggccgccagcacctttgagcccggcagctaccagttctccttcacccagctgctgcctgccccccgggaggagacccggctggagaacccagccacccaccctgtgctggaccagccctgtggccagggcctgcctgcccccaacaacagcatccagggcaagaaggtggagctggccgcccggctgcagaagatgctgcaggacctgcacacagagcaggagcggctgcagggcgaggcccaggcctgggcccggcggcaggccgccctggaggccgctgtgcggcaggcctgtgccccccaggagctggagcgcttcagccgcttcatggctgacctggagcgggtgctgggcctgctgctgctgctgggcagccggctggcccgggtgagaagagccctggcccgggccgccagtgacagcgaccctgatgagcagaggctgcggctgctgcagaggcaggaggaggatgccaaggagctgaaggagcacgtggcccggcgggagagagctgtgcgggaggtgctggtgcgggccctgcctgtggaggagctgcgggtgtactgtgccctgctggccggcaaggctgctgtgctggcccagcagaggaacctggatgagcgcatccggctgctgcaggaccagctggatgccatcagagatgacctgggccaccacgcccccagccccagccctgcccggcccccaggcacctgcccccctgtgcagccccccttccccctgctgctgacctag

SEQ ID NO: 18967 - DNA, 2502 bp, synthetic construct
  source 1..2502: mol_type = other DNA; note = Synthetic coding sequence
atgaagttcaccaacaccaaggtgcagatgatgcagaatgtgcacctggcccctgagacagatgaagatgacctgtacagcggctacaatgactacaaccccatctatgacatcgaggagctggagaatgatgctgccttccagcaggccgtgaggaccagccatggaagaagaccacccatcacagccaagatcagcagcacagctgtgacccggcccatcgccaccggctacggcagcaagaccagcctggccagcagcatcggccggcccatgactggagccatccaggatggagtgacccggcccatgacagctgtgcgggccgccggcttcaccaaggccgccctgcggggcagcgcctttgaccccctgagccagagccggggccctgccagccccctggaggccaagaagaaggacagccctgaggagaagatcaagcagctggagaaggaggtgaatgagctggtggaggagagctgcatcgccaacagctgtggggacctgaagctggccctggagaaggccaaggatgctggcaggaaggagcgggtgctggtgcggcagcgggagcaggtgaccaccccagagaacatcaacctggacctgacctacagcgtgctcttcaacctggccagccagtacagcgtgaatgagatgtatgcagaggccctgaacacctaccaggtgattgtgaagaacaagatgttcagcaatgccggcatcctgaagatgaacatgggcaacatctacctgaagcagaggaactacagcaaggccatcaagttctacaggatggccctggaccaggtgcccagcgtgaacaagcagatgaggatcaagatcatgcagaacattggagtgaccttcatccaggccggccagtacagtgatgccatcaacagctatgagcacatcatgtccatggcccccaacctgaaggccggctacaacctgaccatctgctactttgccatcggggaccgggagaagatgaagaaggccttccagaagctgatcaccgtgcccctggagattgatgaggacaagtacatcagccccagtgatgacccccacaccaacctggtgacagaggccatcaagaatgaccacctgcggcagatggagcgggagaggaaggccatggccgagaagtacatcatgaccagcgccaagctgattgcccctgtgattgagaccagctttgctgctggctatgactggtgtgtggaggtggtgaaggccagccagtatgtggagctggccaatgacctggagatcaacaaggctgtgacctacctgcggcagaaggactacaaccaggccgtggagatcctgaaggtgctggagaagaaggacagccgggtgaagtctgctgctgccaccaacctgagcgccctgtactacatgggcaaggactttgcccaggccagcagctatgctgacattgctgtgaacagcgaccgctacaacccagctgccctgaccaacaagggcaacacagtgtttgccaacggggactatgagaaggctgctgagttctacaaggaggccctgagaaatgacagcagctgcacagaggccctgtacaacatcggcctgacctatgagaagctgaaccggctggatgaggccctggactgcttcctgaagctgcacgccatcctgaggaacagcgctgaggtgctgtaccagatcgccaacatctatgagctgatggagaaccccagccaggccatcgagtggctgatgcaggtggtgtctgtcatccccacagacccccaggtgctgagcaagctgggggagctgtatgaccgggagggggacaagagccaggccttccagtactactatgagagctaccgctacttcccctgcaacattgaagtcatcgagtggctgggcgcctactacatcgacacccagttctgggagaaggccatccagtactttgagcgggccagcctcatccagcccacccaggtgaagtggcagctgatggtggccagctgcttccgccgcagcggcaactaccagaaggccctggacacctacaaggacacccacaggaagttcccagaaaatgtggagtgcctgcgcttcctggtgcggctgtgcacagacctgggcctgaaggatgcccaggagtatgccaggaagctgaagaggctggagaagatgaaggagatccgggagcagaggatcaagagcggcagagatggcagcggcggcagccggggcaagcgggagggcagcgccagcggggacagcggccagaactacagcgccagcagcaaaggagagcggctgagcgcccggctgcgggccctgcccggcaccaatgagccctatgagagcagcagcaacaaggagattgatgccagctatgtggaccccctgggcccccagatcgagcggcccaagacagctgccaagaagagaattgatgaagatgactttgctgatgaggagctgggagatgacctgctgcctgagtag

SEQ ID NO: 18968 - DNA, 918 bp, synthetic construct; identical to SEQ ID NO: 18761
  source 1..918: mol_type = other DNA; note = Synthetic coding sequence

SEQ ID NO: 18969 - DNA, 1119 bp, synthetic construct
  source 1..1119: mol_type = other DNA; note = Synthetic coding sequence
atggatgtgctgagccccctgtccttcatcaaggtgagccacgtgaggatgcagggcatcctgctgctggtgtttgccaagtaccagcacctgccctacatccagatcctgagcaccaagagcacccccaccggcctgtttggctactggggcaacaagggcggcgtgaacatctgcctgaagctgtatggctactacgtgtccatcatcaactgccacctgcccccccacatcagcaacaactaccagaggctggagcactttgaccgcatcctggagatgcagaactgtgagggccgggacatccccaacatcctggaccatgacctgatcatctggtttggagacatgaacttcagaattgaggactttggcctgcactttgtgcgggagagcatcaagaaccgctgctacggcggcctgtgggagaaggaccagctgagcatcgccaagaagcatgaccccctgctgcgggagttccaggagggccgcctgctcttcccccccacctacaagtttgacaggaacagcaatgactatgacaccagcgagaagaagaggaagccagcctggacagaccgcatcctgtggaggctgaagaggcagccctgtgccggccctgacacccccatccccccagccagccacttcagcctgagcctgcggggctacagcagccacatgacctacggcatcagtgaccacaagcctgtgtctggcacctttgacctggagctgaagcccctggtgtctgcccccctgattgtgctgatgcctgaggacctgtggacagtggagaatgacatgatggtgtcctacagcagcaccagtgacttccccagcagcccctgggactggattggcctgtacaaggtgggcctgagagatgtgaatgactatgtgtcctatgcctgggtgggggacagcaaggtgtcctgcagcgacaacctgaaccaggtgtacatcgacatcagcaacatccccaccacagaagatgagttcctgctgtgctactacagcaacagcctgcggtctgtggtgggcatcagccggcccttccagatccccccaggcagcctgcgggaggaccccctgggggaggcccagccccagatctag

SEQ ID NO: 18970 - DNA, 1692 bp, synthetic construct
  source 1..1692: mol_type = other DNA; note = Synthetic coding sequence
atgaggctggacctggccagcctgatgtctgcccccaagagcctgggcagcgccttcaagtcctggaggctggacaaggcccccagcccccagcacaccttccccagcaccagcatccctggcatggcctttgccctgctggcctctgtgccccctgtgtttggcctgtacaccagcttcttccctgtgctgatctacagcctgctgggcaccggccgccacctgagcacaggcacctttgccatcctgagcctgatgactggatctgctgtggagcggctggtgcctgagcccctggtgggcaacctgagcggcatcgagaaggagcagctggatgcccagagggtgggcgtggccgctgctgtggccttcggcagcggggccctgatgctgggcatgtttgtgctgcagctgggcgtgctgagcaccttcctgtctgagcctgtggtgaaggccctgaccagcggggccgccctgcacgtgctgctgagccagctgcccagcctgctgggcctgagcctgccccggcagatcggctgcttcagcctcttcaagaccctggccagcctgctgacagccctgcccaggagcagccctgctgagctgaccatcagcgccctgagcctggccctgctggtgcctgtgaaggagctgaatgtgcgcttccgggaccggctgcccacccccatccctggagaggtggtgctggtgctgctggcctctgtgctgtgcttcaccagctctgtggacacccgctaccaggtgcagatcgtgggcctgctgcccggcggcttcccccagcccctgctgcccaacctggccgagctgccccgcatcctggccgacagcctgcccatcgccctggtgtcctttgctgtgtctgccagcctggccagcatccacgccgacaagtacagctacaccatcgacagcaaccaggagttcctggcccacggggccagcaacctgatcagcagcctcttcagctgcttccccaacagcgccaccctggccaccaccaacctgctggtggatgctgggggcaagacccagctggccggcctcttcagctgcaccgtggtgctgtctgtgctgctgtggctgggccccttcttctactacctgcccaaggctgtgctggcctgcatcaacatcagctccatgaggcaggtgttctgccagatgcaggagctgccccagctgtggcacatcagccgggtggacttcctgctgcaggtgcccggcctgtgcatcctgagctaccccacccccctgtacttcggcacccggggccagttccgctgcaacctggagtggcacctgggcctgggggagggggagaaggagaccagcaagccagatggccccatggtggccgtggccgagcctgtgcgggtggtggtgctggacttcagcggcgtgacctttgctgatgctgctggggcccgggaggtggtgcaggtgcgggagcggctggccagccgctgcagagatgcccgcatccggctgctgctggcccagtgcaatgccctggtgcagggcaccctgaccagggtgggcctgctggacagagtgaccccagaccagctgtttgtgtctgtgcaggatgctgctgcctatgccctgggcagcctgctgcggggcagcagcaccaggagcggcagccaggaggccctgggctgcggcaagtag

SEQ ID NO: 18971 - DNA, 2892 bp, synthetic construct
  source 1..2892: mol_type = other DNA; note = Synthetic coding sequence
atggccgagcggggcggggccggcggcggccctggaggagctgggggcggcagcggccagaggggcagcggcgtggcccagagcccccagcagcccccaccccagcagcagcagcagcagcccccccagcagcccaccccacccaagctggcccaggccaccagcagcagcagcagcaccagcgctgctgctgccagcagcagcagcagcagcaccagcacctccatggctgtggccgtggccagcggcagcgcccctcctgggggccctggccctggccgcaccccagcccctgtgcagatgaacctgtatgccacctgggaggtggacaggagcagcagcagctgtgtgcccaggctcttcagcctgaccctgaagaagctggtgatgctgaaggagatggacaaggacctgaacagcgtggtgattgctgtgaagctgcagggcagcaagaggatcctgcggagcaatgaaattgtgctgcctgccagcggcctggtggagacagagctgcagctgaccttcagcctgcagtacccccacttcctgaagagagatgccaacaagctgcagatcatgctgcagaggaggaagcgctacaagaacagaaccatcctgggctacaagaccctggccgtgggcctcatcaacatggccgaggtgatgcagcaccccaatgaaggagccctggtgctgggcctgcacagcaatgtgaaggatgtgtctgtgcctgtggccgagatcaagatctacagcctgagcagccagcccatcgaccacgagggcatcaagagcaagctgagtgacaggagcccagacatcgacaactacagcgaggaggaggaggagagcttcagcagcgagcaggagggcagtgatgaccccctgcacggccaggacctcttctatgaagatgaggacctgaggaaggtgaagaagaccaggaggaagctgaccagcaccagcgccatcacccggcagcccaacatcaagcagaagtttgtggccctgctgaagcgcttcaaggtgtctgatgaggtgggcttcggcctggagcacgtgtcccgggagcagatccgggaggtggaggaggacctggatgagctgtatgacagcctggagatgtacaaccccagcgacagcggccctgagatggaggagacagagagcatcctgagcacccccaagcccaagctgaagcccttctttgagggcatgagccagagcagcagccagacagaaattggcagcctgaacagcaagggcagcctgggcaaggacaccaccagccccatggagctggccgccctggagaagatcaagagcacctggatcaagaaccaggatgacagcctgacagaaacagacaccctggagatcacagaccaggacatgtttggagatgccagcaccagcctggtggtgcctgagaaggtgaagacccccatgaagagcagcaagacagacctgcagggcagcgccagccccagcaaggtggagggcgtgcacaccccccggcagaagaggagcacccccctgaaggagcggcagctgagcaagcccctgtctgagaggaccaacagcagtgacagcgagaggagcccagacctgggccacagcacccagatccccaggaaggtggtgtatgaccagctgaaccagatcctggtgtctgatgctgccctgcctgaaaatgtcatcctggtgaacaccacagactggcagggccagtatgtggccgagctgctgcaggaccagaggaagcctgtggtgtgcacctgcagcacagtggaggtgcaggccgtgctgagcgccctgctgacccgcatccagcgctactgcaactgcaacagctccatgcccaggcctgtgaaggtggccgctgtgggcggccagagctacctgagcagcatcctgcgcttctttgtgaagagcctggccaacaagaccagtgactggctgggctacatgaggttcctgatcatccccctgggcagccaccctgtggccaagtacctgggctctgtggacagcaagtacagcagcagcttcctggacagcggctggagggacctcttcagccgctctgagccccctgtgtctgagcagctggatgtggccggccgggtgatgcagtatgtgaatggagctgccaccacccaccagctgcctgtggccgaggccatgctgacctgccgccacaagttcccagatgaagattcctaccagaagttcatccccttcatcggcgtggtgaaggtgggcctggtggaggacagccccagcacagctggagatggagatgacagccctgtggtgtccctgactgtgcccagcaccagcccccccagcagcagcggcctgagcagagatgccacagccaccccacccagcagccccagcatgagcagcgccctggccatcgtgggcagccccaacagcccctatggagatgtgattggcctgcaggtggactactggctgggccaccctggagagaggagaagagaaggagacaagagagatgccagcagcaagaacaccctgaagtctgtgttccgctctgtgcaggtgtcccggctgccccacagcggggaggcccagctgagcggcaccatggccatgacagtggtgaccaaggagaagaacaagaaggtgcccaccatcttcctgagcaagaagccccgggagaaggaggtggacagcaagagccaggtgattgagggcatcagccgcctcatctgcagcgccaagcagcagcagaccatgctgcgggtgtccattgatggagtggagtggagcgacatcaagttcttccagctggccgcccagtggcccacccacgtgaagcacttccctgtgggcctcttcagcggcagcaaggccacctag

SEQ ID NO: 18972 - DNA, 546 bp, synthetic construct
  source 1..546: mol_type = other DNA; note = Synthetic coding sequence
atggaggagatcccagcccaggaggccgccggcagcccccgggtgcagttccagagcctggagacccagagtgaatgtctgagccctgagccccagtttgtgcaggacacagacatggagcagggcctgaccggggcccctcctgtgccccaggtgcctgccctgccccgggagggcagccctggggaccaggccgccgccctgctgacagcccgctaccaggagtttgtgacctttgaagatgtggccgtgcacctgacccgggaggagtggggctacctggaccctgtgcagagggacctgtaccgggaggtgatgctggagaactatggaaatgtggtgtccctgggcatcctgctgcggctgcccaccacccgcatccacagcgtgaacagctgcccagccctgagccacacccaggccagcgccttctctggagagaccctggccgtgctgacagctggcatcagcaagcgctggcccaagtaccgcctgcccattgatattgcccggccctgcagcgagacccccttcccccggctgtag

SEQ ID NO: 18973 - DNA, 1410 bp, synthetic construct
  source 1..1410: mol_type = other DNA; note = Synthetic coding sequence
atggtgctggagggcaaccctgaggtgggcagccccaggaccagtgacctgcagcaccggggcaacaagggcagctgtgtgctgagcagccctggagaagatgcccagcctggagaggagcccatcaagtacggggagctgattgtgctgggctgctgtgaggagggcggggaggagacagaggcccagagaggagaggtgacaggcccccgggcccacagctgctacaacggctgcctggccagcggggacaagggcagaagaagaagccggctggccctgagccgccgcagccacgccaatggagtgaagccagatgtgatgcaccacatcagcacccccctggtgtccaaggccctgagcaacagaggccagcacagcatctcctacaccctgagccgcagccacagcgtgattgtggagtacacccatgacagcgacacagacatgttccagatcggccgcagcacagagaacatgattgactttgtggtgacagacaccagccctgggggcggcgctgctgagggccccagcgcccagagcaccatcagccgctatgcctgccgcatcctgtgtgacagaagaccaccctacacagcccgcatctatgctgctggctttgatgccagcagcaacatcttcctgggggagcgggccgccaagtggaggaccccagatggcctgatggatggcctgaccaccaacggggtgctggtgatgcaccctgctgggggcttctctgaagattctgcccctggggtgtggagggagatctctgtgtgtggaaatgtgtacaccctgcgggacagccgcagcgcccagcagaggggcaagctggtggagaatgaaagcaatgtgctgcaggacggcagcctgattgacctgtgtggggccaccctgctgtggaggaccccagctggcctgctgcgggcccccaccctgaagcagctggaggcccagaggcaggaggccaatgctgcccggccccagtgccctgtgggcctgagcaccctggccttccccagccctgcccggggccgcacagccccagacaagcagcagccctgggtgtatgtgcgctgtggccacgtgcacggctaccacggctggggctgccggcgggagcggggcccccaggagagagaatgtcccctgtgccgcctggtgggcccctacgtgcccctgtggctgggccaggaggccggcctgtgcctggaccccggcccccccagccacgcctttgccccctgtggccacgtgtgcagcgagaagacagcccgctactgggcccagacccccctgccccacggcacccacgccttccacgccgcctgccccttctgtggggcctggctgaccggggagcacggctgtgtgcggctcatcttccagggccccctggactag

SEQ ID NO: 18974 - DNA, 3312 bp, synthetic construct
  source 1..3312: mol_type = other DNA; note = Synthetic coding sequence
atggccggggcctctgtgaaggtggccgtgcgggtgcggcccttcaatgcccgggagaccagccaggatgccaagtgtgtggtgtccatgcagggcaacaccaccagcatcatcaaccccaagcagagcaaggatgcccccaagagcttcacctttgactacagctactggagccacaccagcacagaggacccccagtttgccagccagcagcaggtgtacagagacattggagaggagatgctgctgcacgcctttgagggctacaacgtgtgcatctttgcctacggccagacaggagctgggaagagctacaccatgatgggccggcaggagcccggccagcagggcatcgtgccccagctgtgtgaggacctcttcagccgggtgtctgagaaccagagcgcccagctgagctacagcgtggaggtgtcctacatggagatctactgtgagcgggtgcgggacctgctgaaccccaagagccggggcagcctgcgggtgcgggagcaccccatcctgggcccctacgtgcaggacctgagcaagctggccgtgaccagctatgctgacattgctgacctgatggactgtggcaacaaggccaggacagtggccgccaccaacatgaatgagaccagcagccgcagccatgctgtgttcaccatcgtgttcacccagcgctgccacgaccagctgaccggcctggacagcgagaaggtgtccaagatcagcctggtggacctggccggcagcgagagagctgacagcagcggggcccggggcatgaggctgaaggagggcgccaacatcaacaagagcctgaccaccctgggcaaggtgatcagcgccctggccgacatgcagagcaagaagaggaagagtgacttcatcccctacagagattctgtgctgacctggctgctgaaggagaacctgggcggcaacagcaggacagccatgattgctgccctgagccctgctgacatcaactatgaggagaccctgagcaccctgcgctatgctgacaggaccaagcagatccgctgcaatgccatcatcaatgaagaccccaatgcccggctcatccgggagctgcaggaggaggtggcccggctgcgggagctgctgatggcccagggcctgagcgccagcgccctggagggcctgaagacagaggagggctctgtgcggggggccctgcctgctgtgagcagccccccagcccctgtgagccccagcagccccaccacccacaacggggagctggagcccagcttcagccccaacacagagagccagatcggccctgaggaggccatggagcggctgcaggagacagagaagatcatcgccgagctgaatgagacctgggaggagaagctgaggaagacagaggccctgaggatggagcgggaggccctgctggccgagatgggcgtggccgtgagagaagatggcggcaccgtgggcgtcttcagccccaagaagaccccccacctggtgaacctgaatgaagaccccctgatgtctgagtgcctgctgtaccacatcaaggatggagtgaccagggtgggccaggtggacatggacatcaagctgaccggccagttcatccgggagcagcactgcctcttccgcagcatcccccagccagatggagaggtggtggtgaccctggagccctgtgagggcgctgagacctacgtgaatggcaagctggtgacagagcccctggtgctgaagagcggcaacagaattgtgatgggcaagaaccacgtgttccgcttcaaccaccctgagcaggcccggctggagcgggagcggggcgtgcccccacctcctggccccccatctgagcctgtggactggaactttgcccagaaggagctgctggagcagcagggcatcgacatcaagctggagatggagaagaggctgcaggacctggagaaccagtacaggaaggagaaggaggaggccgacctgctgctggagcagcagaggctgtatgctgacagcgacagcggagatgacagcgacaagaggagctgtgaggagagctggaggctcatcagcagcctgcgggagcagctgccccccaccaccgtgcagaccatcgtgaagagatgtggcctgcccagcagcggcaagagaagagcccccaggagagtgtaccagatcccccagaggcggcggctgcagggcaaggacccccgctgggccaccatggctgacctgaagatgcaggccgtgaaggagatctgctatgaggtggccctggccgacttccgccacggccgggcagaaattgaggccctggccgccctgaagatgagggagctgtgcaggacctacggcaagccagatggccctggagatgcctggagggctgtggccagagatgtgtgggacacagtgggggaggaggagggcggcggggccggcagcggcggcggcagcgaggagggcgcccggggagctgaggtggaggacctgcgggcccacatcgacaagctgaccggcatcctgcaggaggtgaagctgcagaacagcagcaaggaccgggagctgcaggccctgcgggacaggatgctgaggatggagagggtcatccccctggcccaggaccatgaagatgaaaatgaggagggcggggaggtgccctgggcccctcctgagggcagcgaggccgctgaggaggccgcccccagcgacaggatgcccagcgcccggccccccagcccccccctgagctcctgggagcgggtgtcccggctgatggaggaggaccctgccttcagaagaggccgcctgcgctggctgaagcaggagcagctgcggctgcagggcctgcagggcagcggcggccggggcggcggcctgcggcggcccccagccaggtttgtgccccctcatgactgcaagctgcgcttccccttcaagagcaacccccagcaccgggagagctggccaggcatgggcagcggggaggcccccacccccctgcagcccccagaggaggtgaccccccacccagccaccccagcccggcggccccccagcccccggcgcagccaccaccccaggaggaacagcctggatggcggcggccgcagcagaggagctggcagcgcccagcctgagccccagcacttccagcccaagaagcacaacagctacccccagcccccccagccctacccagcccagaggcctcctggcccccgctacccaccctacaccaccccacccaggatgaggcggcagaggtctgccccagacctgaaggagagcggggctgctgtgtag

SEQ ID NO: 18975 - DNA, 1260 bp, synthetic construct
  source 1..1260: mol_type = other DNA; note = Synthetic coding sequence
atggccgagcctgtgggcaagaggggccgctggagcggcggcagcggggccggccggggcggccggggcggctggggcggccggggccggcggccccgggcccagaggagccccagccggggcaccctggatgtggtgtctgtggacctggtgacagacagtgatgaggagatcctggaggtggccacagcccggggagctgctgatgaggtggaggtggagcccccagagcccccaggccctgtggccagccgggacaacagcaacagcgacagtgaaggagaagatagaagacctgctggccccccccgggagcctgtgagaagaagaagaaggctggtgctggaccctggagaggcccccctggtgcctgtgtacagcggcaaggtgaagagcagcctgcggctcatcccagatgacctgagcctgctgaagctgtacccacctggagatgaggaggaggccgagctggccgacagcagcggcctgtaccacgagggcagccccagccctggcagcccctggaagaccaagctgcggaccaaggacaaggaggagaagaagaagacagagttcctggacctggacaacagccccctgagcccccccagccccaggaccaagagcaggacccacacccgggccctgaagaagctgtctgaggtgaacaagaggctgcaggacctgcggagctgcctgagccccaagccaccccagggccaggagcagcagggccaggaggatgaggtggtgctggtggagggccccaccctgcctgagacccccaggctcttccccctgaagatccgctgcagagctgacctggtgcggctgcccctgaggatgtctgagcccctgcagagcgtggtggaccacatggccacccacctgggcgtgagccccagccgcatcctgctgctgtttggagaaacagagctgagccccacagccacccccaggaccctgaagctgggcgtggccgacatcatcgactgtgtggtgctgaccagcagccctgaggccacagagaccagccagcagctgcagctgcgggtgcagggcaaggagaagcaccagaccctggaggtgtccctgagccgggacagccccctgaagaccctgatgagccactatgaggaggccatgggcctgagcggcaggaagctgtccttcttctttgatggcaccaagctgagcggccgggagctgcctgctgacctgggcatggagagcggggacctgattgaggtgtggggctag

SEQ ID NO: 18976 - DNA, 384 bp, synthetic construct
  source 1..384: mol_type = other DNA; note = Synthetic coding sequence
atgaggcccctggacatcgtggagctggccgagcctgaggaggtggaggtgctggagcctgaggaggactttgagcagttcctgctgcccgtcatcaatgagatgagagaagatattgccagcctgacccgggagcacggccgggcctacctgaggaacagaagcaagctgtgggagatggacaacatgctgatccagatcaagacccaggtggaggccagcgaggagagcgccctgaaccacctgcagaaccctggagatgctgctgagggccgggccgccaagagatgtgagaaggccgaggagaaggccaaggagatcgccaagatggccgagatgctggtggagctggtgagaagaattgagaagtctgagagcagctag

SEQ ID NO: 18977 - DNA, 1263 bp, synthetic construct
  source 1..1263: mol_type = other DNA; note = Synthetic coding sequence
atgcccctgcaggtgtctgactacagctggcagcagaccaagacagctgtgttcctgagcctgcccctgaagggcgtgtgtgtgcgggacacagatgtgttctgcacagagaactacctgaaggtgaacttcccccccttcctgtttgaggccttcctgtatgcccccattgatgatgagagcagcaaggccaagattggaaatgacaccatcgtgttcaccctgtacaagaaggaggccgccatgtgggagaccctgtctgtgactggagtggacaaggagatgatgcagaggatccgggagaagagcatcctgcaggcccaggagcgggccaaggaggccacagaggccaaggccgccgccaagcgggaggaccagaagtatgccctgtctgtgatgatgaagattgaggaggaggagaggaagaagattgaggacatgaaggaaaatgaaagaatcaaggccaccaaggccctggaggcctggaaggagtaccagaggaaggccgaggagcagaagaagatccagcgggaggagaagctgtgccagaaggagaagcagatcaaggaggagaggaagaagatcaagtacaagagcctgaccaggaacctggccagcaggaacctggcccccaagggcaggaacagcgagaacatcttcacagagaagctgaaggaggacagcatcccagcccccaggtctgtgggcagcatcaagatcaacttcacccccagggtcttccccacagccctgcgggagagccaggtggccgaggaggaggagtggctgcacaagcaggccgaggcccggcgggccatgaacacagacattgctgagctgtgtgacctgaaggaggaggagaagaaccctgagtggctgaaggacaagggcaacaagctgtttgccacagagaactacctggccgccatcaatgcctacaacctggccatccggctgaacaacaagatgcccctgctgtacctgaacagagctgcctgccacctgaagctgaagaacctgcacaaggccatcgaggacagcagcaaggccctggagctgctgatgcctcctgtgacagacaatgccaatgccaggatgaaggcccacgtgagaagaggaacagccttctgccagctggagctgtatgtggagggcctgcaggactatgaagctgccctgaagattgaccccagcaacaagatcgtgcagattgatgctgagaagatcagaaatgtcatccagggcacagagctgaagagctag

SEQ ID NO: 18978 - DNA, 348 bp, synthetic construct
  source 1..348: mol_type = other DNA; note = Synthetic coding sequence
atgagatatgtggccagctacctgctggccgccctgggcggcaacagcagccccagcgccaaggacatcaagaagatcctggacagcgtgggcatcgaggctgatgatgaccggctgaacaaggtgatcagcgagctgaatggcaagaacattgaagatgtgattgcccagggcatcggcaagctggcctctgtgcctgctggaggagctgtggccgtgtctgctgcccctggcagcgctgccccagctgctggcagcgccccagctgctgctgaggagaagaaggatgagaagaaggaggagagcgaggagagtgatgatgacatgggcttcggcctgtttgattag

SEQ ID NO: 18979 - DNA, 1233 bp, synthetic construct
  source 1..1233: mol_type = other DNA; note = Synthetic coding sequence
ctcaacagagcctgcttctgtgtgactggagtgcctgagctggaggtgatctgtggcctgcagcaggccgagtggccccggctgggcctgagccacctgggcgctgtgggcggcggctggggcggcctgcccaccagcacctgggtgtccctgcacacccaggaggtggacctggccagcgaggtggccctggaggtggtgaggacagctgagcccggggtgtggctggaggcccaggcccctgtggccctggtggcccagcctgagcccctgcctgccacagctggggtgaagcgggagagcgtgggcatggaggtggccgtgctgacagatgaccccctgcctgtggtggaccagcagcaggtgctggcccggctgcagctgctggagcagcaggtggtgggcggggagcaggccaagaacaaggacctgaaggagaagcacaagaggaggaagagatatgcagatgagaggaggaagcagctggtggccgccctgcagaacagtgatgaagattctggggactgggtgctgctgaatgtgtatgacagcatccaggaggaggtgcgggccaagagcaagctgctggagaagatgcagaggaagctgcgggctgctgaggtggagatcaaggacctgcagagcgagttccagctggagaagattgactacctggccaccatccggcggcaggagcgggacagcatgctgctgcagcagctgctggagcaggtgcagcccctcatccggcgggactgcaactacagcaacctggagaagatcctgcgggagagctgctgggatgaagataatggcttctggaagatcccccaccctgtgatcaccaagaccagcctgcctgtggccgtgtccacaggcccccagaacaagccagccaggaagaccagcgctgctgacaatggagagcccaacatggaggatgaccgctaccgcctgatgctgagccgcagcaacagtgaaaatattgccagcaactacttccgcagcaagagggccagccagatcctgagcacagatgccaggaagagcctgacccaccacaacagccccccaggcctgagctgccccctgagcaacaacagcgccatcccccccacccaggcccctgagatgccccagccccggcccttccggctggagagcctggacatccccttcaccaaggccaagaggaagaagagcaagagcaactttggaagtgagcccctgtag

SEQ ID NO: 18980 - DNA, 1353 bp, synthetic construct
  source 1..1353: mol_type = other DNA; note = Synthetic coding sequence
atgagggagtgcatcagcatccacgtgggccaggccggcgtgcagattggaaatgcctgctgggagctgtactgcctggagcacggcatccagccagatggccagatgcccagcgacaagaccatcggcggcggagatgacagcttcaacaccttcttcagcgagaccggggccggcaagcacgtgcccagggctgtgtttgtggacctggagcccaccgtggtggatgaggtgaggacaggcacctaccggcagctgttccaccctgagcagctgatcaccgggaaggaggatgctgccaacaactatgcccggggccactacaccatcggcaaggagatcgtggacctggtgctggaccgcatcaggaagctggccgacctgtgcaccggcctgcagggcttcctgatcttccacagctttggaggcggcactggaagtggctttgccagcctgctgatggagcggctgtctgtggactatggcaagaagagcaagctggagtttgccatctacccagccccccaggtgtccacagctgtggtggagccctacaacagcatcctgaccacccacaccaccctggagcacagcgactgtgccttcatggtggacaatgaggccatctatgacatctgcagaagaaacctggacatcgagcggcccacctacaccaacctgaaccggctgattggccagatcgtgagcagcatcacagccagcctgcgctttgatggagccctgaatgtggacctgacagagttccagaccaacctggtgccctacccccgcatccacttccccctggccacctacgcccctgtgatctctgctgagaaggcctaccacgagcagctgtctgtggccgagatcaccaatgcctgctttgagcccgccaaccagatggtgaagtgtgaccccaggcatggcaagtacatggcctgctgcatgctgtacagaggagatgtggtgcccaaggatgtgaatgctgccatcgccaccatcaagaccaagaggaccatccagtttgtggactggtgccccaccggcttcaaggtgggcatcaactaccagcccccaacagtggtgcctggaggagacctggccaaggtgcagagagctgtgtgcatgctgagcaacaccacagccatcgccgaggcctgggcccggctggaccacaagtttgacctgatgtatgccaagagggcctttgtgcactggtacgtgggggagggcatggaggagggggagttcagcgaggcccgggaggacctggccgccctggagaaggactatgaggaggtgggcgtggacagcgtggaggccgaggccgaggagggggaggagtactag

SEQ ID NO: 18981 - DNA, 471 bp, synthetic construct
  source 1..471: mol_type = other DNA; note = Synthetic coding sequence
atgtctgggggcctgctgaaggccctgcggagtgacagctatgtggagctgagccagtacagagaccagcacttccggggggacaatgaggagcaggagaagctgctgaagaagagctgcaccctgtatgtgggcaacctgtccttctacaccacagaggagcagatctatgagctgttcagcaagagcggggacatcaagaagatcatcatgggcctggacaagatgaagaagacagcctgtggcttctgctttgtggagtactacagcagagcagatgctgaaaatgccatgagatacatcaatggcacccggctggatgaccgcatcatcagaacagactgggatgctggcttcaaggagggccggcagtatggccggggccgcagcggcggccaggtgagagatgagtaccggcaggactatgatgctggccggggcggctacggcaagctggcccagaaccagtag

SEQ ID NO: 18982 - DNA, 996 bp, synthetic construct
  source 1..996: mol_type = other DNA; note = Synthetic coding sequence
atgggcggggagcaggaggaggagagatttgatggcatgctgctggccatggcccagcagcatgaaggaggagtgcaggagctggtgaacaccttcttctccttcctgcggaggaagacagacttcttcatcggcggggaggagggcatggccgagaagctgatcacccagaccttcagccaccacaaccagctggcccagaagacccggcgggagaagagggcccggcaggaggccgagcggcgggagaaggccgagcgggccgcccggctggccaaggaggccaagtctgagaccagcggcccccagatcaaggagctgacagatgaggaggccgagcggctgcagctggagattgaccagaagaaggatgctgagaaccacgaggcccagctgaagaatggcagcctggacagccctgggaagcaggacacagaagaagatgaggaggaggatgagaaggacaagggcaagctgaagcccaacctgggcaatggagctgacctgcccaactaccgctggacccagaccctgtctgagctggacctggccgtgcccttctgtgtgaacttccggctgaagggcaaggacatggtggtggacatccagaggaggcacctgcgggtgggcctgaagggccagcctgccatcattgatggagagctgtacaatgaggtgaaggtggaggagagctcctggctgattgaagatggcaaggtggtgacagtgcacctggagaagatcaacaagatggagtggtggagccggctggtgtccagtgaccctgagatcaacaccaagaagatcaaccctgagaacagcaagctgagtgacctggacagcgagaccaggtccatggtggagaagatgatgtatgaccagaggcagaagtccatgggcctgcccaccagtgatgagcagaagaagcaggagatcctgaagaagttcatggaccagcaccctgagatggacttcagcaaggccaagttcaactag

SEQ ID NO: 18983 - DNA, 1860 bp, synthetic construct
  source 1..1860: mol_type = other DNA; note = Synthetic coding sequence
atggccggccctggggtgcctggggccccagctgcccgctggaagaggcacatcgtgcggcagctgcggctgcgggacaggacccagaaggccctcttcctggagctggtgcctgcctacaaccacctgctggagaaggccgagctgctggacaagttcagcaagaagctgcagcctgagcccaacagcgtgacccccaccacccaccagggcccctgggaggagagcgagctggacagcgaccaggtgcccagcctggtggccctgcgggtgaagtggcaggaggaggaggagggcctgcggctggtgtgtggggagatggcctaccaggtggtggagaagggggccgccctgggcaccctggagagcgagctgcagcagaggcagagccggctggccgccctggaggcccgggtggcccagctgcgggaggcccgggcccagcaggcccagcaggtggaggagtggagggcccagaatgctgtgcagagagctgcctatgaggccctgcgggcccacgtgggcctgcgggaggccgccctgcggcggctgcaggaggaggcccgggacctgctggagcggctggtgcagaggaaggcccgggctgctgctgagaggaacctgagaaatgaaagaagagagcgggccaagcaggcccgggtgtcccaggagctgaagaaggccgccaagaggacagtgtccatcagcgagggccctgacaccctgggagatggcatgagggagcggcgggagaccctggccctggcccctgagcctgagcccctggagaaggaggcctgtgagaagtggaagaggcccttccgcagcgccagcgccaccagcctgaccctgagccactgtgtggatgtggtgaagggcctgctggacttcaagaagaggcggggccacagcattggaggagcccctgagcagcgctaccagatcatccctgtgtgtgtggccgcccggctgcccacccgggcccaggatgtgctggatgcccacctgtctgaggtgaatgctgtgcgcttcggccccaacagcagcctgctggccactggaggagctgacaggctcatccacctgtggaatgtggtgggcagccggctggaggccaaccagaccctggagggcgccggcggcagcatcacctctgtggactttgaccccagcggctaccaggtgctggccgccacctacaaccaggccgcccagctgtggaaggtgggggaggcccagagcaaggagaccctgagcggccacaaggacaaggtgacagctgccaagttcaagctgaccaggcaccaggccgtgacaggcagccgggacagaacagtgaaggagtgggacctgggccgggcctactgcagcaggaccatcaacgtgctgagctactgcaatgatgtggtgtgtggggaccacatcatcatcagcggccacaatgaccagaagatccgcttctgggacagccggggcccccactgcacccaggtgattcctgtgcagggccgggtgaccagcctgagcctgagccatgaccagctgcacctgctgagctgcagccgggacaacaccctgaaggtgattgacctgcgggtgagcaacatccggcaggtgttccgggcagatggcttcaagtgtggcagtgactggaccaaggctgtgttctccccagacaggagctatgccctggccggcagctgtgatggagccctgtacatctgggatgtggacaccgggaagctggagagccggctgcagggcccccactgtgccgctgtgaatgctgtggcctggtgctacagcggcagccacatggtgtctgtggaccagggcaggaaggtggtgctgtggcagtag

SEQ ID NO: 18984 - DNA, 5049 bp, synthetic construct
  source 1..5049: mol_type = other DNA; note = Synthetic coding sequence
atggagggcaatggaacagagaacagctgcagcaggacccggggctggctgcagcaggacaatgatgccaagccctggctgtggaagttcagcaactgcttcagcaggcctgagcagaccctgccccacagcccccagaccaaggagtacatggagaacaagaaggtggccgtggagctgaaggatgtgcccagccccctgcatgctggcagcaagctgtttcctgctgtgcccctgcctgacatccgcagcctgcagcagcccaagatccagctgagctctgtgcccaaggtgtcctgctgtgcccactgccccaatgagcccagcaccagccccatgagatttggaggcggcggcggcggcagcggcggcaccagcagcctcatccaccctggggccctgctggacagccagagcaccaggaccatcacctgccaggtgggcagcggctttgccttccagagcgccagcagcctgcagaatgccagcgccaggaacaacctggccggcatcgccagtgacttccccagcatgtgcctggagagcaacctgagcagctgcaagcacctgccctgctgcggcaagctgcacttccagagctgccacggcaatgtgcacaagctgcaccagttccccagcctgcagggctgcaccagcgctggctacttcccctgcagcgacttcaccagcggggcccctggccacctggaggagcacatcagccagagcgagctgaccccccacctgtgcaccaacagcctgcacctgaatgtggtgccccctgtgtgcctgaagggcagcctgtactgtgaggactgcctgaacaagccagccagaaattccatcattgatgctgccaaggtgtggcccaacatccccccacccaacacccagcctgcccccctggccgtgcccctgtgcaatggctgcggcaccaagggcaccgggaaggagaccaccctgctgctggccaccagcctgggcaaggccgccagcaagtttggcagccctgaggtggccgtggccggccaggtgctggagaacctgccccccatcggggtcttctgggacatcgagaactgcagcgtgcccagcggccgcagcgccacagctgtggtgcagaggatccgggagaagttcttcaagggccaccgggaggccgagttcatctgtgtgtgtgacatcagcaaggagaacaaggaggtgatccaggagctgaacaactgccaggtgacagtggcccacatcaatgccacagccaagaatgctgctgatgacaagctgcggcagagcctgcggagatttgccaacacccacacagccccagccaccgtggtgctggtgtccacagatgtgaactttgccctggagctgagtgacctgcggcacagacatggcttccacatcatcctggtgcacaagaaccaggccagcgaggccctgctgcaccacgccaatgagctgatccgctttgaggagttcatcagtgacctgcccccccggctgcccctgaagatgccccagtgccacaccctgctgtatgtgtacaacctgcctgccaacaaggatggcaagtctgtgagcaaccggctgcggcggctgagtgacaactgtggcggcaaggtgctgagcatcaccggctgcagcgccatcctgcgcttcatcaaccaggacagcgctgagcgggcccagaagaggatggagaatgaagatgtgtttggaaaccgcatcatcgtgtccttcacccccaagaaccgggagctgtgtgagaccaagagcagcaatgccatcgctgacaaggtgaagagccccaagaagctgaagaaccccaagctgtgcctgatcaaggatgccagcgagcagagcagcagcgccaaggccaccccaggcaagggcagccaggccaacagcggcagcgccaccaagaacaccaacgtgaagagcctgcaggagctgtgcaggatggagagcaagacaggccacaggaacagcgagcaccagcagggccacctgcggctggtggtgcccacccacggcaacagcagcgctgctgtgtccacccccaagaacagcggcgtggccgagcctgtgtacaagaccagccagaagaaggagaacctgagcgcccggtctgtgaccagcagccctgtggagaagaaggacaaggaggagaccgtcttccaggtgtcctaccccagcgccttcagcaagctggtggccagccggcaggtgagccccctgctggccagccagagctggagcagccgctccatgagccccaacctgctgaacagagccagccccctggccttcaacatcgccaacagcagcagcgaggccgactgcccagacccctttgccaacggggctgatgtgcaggtgagcaacatcgactaccgcctgagcaggaaggagctgcagcagctgctgcaggaggcctttgcccggcacggcaaggtgaagtctgtggagctgagcccccacacagactaccagctgaaggctgtggtgcagatggagaacctgcaggatgccatcggggctgtgaacagcctgcaccgctacaagattggcagcaagaagatcctggtgtccctggccaccggggccgccagcaagagcctgagcctgctgtctgctgagaccatgtctgtgctgcaggatgccccagcctgctgcctgcccctcttcaagttcacagacatctatgagaagaagtttggccacaagctgaatgtgtctgacctgtacaagctgacagacacagtggccatccgggagcagggcaatggccgcctggtgtgcctgctgcccagcagccaggcccggcagagccccctgggcagcagccagagccatgatggcagcagcaccaactgcagccccatcatctttgaggagctggagtaccacgagcctgtgtgccggcagcactgcagcaacaaggacttcagcgagcatgaatttgatcctgacagctacaagatccccttcgtcatcctgagcctgaagacctttgccccccaggtgcacagcctgctgcagacccatgagggcaccgtgcccctgctggacccctggctgctgcggagcaagagccctgtgggcaacccccagctgatccagttcagccgggaggtgattgacctgctgaagagccagcccagctgtgtgatccccatcagccacttcatccccagctaccaccaccactttgccaagcagtgccgggtgtctgactatggctacagcaagctgattgagctgctggaggccgtgccccacgtgctgcagatcctgggcatgggcagcaagaggctgctgaccctgacccaccgggcccaggtgaagcgcttcacccaggacctgctgaagctgctgaagagccaggccagcaagcaggtgattgtgcgggagttcagccaggcctaccactggtgcttcagcaaggactgggatgtgacagaatatggagtgtgtgagctgattgatattgtgtctgagatcccagacaccaccatctgcctgagccagcaggacaatgagatggtgatctgcatccccaagcgggagaggacccaggatgaaattgaaagaaccaagcagttcagcaaggatgtggtggacctgctgcggcaccagccccacttcaggatgcccttcaacaagttcatccccagctaccaccaccacttcggccggcagtgcaagctggcctactacggcttcaccaagctgctggagctgtttgaggccatcccagacaccctgcaggtgctggagtgtggggaggagaagatcctgaccctgacagaggtggagcgcttcaaggccctggccgcccagtttgtgaagctgctgcggagccagaaggacaactgcctgatgatgacagacctgctgacagaatatgccaagaccttcggctacaccttccggctgcaggactatgatgtgagcagcatcagcgccctgacccagaagctgtgccacgtggtgaaggtggccgacatcgagagcggccggcagatccagctgatcaacaggaagagcctgcggagcctgacagcccagctgctggtgctgctgatgtcctgggagggcaccacccacctgtctgtggaggagctgaagaggcactatgagagcacccacaacacccccctgaacccctgtgaatatggcttcatgaccctgacagagctgctgaagagcctgccctacctggtggaggtgttcaccaatgacaagatggaggagtgtgtgaagctgaccagcctgtacctgtttgccaagaatgtgcgcagcctgctgcacacctaccactaccagcagatcttcctgcacgagttctccatggcctacaccaagtatgtgggggagaccctgcagcccaagacctacggccacagctctgtggaggagctgctgggcgccatcccccaggtggtgtggatcaagggccacggccacaagagaattgtggtgctgaagaatgacatgaagagccggctgagcagcctgagcctgagccctgccaaccacgagaaccagcccagcgagggggagcgcatcctggaggtgcctgagagccacacagccagcgagctgaagctgggcgcagatggcagcggccccagccacacagagcaggagctgctgcggctgacagatgacagccctgtggacctgctgtgtgcccctgtgcccagctgcctgcccagcccccagctgcggccagaccccgtcatcctgcagagcgctgacctgatccagtttgaggagcggccccaggagcccagcgagatcatgatcctgaaccaggaggagaagatggagatccccatccctgggaagagcaagaccctgaccagtgacagcagcagcagctgcatctctgctgctgtgcctgtgcccccctgccccagcagcgagaccagcgagagcctgctgagcaaggaccctgtggagagccctgccaagaagcagcccaagaacagagtgaagctggccgccaacttcagcctggcccccatcaccaagctgtag

SEQ ID NO: 18985 - DNA, 735 bp, synthetic construct
  source 1..735: mol_type = other DNA; note = Synthetic coding sequence
gggggcggctatgacctgaacctgtttgccagccccccagacagcaactttgtgtgcagcgtgtgccacggcgtgctgaagaggcctgcccggctgccctgcagccacatcttctgcaagaagtgcatcctgcgctggctggcccggcagaagacctgcccctgctgcaggaaggaggtgaagaggaagaaggtggtgcacatgaacaagctgaggaagaccatcggccgcctggaggtgaagtgcaagaatgctgatgctggctgcatcgtgacctgccccctggcccacaggaagggccaccaggacagctgcccctttgagctgacagcctgccccaatgaaggctgcaccagccaggtgccccggggcaccctggccgagcaccggcagcactgccagcagggcagccagcagcgctgccccctgggctgtggggccaccctggaccctgctgagcgggcccggcacaactgctaccgggagctgcacaatgcctggagcgtgcggcaggagcggcggcggcccctgctgctgagcctgctgcggcgggtgcgctggctggaccaggccacctctgtggtgcggcgggagctggccgagctgagcaacttcctggaggaggacacagccctgctggagggcgccccccaggaggaggccgaggccgcccctgagggcaatgtgggcgctgaggtggtgggggagccccgggccaacatcccctgcaagtag

SEQ ID NO: 18986 - DNA, 705 bp, synthetic construct
  source 1..705: mol_type = other DNA; note = Synthetic coding sequence
ctgccctgcaagcgctgccggcccagcgtgtacagcctgagctacatcaagaggggcaagaccaggaactacctgtaccccatctggagcccctatgcctactacctgtactgctacaagtaccgcatcaccctgcgggagaagatgctgccccgctgctacaagagcatcacctacaaggaggaggaggacctgaccctgcagcccaggagctgcctgcagtgtgagagcctggtgggcctgcaggagggcaagagcacagagcagggcaaccacgaccagctgaaggagctgtacagcgctggcaacctgactgtgctggccacagaccccctgctgcaccaggaccctgtgcagctggacttccacttccggctgaccagccagaccagcgcccactggcacggcctgctgtgtgacagaagactcttcctggacatcccctaccaggccctggaccagggcaaccgggagagcctgacagccaccctggagtatgtggaggagaagaccaacgtggacagcgtgtttgtgaacttccagaatgacagaaatgacagaggagccctgctgcgggccttctcctacatgggctttgaggtggtgcggccagaccacccagccctgccccccctggacaacgtcatcttcatggtgtaccccctggagagagatgtgggccacctgcccagcgagcccccatag

SEQ ID NO: 18987 - DNA, 2403 bp, synthetic construct
  source 1..2403: mol_type = other DNA; note = Synthetic coding sequence
atggctgctgctgcctctgtgacaggccgggtgacctgggccgccagccccatgaggagcctgggcctgggccgccgcctgagcctgcccggcccccggctggatgctgtgacagctgctgtgaaccccagcctgagtgaccacggcaatggcctgggccggggcacccggggcagcggctgcagcggcggcagcctggtggccgactggggcggcggcgctgctgctgctgctgctgtggccctggccctggccccagccctgagcaccatgaggcggggcagcagcgagagcgagctggccgcccgctgggaggccgaggccgtggccgccgccaaggctgctgccaaggccgaggccgaggccacagctgagaccgtggccgagcaggtgcgggtggatgctggagctgctggggagcctgagtgcaaggccggggaggagcagcccaaggtgctggccccagccccagcccagcccagcgctgctgaggagggcaacacccaggtgctgcagaggcccccacccaccctgccccccagcaagcccaagcctgtgcagggcctgtgcccccacggcaagccccgggacaagggccgcagctgcaagaggagcagcggccacggcagcggggagaatggcagccagaggcctgtgacagtggacagcagcaaggcccggaccagcctggatgccctgaagatcagcatccggcagctgaagtggaaggagttcccctttggaagaaggctgccctgtgacatctactggcacggcgtgtccttccatgacaatgacatcttcagcggccaggtgaacaagtttcctggcatgacagagatggtgaggaagatcaccctgagcagagctgtgaggaccatgcagaacctcttccctgaggagtacaacttctaccccaggtcctggatcctgcctgatgagttccagctgtttgtggcccaggtgcagatggtgaaggatgatgaccccagctggaagcccaccttcatcgtgaagccagatggcggctgccagggagatggcatctacctgatcaaggaccccagcgacatccggctggccggcaccctgcagagcaggcctgctgtggtgcaggagtacatctgcaagcccctgctgattgacaagctgaagtttgacatccggctgtatgtgctgctgaagagcctggaccccctggagatctacatcgccaaggatggcctgagccgcttctgcacagagccctaccaggagcccacccccaagaacctgcaccgcatcttcatgcacctgaccaactacagcctgaacatccacagcggcaacttcatccacagcgacagcgccagcacaggcagcaagaggaccttcagcagcatcctgtgccgcctgagcagcaagggcgtggacatcaagaaggtgtggagcgacatcatctctgtggtgatcaagacagtcatcgccctgaccccagagctgaaggtgttctaccagagcgacatccccaccggccggcccggccccacctgcttccagatcctgggctttgacatcctgctgatgaagaacctgaagcccatcctgctggaggtgaatgccaaccccagcatgagaattgagcacgagcacgagctgagccctggggtgtttgaaaatgtgcccagcctggtggatgaggaggtgaaggtggccgtcatccgggacaccctgcggctgatggaccccctgaagaagaagcgggagaaccagagccagcagctggagaagccctttgctgggaaggaggatgccctggatggagagctgaccagcgccccagactgcaatgccaaccctgaggcccacctgcccagcatctgcctgaagcaggtgttccccaagtatgccaagcagttcaactacctgcggctggtggacaggatggccaacctcttcatccgcttcctgggcatcaagggcaccatgaagctgggccccaccggcttccgcaccttcatccgcagctgcaagctgagcagcagcagcctgtccatggctgctgtggacatcctgtacatcgacatcacccggcgctggaacagcatgaccctggaccagagggacagcggcatgtgcctgcaggcctttgtggaggccttcttcttcctggcccagaggaagttcaagatgctgcccctgcacgagcaggtggccagcctgattgacctgtgtgagtaccacctgagcctgctggatgagaagaggctggtgtgtggccggggcgtgcccagcggcggccggcccccccaccggggccccccccaggagcccagccccagcgcccagcctgctggggacaaccccccacccaggaccagctgtgccaacaagctgagccaccccaggcacaccctgtcctag

SEQ ID NO: 18988 - DNA, 981 bp, synthetic construct
  source 1..981: mol_type = other DNA; note = Synthetic coding sequence
atgagggagtgcatcagcatccacgtgggccaggccggcgtgcagattggaaatgcctgctgggagctgtactgcctggagcacggcatccagccagatggccagatgcccagcgacaagaccatcggcggcggagatgacagcttcaacaccttcttcagcgagaccggggccggcaagcacgtgcccagggctgtgtttgtggacctggagcccaccgtgattgatgaggtgaggacaggcacctaccggcagctgttccaccctgagcagctgatcaccgggaaggaggatgctgccaacaactatgcccggggccactacaccatcggcaaggagatcatcgacctggtgctggaccgcatcaggaagctgaagagcttctttgccaccaagccccgcatccacttccccctggccacctacgcccctgtgatctctgctgagaaggcctaccacgagcagctgactgtggccgagatcaccaatgcctgctttgagcccgccaaccagatggtgaagtgtgaccccaggcatggcaagtacatggcctgctgcctgctgtacagaggagatgtggtgcccaaggatgtgaatgctgccatcgccaccatcaagaccaagaggaccatccagtttgtggactggtgccccaccggcttcaaggtgggcatcaactaccagcccccaacagtggtgcctggaggagacctggccaaggtgcagagagctgtgtgcatgctgagcaacaccacagctgtggccgaggcctgggcccggctggaccacaagtttgacctgatgcccctgcggcgcatcatgaggcggctggagcagatcgtgctgacagagaggatgagggtgaagagcatcaacctgtgtgctgtgctgctgcacagctttgtgctggagctgagctacttctgcagcgtgaatgtgtactgcaggaagctgctgatcaagctgaagttccccttctag

SEQ ID NO: 18989 - DNA, 1005 bp, synthetic construct
  source 1..1005: mol_type = other DNA; note = Synthetic coding sequence
atggtgggccgggagaaggagctgagcatccactttgtgcccggcagctgccgcctggtggaggaggaggtgaacatccccaacagaagagtgctggtgactggagccaccggcctgctgggccgggctgtgcacaaggagttccagcagaacaactggcatgctgtgggctgcggcttcagaagagcccggcccaagtttgagcaggtgaacctgctggacagcaatgctgtgcaccacatcatccatgacttccagccccacgtgattgtgcactgtgccgctgagaggaggccagatgtggtggagaaccagccagatgctgccagccagctgaatgtggatgccagcggcaacctggccaaggaggccgctgctgtgggcgccttcctgatctacatcagcagtgactatgtgtttgatggcaccaaccccccctaccgggaggaggacatcccagcccccctgaacctgtatggcaagaccaagctggatggagagaaggctgtgctggagaacaacctgggcgctgctgtgctgcgcatccccatcctgtatggagaggtggagaagctggaggagagcgctgtgacagtgatgtttgacaaggtgcagttcagcaacaagagcgccaacatggaccactggcagcagcgcttccccacccacgtgaaggatgtggccaccgtgtgccggcagctggccgagaagaggatgctggaccccagcatcaagggcaccttccactggagcggaaatgagcagatgaccaagtatgagatggcctgtgccatcgcagatgccttcaacctgcccagcagccacctgcggcccatcacagacagccctgtgctgggcgcccagaggcccagaaatgcccagctggactgcagcaagctggagaccctgggcatcggccagaggacccccttcagaattggcatcaaggagagcctgtggcccttcctgattgacaagcgctggaggcagacagtgttccactag

SEQ ID NO: 18990 - DNA, 513 bp, synthetic construct
  source 1..513: mol_type = other DNA; note = Synthetic coding sequence
atggccagcgaggccgagaagaccttccacagatttgctgcctttggagagagcagcagcagcggcacagagatgaacaacaagaacttcagcaagctgtgcaaggactgtggcatcatggatggcaagacagtgaccagcacagatgtggacatcgtgttcagcaaggtgaaggccaagaatgcccggaccatcaccttccagcagttcaaggaggccgtgaaggagctgggccagaagcgcttcaagggcaagagcccagatgaggtgctggagaacatctacggcctgatggagggcaaggaccctgccaccaccggggccaccaaggccaccaccgtgggcgctgtggaccggctgacagacaccagcaagtacacaggcacccacaaggagagatttgatgaaagtggaaaaggaaaaggaattgctggccgggaggagatgacagacaacacaggctacgtgtctggctacaagggcagcggcacctatgacaagaagaccaagtag

SEQ ID NO: 18991 - DNA, 3582 bp, synthetic construct
  source 1..3582: mol_type = other DNA; note = Synthetic coding sequence
atgtggagggtgaagaagctgagcctgagcctgagccccagcccccagacaggcaagcccagcatgaggacccccctgcgggagctgaccctgcagcccggggccctgaccaacagcggcaagaggagccctgcctgcagcagcctgacccccagcctgtgcaagctgggcctgcaggagggcagcaacaacagcagccctgtggactttgtgaacaacaagaggacagacctgagcagcgagcacttcagccacagcagcaagtggctggagacctgccagcatgaaagtgatgagcagcccctggaccccatcccccagatcagcagcacccccaagaccagcgaggaggccgtggaccccctgggcaactacatggtgaagaccatcgtgctggtgcccagccccctgggccagcagcaggacatgatctttgaggcccggctggacaccatggccgagaccaacagcatcagcctgaatggccccctgaggacagatgacctggtgcgggaggaggtggccccctgcatgggagaccgcttcagcgaggtggccgctgtgtctgagaagcccatcttccaggagagccccagccacctgctggaggagagcccccccaacccctgcagcgagcagctgcactgcagcaaggagagcctgagcagcaggacagaagctgtgcgggaggacctggtgcccagcgagagcaatgccttcctgcccagctctgtgctgtggctgagccccagcacagccctggccgctgacttccgggtgaaccacgtggaccctgaggaggagatcgtggagcacggggccatggaggagcgggagatgaggttccccacccaccccaaggagagcgagacagaggaccaggccctggtgtcctctgtggaggacatcctgagcacctgcctgacccccaacctggtggagatggagagccaggaggcccctggccctgctgtggaggatgtgggccgcatcctgggcagtgacacagagagctggatgagccccctggcctggctggagaagggcgtgaacacctctgtgatgctggagaacctgcggcagagcctgagcctgcccagcatgctgagagatgctgccatcggcaccacccccttcagcacctgcagcgtgggcacctggttcaccccatctgccccccaggagaagagcaccaacaccagccagacaggcctggtgggcaccaagcacagcaccagcgagacagagcagctgctgtgtggccggcccccagacctgacagccctgagcagacatgacctggaggacaacctgctgagcagcctggtgatcctggaggtgctgagccggcagctgcgggactggaagagccagctggccgtgccccaccctgagacccaggacagcagcacccagacagacaccagccacagcggcatcaccaacaagctgcagcacctgaaggagagccatgagatgggccaggccctgcagcaggccagaaatgtgatgcagagctgggtgctgatcagcaaggagctgatcagcctgctgcacctgagcctgctgcacctggaggaggacaagaccaccgtgtcccaggagagcagaagagctgagaccctggtgtgctgctgctttgacctgctgaagaagctgcgggccaagctgcagagcctgaaggccgagcgggaggaggcccggcaccgggaggagatggccctgcggggcaaggatgctgctgagatcgtgctggaggccttctgtgcccacgccagccagaggatcagccagctggagcaggacctggcctccatgagggagttccggggcctgctgaaggatgcccagacccagctggtgggcctgcacgccaagcaggaggagctggtgcagcagacagtgtccctgaccagcaccctgcagcaggactggaggtccatgcagctggactacaccacctggacagccctgctgagccgcagccggcagctgacagagaagctgactgtgaagagccagcaggccctgcaggagagagatgtggccatcgaggagaagcaggaggtgtcccgggtgctggagcaggtgtctgcccagctggaggagtgcaagggccagacagagcagctggagctggagaacagccggctggccacagacctgcgggcccagctgcagatcctggccaacatggacagccagctgaaggagctgcagagccagcacacccactgtgcccaggacctggccatgaaggatgagctgctgtgccagctgacccagagcaatgaggagcaggccgcccagtggcagaaggaggagatggccctgaagcacatgcaggccgagctgcagcagcagcaggccgtgctggccaaggaggtgcgggacctgaaggagaccctggagtttgctgaccaggagaaccaggtggcccacctggagctgggccaggtggagtgccagctgaagaccaccctggaggtgctgcgggagaggagcctgcagtgtgagaacctgaaggacacagtggagaacctgacagccaagctggccagcaccatcgctgacaaccaggagcaggacctggagaagacccggcagtacagccagaagctgggcctgctgacagagcagctgcagagcctgaccctcttcctgcagaccaagctgaaggagaagacagagcaggagaccctgctgctgagcacagcctgcccccccacccaggagcaccccctgcccaatgacaggaccttcctgggcagcatcctgacagctgtggctgatgaggagcctgagagcacccctgtgcccctgctgggcagtgacaagagcgccttcaccagggtggcctccatggtgtccctgcagcctgctgagaccccaggcatggaggagagcctggccgagatgagcatcatgaccacagagctgcagagcctgtgcagcctgctgcaggagagcaaggaggaggccatccgcaccctgcagaggaagatctgtgagctgcaggcccggctgcaggcccaggaggagcagcaccaggaggtgcagaaggccaaggaggccgacatcgagaagctgaaccaggccctgtgcctgcgctacaagaatgagaaggagctgcaggaggtgatccagcagcagaatgagaagatcctggagcagattgacaagagcggggagctgatcagcctgcgggaggaggtgacccacctgaccaggagcctgcggcgggcagagacagagaccaaggtgctgcaggaggccctggccggccagctggacagcaactgccagcccatggccaccaactggatccaggagaaggtgtggctgagccaggaggtggacaagctgcgggtgatgttcctggagatgaagaatgagaaggagaagctgatgatcaagttccagagccacaggaacatcctggaggagaacctgcggcggagtgacaaggagctggagaagctggatgacatcgtgcagcacatctacaagaccctgctgagcatccctgaggtggtgcggggctgcaaggagctgcagggcctgctggagttcctgtcctag

SEQ ID NO: 18992 - DNA, 9141 bp, synthetic construct
  source 1..9141: mol_type = other DNA; note = Synthetic coding sequence
atgaggggccggcggggccggccccccaagcagcctgctgccccagctgctgagcgctgtgccccagcccctcctcctcctcctcctccacccaccagcggccccatcggcggcctgcggagccgccaccggggcagcagccggggccgctgggccgccgcccaggccgaggtggcccccaagacccggctgagcagcccccggggcggcagcagcagcaggaggaagcccccacctcctcctccagccccacccagcaccagcgcccctggccggggcggccggggcggcggcggcggccgcactggaggcggcggcggcggcggccacctggcccggaccacagctgcccggcgggctgtgaacaaggtggtgtatgatgaccatgaaagtgaggaggaggaggaggaggaggacatggtgtctgaggaggaggaggaggaggatggagatgctgaggagacccaggacagtgaagatgatgaagaagatgagatggaggaggatgatgatgacagcgactacccagaggagatggaggatgatgatgatgatgccagctactgcacagagagcagcttccgcagccacagcacctacagcagcaccccaggccgcaggaagccccgggtgcaccggcccaggagccccatcctggaggagaaggacatcccccccctggagttccccaagagcagcgaggacctgatggtgcccaatgagcacatcatgaatgtgattgccatctatgaggtgctgaggaactttggcaccgtgctgcggctgagccccttccgctttgaggacttctgtgccgccctggtgtcccaggagcagtgcaccctgatggccgagatgcacgtggtgctgctgaaggctgtgctgcgggaggaggacaccagcaacaccacctttggacctgctgacctgaaggacagcgtgaacagcaccctgtacttcattgatggcatgacctggccagaggtgctgcgggtgtactgtgagagtgacaaggagtaccaccacgtgctgccctaccaggaggccgaggactacccctacggccctgtggagaacaagatcaaggtgctgcagttcctggtggaccagttcctgaccaccaacatcgcccgggaggagctgatgtctgaaggagtcatccagtatgatgaccactgccgggtgtgccacaagctgggggacctgctgtgctgtgagacctgcagcgctgtgtaccacctggagtgtgtgaagccacccctggaggaggtgcctgaagatgagtggcagtgtgaggtgtgtgtggcccacaaggtgcctggggtgacagactgtgtggccgagatccagaagaacaagccctacatcagacatgagcccatcggctatgacaggagcaggaggaagtactggttcctgaacagaagactcatcatcgaggaggacacagaaaatgaaaatgagaagaagatctggtactacagcaccaaggtgcagctggccgagctgattgactgcctggacaaggactactgggaggccgagctgtgcaagatcctggaggagatgagggaggagatccaccgccacatggacatcacagaggacctgaccaacaaggcccggggcagcaacaagagcttcctggccgccgccaatgaggagatcctggagagcatccgggccaagaagggggacatcgacaacgtgaagagccctgaggagacagagaaggacaagaatgaaacagaaaatgacagcaaggatgctgagaagaaccgggaggagtttgaggaccagagcctggagaaggacagtgatgacaagaccccagatgatgatcctgagcagggcaagtctgaggagcccacagaggtgggggacaagggcaacagcgtgtctgccaacctgggggacaacaccaccaatgccaccagcgaggagaccagccccagcgagggccgcagccctgtgggctgcctgtctgagaccccagacagcagcaacatggccgagaagaaggtggccagcgagctgccccaggatgtgcctgaggagcccaacaagacctgtgagagcagcaacaccagcgccaccaccaccagcatccagcccaacctggagaacagcaacagcagcagcgagctgaacagcagccagagcgagagcgccaaggctgctgatgatcctgaaaatggagagcgggagagccacacccctgtgtccatccaggaggagatcgtgggggacttcaagtctgagaagagcaatggagagctgtctgagagccctggggccggcaagggggccagcggcagcacccgcatcatcacccggctgagaaatccagacagcaagctgagccagctgaagagccagcaggtggccgccgccgcccacgaggccaacaagctgttcaaggagggcaaggaggtgctggtggtgaacagccagggcgagatcagccggctgagcaccaagaaggaggtgatcatgaagggcaacatcaacaactacttcaagctgggccaggagggcaagtacagagtgtaccacaaccagtacagcaccaacagctttgccctgaacaagcaccagcacagagaagatcatgacaagaggaggcacctggcccacaagttctgcctgaccccagctggggagttcaagtggaatggatctgtgcacggcagcaaggtgctgaccatcagcaccctgcggctgaccatcacccagctggagaacaacatccccagcagcttcctgcaccccaactgggccagccaccgggccaactggatcaaggctgtgcagatgtgcagcaagccccgggagtttgccctggccctggccatcctggagtgtgctgtgaagcctgtggtgatgctgcccatctggagggagagcctgggccacacccggctgcacaggatgaccagcattgagcgggaggagaaggagaaggtgaagaagaaggagaagaagcaggaggaggaggagaccatgcagcaggccacctgggtgaagtacaccttccctgtgaagcaccaggtgtggaagcagaagggggaggagtacagagtgacaggctatggaggctggagctggatcagcaagacccacgtgtacagatttgtgcccaagctgcccggcaacaccaacgtgaactacaggaagagcctggagggcaccaagaacaacatggatgagaacatggatgaaagtgacaagaggaagtgcagccgcagccccaagaagatcaagattgaaccagattctgagaaggatgaggtgaagggcagtgatgctgccaagggagctgaccagaatgagatggacatcagcaagatcacagagaagaaggaccaggatgtgaaggagctgctggacagcgacagcgacaagccctgcaaggaggagcccatggaggtggatgatgacatgaagacagagagccacgtgaactgccaggagagcagccaggtggatgtggtgaatgtgtctgagggcttccacctgcggaccagctacaagaagaagaccaagagcagcaagctggatggcctgctggagcggcgcatcaagcagttcaccctggaggagaagcagaggctggagaagatcaagctggagggcggcatcaagggcatcggcaagaccagcaccaacagcagcaagaacctgtctgagagccctgtgatcaccaaggccaaggagggctgccagagcgacagcatgaggcaggagcagagccccaatgccaacaatgaccagcctgaggacctgatccagggctgcagcgagagtgacagctctgtgctgaggatgtctgaccccagccacaccaccaacaagctgtaccccaaggacagagtgctggatgatgtgtccatccgcagccctgagaccaagtgccccaagcagaacagcattgaaaatgacatcgaggagaaggtgtctgacctggccagccggggccaggagcccagcaagagcaagaccaagggaaatgacttcttcattgatgacagcaagctggccagcgcagatgacatcggcaccctcatctgcaagaacaagaagcccctcatccaggaggagagtgacaccatcgtgagcagcagcaagagcgccctgcacagctctgtgcccaagagcaccaatgacagagatgccacccccctgagccgggccatggactttgagggcaagctgggctgtgacagcgagagcaacagcaccctggagaacagcagtgacacagtgtccatccaggacagcagcgaggaggacatgattgtgcagaacagcaatgaaagcatcagcgagcagttccgcacccgggagcaggatgtggaggtgctggagcccctgaagtgtgagctggtgtctggagagagcacaggcaactgtgaggaccggctgcctgtgaagggcacagaggccaacgggaagaagcccagccagcagaagaagctggaggagaggcctgtgaacaagtgcagcgaccagatcaagctgaagaacaccacagacaagaagaacaatgaaaatcgggagagcgagaagaagggccagaggaccagcaccttccagatcaacgggaaggacaacaagcccaagatctacctgaagggagaatgtctgaaggagatcagcgagagccgggtggtgtctggaaatgtggagcccaaggtgaacaacatcaacaagatcatcccagaaaatgacatcaagagcctgactgtgaaggagagcgccatccggcccttcatcaatggagatgtgatcatggaggacttcaatgaaagaaacagcagcgagaccaagagccacctgctgagcagcagtgatgctgagggcaactacagagacagcctggagaccctgcccagcaccaaggagagtgacagcacccagaccaccaccccatctgccagctgcccagagagcaacagcgtgaaccaggtggaggacatggagattgagaccagcgaggtgaagaaggtgaccagcagccccatcaccagcgaggaggagagcaacctgagcaatgacttcattgatgaaaatggcctgcccatcaacaagaatgaaaatgtgaatggagagagcaagaggaagacagtcatcacagaggtgaccaccatgaccagcacagtggccacagagagcaagacagtcatcaaggtggagaagggggacaagcagacagtggtgagcagcacagagaactgtgccaagagcacagtgaccaccaccaccaccaccgtgaccaagctgagcacccccagcactggaggctctgtggacatcatctctgtgaaggagcagagcaagacagtggtgaccaccaccgtgacagacagcctgaccaccaccggcggcaccctggtgacctccatgacagtgtccaaggagtacagcacccgggacaaggtgaagctgatgaagttcagccggcccaagaagaccaggtctggaacagccctgcccagctacaggaagtttgtgaccaagagcagcaagaagagcatctttgtgctgcccaatgatgacctgaagaagctggccaggaagggcggcatccgggaggtgccctacttcaactacaatgccaagccagccctggacatctggccctaccccagcccccggcccaccttcggcatcacctggagataccgcctgcagacagtgaagagcctggccggcgtgtccctgatgctgcggctgctgtgggccagcctgcgctgggatgacatggccgccaaggcccctcctgggggcggcaccaccaggacagagaccagcgagacagagatcaccaccacagagatcatcaagagaagagatgtgggcccctacggcatccgctctgagtactgcatcaggaagatcatctgccccatcggcgtgcctgagacccccaaggagacccccaccccccagaggaagggcctgcggagcagcgccctgcggcccaagaggcctgagacccccaagcagacaggccctgtgatcatcgagacctgggtggccgaggaggagctggagctgtgggagatccgggcctttgctgagcgggtggagaaggagaaggcccaggccgtggagcagcaggccaagaagaggctggagcagcagaagcccaccgtcatcgccaccagcaccaccagccccaccagcagcaccaccagcaccatcagccctgcccagaaggtgatggtggcccccatcagcggctctgtgaccaccggcaccaagatggtgctgaccaccaaggtgggcagccctgccaccgtgaccttccagcagaacaagaacttccaccagacctttgccacctgggtgaagcagggccagagcaacagcggcgtggtgcaggtgcagcagaaggtgctgggcatcatccccagcagcacaggcaccagccagcagaccttcaccagcttccagcccaggacagccaccgtgaccatccggcccaacaccagcggcagcggcggcaccaccagcaacagccaggtgatcaccggcccccagatccggcccggcatgaccgtcatccgcacccccctgcagcagagcaccctgggcaaggccatcatccgcacccctgtgatggtgcagcccggggccccccagcaggtgatgacccagatcatccggggccagcctgtgtccacagctgtgtctgcccccaacacagtgagcagcaccccaggccagaagagcctgaccagcgccaccagcaccagcaacatccagagcagcgccagccagcccccccggccccagcagggccaggtgaagctgaccatggcccagctgacccagctgacccagggccatggaggcaaccagggcctgactgtggtgatccagggccagggccagaccaccggccagctgcagctgatcccccagggcgtgacagtgctgcccggccctggccagcagctgatgcaggccgccatgcccaatggaacagtgcagcgcttcctgttcacccccctggccaccacagccaccacagccagcaccaccaccaccaccgtgtccaccacagctgctggcactggagagcagaggcagagcaagctgagcccccagatgcaggtgcaccaggacaagaccctgcccccagcccagagcagctctgtgggccctgctgaggcccagccccagacagcccagcccagcgcccagccccagccccagacccagccccagagccctgcccagcctgaggtgcagacccagcctgaggtgcagacccagaccaccgtgagcagccacgtgcccagcgaggcccagcccacccacgcccagagcagcaagccccaggtggccgcccagagccagccccagagcaatgtgcagggccagagccctgtgcgggtgcagagccccagccagacccgcatccggcccagcacccccagccagctgagccctggccagcagagccaggtgcagaccaccaccagccagcccatccccatccagccccacaccagcctgcagatccccagccagggccagccccagagccagccccaggtgcagagcagcacccagaccctgagcagcggccagaccctgaaccaggtgacagtgagcagccccagccggccccagctgcagatccagcagccccagccccaggtgattgctgtgccccagctgcagcagcaggtgcaggtgctgagccagatccagagccaggtggtggcccagatccaggcccagcagagcggcgtgccccagcagatcaagctgcagctgcccatccagatccagcagagcagcgctgtgcagacccaccagatccagaatgtggtgacagtgcaggccgcctctgtgcaggagcagctgcagagggtgcagcagctgcgggaccagcagcagaagaagaagcagcagcagatcgagatcaagcgggagcacaccctgcaggccagcaaccagagcgagatcatccagaagcaggtggtgatgaagcacaatgctgtgattgagcacctgaagcagaagaagtccatgaccccagctgagcgggaggagaaccagaggatgattgtgtgcaaccaggtgatgaagtacatcctggacaagattgacaaggaggagaagcaggccgccaagaagaggaagcgggaggagagcgtggagcagaagaggagcaagcagaatgccaccaagctgagcgccctgctcttcaagcacaaggagcagctgcgggcagagatcctgaagaagagggccctgctggacaaggacctgcagatcgaggtgcaggaggagctgaagagggacctgaagatcaagaaggagaaggacctgatgcagctggcccaggccacagctgtggccgccccctgcccccctgtgaccccagcccccccagcccccccagcccccccacccagccccccacctcctcctgctgtgcagcacacaggcctgctgagcacccccaccctgcctgctgccagccagaagaggaagcgggaggaggagaaggacagcagcagcaagagcaagaagaagaagatgatcagcaccaccagcaaggagaccaagaaggacaccaagctgtactgcatctgcaagaccccctatgatgagagcaagttctacatcggctgtgaccgctgccagaactggtaccacggccgctgtgtgggcatcctgcagagcgaggccgagctgattgatgaatatgtgtgcccccagtgccagagcacagaagatgccatgacagtgctgacccccctgacagagaaggactatgagggcctgaagagggtgctgcggagcctgcaggcccacaagatggcctggcccttcctggagcctgtggaccccaatgatgccccagactactatggagtcatcaaggagcccatggacctggccaccatggaggagcgggtgcagaggcgctactatgagaagctgacagaatttgtggccgacatgaccaagatctttgacaactgccgctactacaaccccagcgacagccccttctaccagtgtgccgaggtgctggagagcttctttgtgcagaagctgaagggcttcaaggccagccgcagccacaacaacaagctgcagagcacagccagctag

SEQ ID NO: 18993 - DNA, 927 bp, synthetic construct
  source 1..927: mol_type = other DNA; note = Synthetic coding sequence
atggccagcagcaacacagtgctgatgaggctggtggccagcgcctacagcatcgcccagaaggccggcatgattgtgagaagagtgattgctgagggggacctgggcatcgtggagaagacctgtgccacagacctgcagaccaaggctgaccggctggcccagatgagcatctgcagcagcctggccaggaagttccccaagctgaccatcatcggggaggaggacctgcccagcgaggaggtggaccaggagctgattgaggacagccagtgggaggagatcctgaagcagccctgccccagccagtacagcgccatcaaggaggaggacctggtggtgtgggtggaccccctggatggcaccaaggagtacacagagggcctgctggacaacgtgacagtgctgattggaattgcctatgagggcaaggccatcgccggggtcatcaaccagccctactacaactatgaagctggcccagatgctgtgctgggccgcaccatctggggcgtgctgggcctgggcgccttcggcttccagctgaaggaggtgcctgctgggaagcacatcatcaccaccaccaggagccacagcaacaagctggtgacagactgtgtggccgccatgaacccagatgctgtgctgcgggtgggcggggccggcaacaagatcatccagctgattgagggcaaggccagcgcctacgtgtttgccagccctggctgcaagaagtgggacacctgtgcccctgaggtgatcctgcatgctgtgggcggcaagctgacagacatccacggcaatgtgctgcagtaccacaaggatgtgaagcacatgaacagcgctggggtgctggccaccctgagaaattatgactactatgccagccgggtgcctgagagcatcaagaatgccctggtgccctag

SEQ ID NO: 18994 - DNA, 1212 bp, synthetic construct
  source 1..1212: mol_type = other DNA; note = Synthetic coding sequence
atgagcggcagtgatggcggcctggaggaggagcctgagctgagcatcaccctgaccctgaggatgctgatgcacggcaaggaggtgggcagcatcatcggcaagaagggggagaccgtgaagaggatccgggagcagagcagcgcccgcatcaccatcagcgagggcagctgcccagagcgcatcaccaccatcaccggcagcacagctgctgtgttccacgctgtgtccatgattgccttcaagctggatgaggacctgtgtgccgccccagccaatggaggaaatgtgtcccggccccctgtgaccctgcggctggtgatcccagccagccagtgtggcagcctgattggcaaggccggcaccaagatcaaggagatccgggagaccactggagcccaggtgcaggtggccggggacctgctgcccaacagcacagaaagagctgtgacagtgtctggagtgcctgatgccatcatcctgtgtgtgcggcagatctgtgccgtcatcctggagagcccccccaagggggccaccatcccctaccaccccagcctgagcctgggcaccgtgctgctgagcgccaaccagggcttctctgtgcagggccagtatggagctgtgaccccagctgaggtgaccaagctgcagcagctgagcagccatgctgtgccctttgccacccccagcgtggtgcccggcctggaccccggcacccagaccagcagccaggagttcctggtgcccaatgacctgattggctgtgtgattggccggcagggcagcaagatcagcgagatccggcagatgtctggggcccacatcaagattggcaaccaggccgagggcgctggggagcggcacgtgaccatcaccggcagccctgtgtccatcgccctggcccagtacctgatcacagcctgcctggagacagccaagagcaccagcggcggcacccccagcagcgccccagctgacctgcctgcccccttcagcccccccctgacagccctgcccacagcccctcctggcctgctgggcaccccctatgccatcagcctgagcaacttcatcggcctgaagcccatgcccttcctggccctgcccccagccagccctggccccccacctggcctggccgcctacacagccaagatggccgccgccaacggcagcaagaaggccgagcggcagaagttcagcccctactag

SEQ ID NO: 18995 - DNA, 654 bp, synthetic construct
  source 1..654: mol_type = other DNA; note = Synthetic coding sequence
atgagcagcaaggtgtcccgggacaccctgtatgaagctgtgcgggaggtgctgcacggcaaccagaggaagaggaggaagttcctggagaccgtggagctgcagatcagcctgaagaactatgacccccagaaggacaagcgcttcagcggcaccgtgcggctgaagagcaccccccggcccaagttctctgtgtgtgtgctgggggaccagcagcactgtgatgaggccaaggctgtggacatcccccacatggacatcgaggccctgaagaagctgaacaagaacaagaagctggtgaagaagctggccaagaagtatgatgccttcctggccagcgagagcctcatcaagcagatcccccgcatcctgggccctggcctgaacaaggccggcaagttccccagcctgctgacccacaatgaaaacatggtggccaaggtggatgaggtgaagagcaccatcaagttccagatgaagaaggtgctgtgcctggccgtggccgtgggccacgtgaagatgacagatgatgagctggtgtacaacatccacctggccgtgaacttcctggtgtccctgctgaagaagaactggcagaatgtgcgggccctgtacatcaagagcaccatgggcaagccccagaggctgtactag

SEQ ID NO: 18996 - DNA, 3159 bp, synthetic construct
  source 1..3159: mol_type = other DNA; note = Synthetic coding sequence
atggagggcagcgagcctgtggccgcccaccagggcgaggaggccagctgcagctcctggggcaccggcagcaccaacaagaacctgcccatcatgagcacagcctctgtggagattgatgatgccctgtacagccggcagagatatgtgctgggggacacagccatgcagaagatggccaagagccacgtgttcctgagcggcatgggcggcctgggcctggagatcgccaagaacctggtgctggccggcatcaaggctgtgaccatccatgacacagagaagtgccaggcctgggacctgggcaccaacttcttcctgtctgaagatgatgtggtgaacaagaggaacagagctgaggccgtgctgaagcacatcgccgagctgaacccctacgtgcacgtgaccagcagctctgtgcccttcaatgagaccacagacctgtccttcctggacaagtaccagtgtgtggtgctgacagagatgaagctgcccctgcagaagaagatcaatgacttctgccgcagccagtgcccccccatcaagttcatctctgcagatgtgcacggcatctggagccgcctcttctgtgactttggagatgaatttgaggtgctggacaccactggagaggagcccaaggagatcttcatcagcaacatcacccaggccaaccctggcatcgtgacctgcctggagaaccacccccacaagctggagaccggccagttcctgaccttccgggagatcaatggcatgacaggcctgaatggcagcatccagcagatcaccgtcatcagccccttctccttcagcattggagacaccacagagctggagccctacctgcacggcggcattgctgtgcaggtgaagacccccaagacagtgttctttgagagcctggagcggcagctgaagcaccccaagtgcctgattgtggacttcagcaaccctgaggcccccctggagatccacacagccatgctggccctggaccagttccaggagaagtacagcaggaagcccaacgtgggctgccagcaggacagcgaggagctgctgaagctggccaccagcatcagcgagaccctggaggagaagccagatgtgaatgctgacatcgtgcactggctgtcctggacagcccagggcttcctgagccccctggccgctgctgtgggcggcgtggccagccaggaggtgctgaaggctgtgacaggcaagttcagccccctgtgccagtggctgtacctggaggccgctgacatcgtggagagcctgggcaagccagaatgtgaggagttcctgcccaggggggacagatatgatgccctgcgggcctgcatcggggacaccctgtgccagaagctgcagaacctgaacatcttcctggtgggctgtggggccatcggctgtgagatgctgaagaactttgccctgctgggcgtgggcaccagcaaggagaagggcatgatcaccgtgacagatcctgacctgattgagaagagcaacctgaaccggcagttcctgttccggccccaccacatccagaagcccaagagctacacagctgctgatgccaccctgaagatcaacagccagatcaagattgatgcccacctgaacaaggtgtgccccaccacagagaccatctacaatgatgagttctacaccaagcaggacgtcatcatcacagccctggacaacgtggaggcccggcgctacgtggacagccgctgcctggccaacctgcggcccctgctggacagcggcaccatgggcaccaagggccacacagaggtgattgtgccccacctgacagagagctacaacagccaccgggaccccccagaggaggagatccccttctgcaccctgaagagcttccctgctgccatcgagcacaccatccagtgggcccgggacaagtttgagagcagcttcagccacaagcccagcctcttcaacaagttctggcagacctacagcagcgctgaggaggtgctgcagaagatccagagcggccacagcctggagggctgcttccaggtgatcaagctgctgagcagaagacccaggaactggagccagtgtgtggagctggcccggctgaagtttgagaagtacttcaaccacaaggccctgcagctgctgcactgcttccccctggacatccggctgaaggatggcagcctcttctggcagagccccaagaggcctcccagccccatcaagtttgacctgaatgagcccctgcacctgtccttcctgcagaatgctgccaagctgtatgccaccgtgtactgcatcccctttgctgaggaggacctgtctgcagatgccctgctgaacatcctgtctgaggtgaagatccaggagttcaagcccagcaacaaggtggtgcagacagatgaaacagccaggaagccagaccacgtgcccatcagcagtgaagatgaaagaaatgccatcttccagctggagaaggccatcctgagcaatgaggccaccaagagtgacctgcagatggctgtgctgagctttgagaaggatgatgaccacaacggccacatcgacttcatcacagctgccagcaacctgcgggccaagatgtacagcattgagcctgctgaccgcttcaagaccaagagaattgctgggaagatcatcccagccatcgccaccaccacagccaccgtgtctggcctggtggccctggagatgatcaaggtgactggaggctacccctttgaggcctacaagaactgcttcctgaacctggccatccccatcgtggtgttcacagagaccacagaggtgaggaagaccaagatcagaaatggcatctccttcaccatctgggaccgctggacagtgcacggcaaggaggacttcaccctgctggacttcatcaatgctgtgaaggagaagtatggaattgagcccaccatggtggtgcagggcgtgaagatgctgtatgtgcctgtgatgcctggccacgccaagaggctgaagctgaccatgcacaagctggtgaagcccaccacagagaagaagtatgtggacctgactgtgtcctttgccccagacattgatggagatgaggacctgcccggcccccctgtgcgctactacttcagccatgacacagactag

SEQ ID NO: 18997 - DNA, 1134 bp, synthetic construct
  source 1..1134: mol_type = other DNA; note = Synthetic coding sequence
atgctgcggctggtgcccactggagcccgggccatcgtggacatgtcctatgcccggcacttcctggacttccagggcagcgccatcccccaggccatgcagaagctggtggtgacccggctgagccccaacttccgggaggccgtgaccctgagccgggactgccctgtgcccctgcctggagatggagacctgctggtgaggaacagatttgtgggcgtgaatgccagtgacatcaactacagcgctggccgctatgaccccagcgtgaagcccccatttgacatcggctttgagggcattggagaggtggtggccctgggcctgagcgccagcgcccgctacacagtgggccaggccgtggcctacatggcccctggcagctttgctgagtacacagtggtgcctgccagcatcgccacccctgtgcccagcgtgaagccagagtacctgaccctgctggtgtctggcaccacagcctacatcagcctgaaggagctgggcggcctgtctgagggcaagaaggtgctggtgacagctgctgctgggggcaccggccagtttgccatgcagctgagcaagaaggccaagtgccacgtgattggcacctgcagcagtgatgagaagagcgccttcctgaagagcctgggctgtgaccggcccatcaactacaagacagagcctgtgggcaccgtgctgaagcaggagtacccagagggcgtggatgtggtgtatgaatctgtgggcggggccatgtttgacctggccgtggatgccctggccaccaagggccgcctgattgtgattggcttcatcagcggctaccagacccccaccggcctgagccctgtgaaggccggcaccctgcctgccaagctgctgaagaagagcgcctctgtgcagggcttcttcctgaaccactacctgagcaagtaccaggccgccatgagccacctgctggagatgtgtgtgtctggggacctggtgtgtgaggtggacctgggggacctgagccctgagggccgcttcaccggcctggagagcatcttccgggctgtgaactacatgtacatgggcaagaacacaggcaagatcgtggtggagctgccccacagcgtgaacagcaagctgtag

SEQ ID NO: 18998 - DNA, 2538 bp, synthetic construct
  source 1..2538: mol_type = other DNA; note = Synthetic coding sequence
atgagcaacagccggcccaggagcagaagagatgctgggggcggggccggggctgctggaagagatgagctggtgagccgcagcctgcagagcgctgagcactgcctgggcgtgcaggactttggaacagcctatgcccactacctgctggtgctgagcctggcccctgagctgaagcatgatgtgaaggagaccttccagtacaccctcttccgctgggccgaggagctggatgccctgagccgcatccaggacctgctgggctgctatgagcaggccctggagctgttcccagatgatgaggtgatctgcaacagcatgggagagcacctgttcaggatgggcttcagagatgaggccgccggctacttccacaaggctgtgaagctgaacccagacttcagtgatgccaaggagaacttctacagagtggccaactggctggtggagcgctggcacttcatcatgctgaatgacaccaagaggaacaccatctacaatgctgccatccagaaggctgtgtgcctgggcagcaagtctgtgctggacatcggggccggcaccggcatcctgtccatgtttgccaagaaggccggggcccacagcgtgtatgcctgtgagctgagcaagaccatgtatgagctggcctgtgatgtggtggccgccaacaagatggaggccggcatcaagctgctgcacaccaagagcctggacatcgagatccccaagcacatccctgagcgggtgtccctggtggtgacagagaccgtggatgctggcctgtttggagagggcatcgtggagagcctcatccacgcctgggagcacctgctgctgcagcccaagaccaagggggagagcgccaactgtgagaagtatggcaaggtgatcccagccagcgctgtgatcttcggcatggctgtggagtgtgccgagatccgccgccaccaccgggtgggcatcaaggacattgctggcatccacctgcccaccaacgtgaagttccagagccctgcctacagctctgtggacacagaggagaccatcgagccctacaccacagagaagatgagccgggtgcctgggggctacctggccctgacagaatgttttgagatcatgacagtggacttcaacaacctgcaggagctgaagagcctggccaccaagaagccagacaagattggcatccctgtgatcaaggagggcatcctggatgccatcatggtgtggtttgtgctgcagctggatgatgagcacagcctgagcaccagccccagcgaggagacctgctgggagcaggccgtgtaccctgtgcaggacctggccgactactggatcaagccaggggaccacgtgatgatggaggtgtcctgccaggactgctacctgcgcatccagagcatctctgtgctgggcctggagtgtgagatggatgtggccaagagcttcacccagaacaaggacctgctgagcctgggcaatgaagctgagctgtgcagcgccctggccaacctgcagaccagcaagccagatgctgtggagcagacctgcatcctggagagcacagaaattgccctgctgaacaacatcccctaccacgagggcttcaagatggccatgagcaaggtgctgagcagcctgaccccagagaagctgtaccagaccatggacacccactgccagaatgagatgagcagcggcaccggccagagcaacacagtgcagaacatcctggagcccttctacgtgctggatgtgtctgagggcttctctgtgctgcctgtgattgctggcaccctgggccaggtgaagccctacagctctgtggagaaggaccagcacagaattgccctggacctgatcagcgaggccaaccacttccccaaggagaccctggagttctggctgcggcacgtggaggatgagagcgccatgctgcagaggcccaagagtgacaagctgtggagcatcatcatcctggatgtgattgagcccagcggcctcatccagcaggagatcatggagaaggccgccatcagccgctgcctgctgcagagcggcggcaagatcttcccccagtatgtgctgatgtttggcctgctggtggagagccagaccctgctggaggagaatgctgtgcagggcacagagaggaccctgggcctgaacatcgcccccttcatcaaccagttccaggtgcccatccgggtcttcctggacctgagcagcctgccctgcatccccctgagcaagcctgtggagctgctgcggctggacctgatgaccccctacctgaacaccagcaaccgggaggtgaaggtgtatgtgtgcaagagcggccgcctgacagccatccccttctggtaccacatgtacctggatgaggagatccggctggacaccagcagcgaggccagccactggaagcaggccgctgtggtgctggacaaccccatccaggtggagatgggagaggagctggtgctgagcatccagcaccacaagagcaatgtgtccatcaccgtgaagcagtag

SEQ ID NO: 18999 - DNA, 756 bp, synthetic construct
  source 1..756: mol_type = other DNA; note = Synthetic coding sequence
atggctgacctgacctctgtgctgacctctgtgatgttcagccccagcagcaagatgtttattggaggcctgtcctggcagaccagcccagacagcctgcgggactacttcagcaagtttggagagatccgggagtgcatggtgatgagggaccccaccaccaagaggagccggggcttcggctttgtgacctttgctgaccctgcctctgtggacaaggtgctgggccagccccaccacgagctggacagcaagaccatcgaccccaaggtggccttcccccggcgggcccagcccaagatggtgaccaggaccaagaagatctttgtgggcggcctgagcgccaacacagtggtggaggatgtgaagcagtactttgagcagtttgggaaggtggaggatgccatgctgatgtttgacaagaccaccaacagacaccggggctttggatttgtgacctttgaaaatgaagatgtggtggagaaggtgtgtgagatccacttccacgagatcaacaacaagatggtggagtgcaagaaggcccagcccaaggaggtgatgtttcctcctggcacccggggccgggcccggggcctgccctacaccatggatgccttcatgctgggcatgggcatgctgggctaccccaactttgtggccacctacggccggggctacccaggctttgcccccagctatggctaccagttcccagactacctgcctgtgtcccaggacatcatcttcatcaactag

SEQ ID NO: 19000 - DNA, 510 bp, synthetic construct
  source 1..510: mol_type = other DNA; note = Synthetic coding sequence
atggcccccaagagggccaagagaagaacagtggagggcggcagcagctctgtgttctccatgtttgaccagacccagatccaggagttcaaggaggccttcaccgtgattgaccagaacagagatggcatcatcgacaaggaggacctgcgggacacctttgctgccatgggccgcctgaatgtgaagaatgaggagctggatgccatgatgaaggaggccagcggccccatcaacttcaccgtcttcctgaccatgtttggagagaagctgaagggagctgaccctgaagatgtgatcactggagccttcaaggtgctggaccctgagggcaagggcaccatcaagaagaagttcctggaggagctgctgaccacccagtgtgaccgcttcagccaggaggagatcaagaacatgtgggccgccttccccccagatgtgggcggcaatgtggactacaagaacatctgctacgtgatcacccatggagatgccaaggaccaggagtag

SEQ ID NO: 19001 - DNA, 546 bp, synthetic construct
  source 1..546: mol_type = other DNA; note = Synthetic coding sequence
atggccacagagcctgaggccgctgagcctgtggtgcccagcctggtggaccgctacttcacccgctggtacaagccagatgtgaagggcaagttctgtgaggaccactgcatcctgcagcacagcaaccgcatctgtgtgatcaccctggccgagagccaccctgtgctgcagagcggcaagaccatcaagagcatctcctaccagatcagcaccaactgcagccggctgcagaacaaggtgtctgggaagttcaagagaggagcccagttcctgacagagctggcccccctgtgcaagatctactgcagtgatggagaggagtacacagtgagcagctgtgtgcggggccgcctgatggaggtgaatgaaaacatcctgcacaagcccagcatcctgcaggagaagcccagcacagagggctacatcgctgtggtgctgcccaagtttgaggagagcaagagcatcacagagggcctgctgacccagaagcagtatgaggaggtgatggtgaagaggatcaatgccaccacagccaccagctag

SEQ ID NO: 19002 - DNA, 2154 bp, synthetic construct
  source 1..2154: mol_type = other DNA; note = Synthetic coding sequence
atggagctgcgctgtggcggcctgctcttcagcagcagatttgacagcggcaacctggcccacgtggagaaggtggagagcctgagcagtgatggagagggcgtgggcggcggggccagcgccctgaccagcggcatcgccagcagcccagactatgagttcaacgtgtggaccaggccagactgtgccgagacagaatttgaaaatggaaacagatcctggttctacttctctgtgcggggcggcatgcctgggaagctgatcaagatcaacatcatgaacatgaacaagcagagcaagctgtacagccagggcatggccccctttgtgaggaccctgcccacccggccccgctgggagcgcatccgggaccggcccacctttgagatgacagagacccagtttgtgctgagctttgtgcacagatttgtggagggccgcggggccaccaccttctttgccttctgctaccccttctcctacagcgactgccaggagctgctgaaccagctggaccagcgcttccctgagaaccaccccacccacagcagccccctggacaccatctactaccaccgggagctgctgtgctacagcctggatggcctgcgggtggacctgctgaccatcaccagctgccacggcctgcgggaggaccgggagccccggctggagcagctgttcccagacaccagcaccccccggcccttccgctttgctgggaagaggatcttcttcctgagcagccgggtgcaccctggagagacccccagcagctttgtgttcaacggcttcctggacttcatcctgcggccagatgacccccgggcccagaccctgcggcggctgtttgtgttcaagctgatccccatgctgaacccagatggagtggtgcggggccactacagaacagacagccggggcgtgaacctgaaccggcagtacctgaagccagatgctgtgctgcacccagccatctatggagccaaggctgtgctgctgtaccaccacgtgcacagccggctgaacagccagagcagcagcgagcaccagcccagcagctgcctgcccccagatgcccctgtgtctgacctggagaaggccaacaacctgcagaatgaggcccagtgtggccacagcgctgacagacacaatgctgaggcctggaagcagacagagcctgctgagcagaagctgaacagcgtgtggatcatgccccagcagagcgctggcctggaggagagcgccccagacaccatcccccccaaggagagcggcgtggcctactacgtggacctgcacggccacgccagcaagaggggctgcttcatgtatggcaacagcttcagtgatgagagcacccaggtggagaacatgctgtaccccaagctgatcagcctgaacagcgcccactttgacttccagggctgcaacttcagcgagaagaacatgtatgcccgggacagaagagatggccagagcaaggagggcagcggccgggtggccatctacaaggccagcggcatcatccacagctacaccctggagtgcaactacaacacaggccgctctgtgaacagcatcccagctgcctgccacgacaatggccgggccagccccccacctcctccagccttccccagccgctacacagtggagctgtttgagcaggtgggccgggccatggccatcgccgccctggacatggccgagtgcaacccctggccccgcatcgtgctgtctgagcacagcagcctgaccaacctgcgggcctggatgctgaagcacgtgaggaacagccggggcctgagcagcaccctgaatgtgggcgtgaacaagaagaggggcctgcggaccccacccaagagccacaacggcctgcctgtgtcctgcagcgagaacaccctgagccgggcccgctccttcagcacaggcaccagcgctgggggcagcagcagcagccagcagaacagcccccagatgaagaacagccccagcttccccttccacggcagcaggcctgctggcctgcccggcctgggcagcagcacccagaaggtgacccaccgggtgctgggccctgtgcggggcaagcctgtgtgggagcccctgcagcacgtgtttggctgcctgggccactgctggggcaagtag

SEQ ID NO: 19003 - DNA, 678 bp, synthetic construct
  source 1..678: mol_type = other DNA; note = Synthetic coding sequence
atggtgatggccgagggcacagctgtgctgcggaggaacagacctggcaccaaggcccaggacttctacaactggccagatgagagctttgatgagatggacagcaccctggccgtgcagcagtacatccagcagaacatccgggctgactgcagcaacatcgacaagatcctggagcccccagagggccaggatgaaggagtgtggaagtatgagcacctgcggcagttctgcctggagctgaatggcctggccgtgaagctgcagagcgagtgccacccagacacctgcacccagatgacagccacagagcagtggatcttcctgtgtgccgcccacaagacccccaaggagtgcccagccatcgactacaccaggcacaccctggatggagctgcctgcctgctgaacagcaacaagtacttccccagccgggtgtccatcaaggagagctctgtggccaagctgggctctgtgtgccgccgcatctaccgcatcttcagccacgcctacttccaccaccggcagatctttgatgaatatgaaaatgagaccttcctgtgccaccgcttcaccaagtttgtgatgaagtacaacctgatgagcaaggacaacctgattgtgcccatcctggaggaggaggtgcagaacagcgtgtctggagagagcgaggcctag

SEQ ID NO: 19004 - DNA, 1173 bp, synthetic construct
  source 1..1173: mol_type = other DNA; note = Synthetic coding sequence
atggccgcccagaaggacctgtgggatgccatcgtgattggagctggcatccagggctgcttcaccgcctaccacctggccaagcacaggaagaggatcctgctgctggagcagttcttcctgccccacagccggggcagcagccacggccagagccgcatcatcaggaaggcctacctggaggacttctacaccaggatgatgcatgagtgctaccagatctgggcccagctggagcacgaggccggcacccagctgcaccggcagacaggcctgctgctgctgggcatgaaggagaaccaggagctgaagaccatccaggccaacctgagccggcagagggtggagcaccagtgcctgagcagcgaggagctgaagcagcgcttccccaacatccggctgcccagaggagaggtgggcctgctggacaacagcggaggagtcatctatgcctacaaggccctgcgggccctgcaggatgccatccggcagctgggcggcatcgtgagagatggagagaaggtggtggagatcaaccctggcctgctggtgacagtgaagaccaccagccgcagctaccaggccaagagcctggtgatcacagctggcccctggaccaaccagctgctgcggcccctgggcatcgagatgcccctgcagaccctgcgcatcaacgtgtgctactggagggagatggtgcccggcagctatggagtgtcccaggccttcccctgcttcctgtggctgggcctgtgcccccaccacatctacggcctgcccactggagagtacccaggcctgatgaaggtgtcctaccaccacggcaaccacgccgaccctgaggagcgggactgccccacagccaggacagacattggagatgtgcagatcctgagcagctttgtgcgggaccacctgcctgacctgaagccagagcctgctgtgattgagagctgcatgtacaccaacaccccagatgagcagttcatcctggacagacaccccaagtatgacaacatcgtcatcggggccggcttcagcggccacggcttcaagctggcccctgtggtgggcaagatcctgtatgagctgtccatgaagctgacccccagctatgacctggcccccttccgcatcagccgcttccccagcctgggcaaggcccacctgtag

SEQ ID NO: 19005 - DNA, 135 bp, synthetic construct
  source 1..135: mol_type = other DNA; note = Synthetic coding sequence
atgtctgacaagccagacatggccgagattgagaagtttgacaagagcaagctgaagaagacagagatgcaggagaagaaccccctgcccagcaaggagaccatcgagcaggagaagcaggccagcgagagctag

SEQ ID NO: 19006 - DNA, 1323 bp, synthetic construct
  source 1..1323: mol_type = other DNA; note = Synthetic coding sequence
atgcccatccccccacctcctcctcctcctcctggccccccacctccacccaccttccaccaggccaacacagagcagcccaagctgagcagagatgagcagaggggccgcggggccctgctgcaggacatctgcaagggcaccaagctgaagaaggtgaccaacatcaatgacagaagtgcccccatcctggagaagcccaagggcagcagcggcggctacggcagcggcggggccgccctgcagcccaagggcggcctcttccagggcggcgtgctgaagctgcggcctgtgggcgccaaggatggcagcgagaacctggccggcaagccagccctgcagatccccagcagcagagctgctgcccccaggcctcctgtgtctgctgccagcggccggccccaggatgacacagacagcagccgggccagcctgcctgagctgcccaggatgcagaggcccagcctgcctgacctgagccggcccaacaccaccagcagcacaggcatgaagcacagcagcagcgcccctcctcctcctcctcctggccggcgggccaatgccccacccacccccctgcccatgcacagcagcaaggccccagcctacaaccgggagaagcccctgccccccaccccaggccagaggctgcaccctggccgggagggccccccagcccctcctcctgtgaagcccccacccagccctgtgaacatcagaacaggccccagcggccagagcctggcccctcctcctccaccctaccggcagcccccaggagtgcccaacggccccagcagccccaccaatgaaagtgcccctgagctgccccagaggcacaacagcctgcacaggaagaccccaggccctgtgcggggcctggcccctcctccacccaccagcgccagccccagcctgctgagcaacagacctcctcctccagcccgggacccccccagcagaggagctgcccctcctcctcctcctcctgtgatcagaaatggagccagagatgcccctcctcctcctccaccctacaggatgcacggcagcgagccccccagccggggcaagcccccacctccacccagcaggaccccagctggccccccacctcctcctcctccacccctgagaaatggccaccgggacagcatcaccaccgtgcgctccttcctggatgactttgagagcaagtacagcttccaccctgtggaggacttccctgcccctgaggagtacaagcacttccagaggatctaccccagcaagaccaacagagctgcccggggggccccacccctgccccccatcctgaggtag

SEQ ID NO: 19007 - DNA, 2703 bp, synthetic construct
  source 1..2703: mol_type = other DNA; note = Synthetic coding sequence
atgaactacccaggccggggcagccccaggagccctgagcacaacggccggggcggcggcggcggggcctgggagctgggcagtgatgcccggcctgccttcggcggcggcgtgtgctgctttgagcacctgcctggaggagaccctgatgatggagatgtgcccctggccctgctgcggggggagcccggcctgcacctggcccctggaacagatgaccacaaccaccacctggccctggacccctgcctgagtgatgaaaattatgacttcagcagcgctgagagcggcagcagcctgcgctactacagcgagggggagagcggcggcggcggcagcagcctgagcctgcaccccccccagcagccccccctggtgcccaccaacagcggcggcggcggggccaccggcggcagccctggagagaggaagaggacccggctgggcggccctgctgcccggcacagatatgaggtggtgacagagctgggccctgaggaggtgcgctggttctacaaggaggacaagaagacctggaagcccttcatcggctatgacagcctgcgcatcgagctggccttccgcaccctgctgcagaccactggagcccggccccagggcggggacagagatggagaccacgtgtgcagccccactggacctgccagcagcagtggagaagatgatgatgaagatcgggcctgtggcttctgccagagcaccaccggccacgagcctgagatggtggagctggtgaacatcgagcctgtgtgtgtgcggggcggcctgtatgaggtggatgtgacccagggcgagtgctaccctgtgtactggaaccaggccgacaagatccctgtgatgaggggccagtggttcattgatggcacctggcagcccctggaggaggaggagagcaacctgattgagcaggagcacctgaactgcttccggggccagcagatgcaggagaactttgatattgaggtgtccaagagcattgatggcaaggatgctgtgcacagcttcaagctgagcaggaaccacgtggactggcacagcgtggatgaggtgtacctgtacagtgatgccaccaccagcaagatcgccaggacagtgacccagaagctgggcttcagcaaggccagcagcagcggcacccggctgcaccggggctacgtggaggaggccaccctggaggacaagcccagccagaccacccacatcgtgtttgtggtgcatggaattggccagaagatggaccagggccgcatcatcaagaacacagccatgatgagggaggccgccaggaagattgaggagcggcacttcagcaaccacgccacccacgtggagttcctgcctgtggagtggaggagcaagctgaccctggatggagacacagtggacagcatcaccccagacaaggtgcggggcctgcgggacatgctgaacagcagcgccatggacatcatgtactacaccagccccctgtacagagatgagctggtgaagggcctgcagcaggagctgaacagactctacagcctcttctgcagcaggaacccagactttgaggagaagggcggcaaggtgtccatcgtgagccacagcctgggctgcgtcatcacctatgacatcatgacaggctggaaccctgtgcggctgtatgagcagctgctgcagaaggaggaggagctgcctgatgagcgctggatgtcctatgaggagcggcacctgctggatgagctgtacatcaccaagaggcggctgaaggagattgaggagcggctgcacggcctgaaggccagctccatgacccagaccccagccctgaagttcaaggtggagaacttcttctgcatgggcagccccctggccgtgttcctggccctgcggggcatccggcccggcaacacaggcagccaggaccacatcctgccccgggagatctgcaaccggctgctgaacatcttccaccccacagatcctgtggcctaccgcctggagcccctcatcctgaagcactacagcaacatcagccctgtgcagatccactggtacaacaccagcaaccccctgccctatgagcacatgaagcccagcttcctgaacccagccaaggagcccacctctgtgtctgaaaatgaaggcatcagcaccatccccagccctgtgaccagccctgtgctgagccgccgccactatggagagagcatcaccaacatcggcaaggccagcatcctgggcgccgccagcatcggcaagggcctgggcggcatgctgttcagcagatttggccgcagcagcaccacccagagcagcgagaccagcaaggacagcatggaggatgagaagaagcctgtggccagccccagcgccaccaccgtgggcacccagaccctgccccacagcagcagcggcttcctggacagcgcctacttccggctgcaggagagcttcttcaacctgccccagctgctcttcccagaaaatgtgatgcagaacaaggacaatgccctggtggagctggaccacagaattgactttgagctgcgggagggcctggtggagagccgctactggagcgctgtgaccagccacacagcctactggagcagcctggatgtggccctcttcctgctgaccttcatgtacaagcatgaacatgatgatgatgccaagcccaacctggaccccatctag

SEQ ID NO: 19008 - DNA, 1278 bp, synthetic construct
  source 1..1278: mol_type = other DNA; note = Synthetic coding sequence
atgaacaagatgcctgctggggagcaggagtgtgagtacaacaaggagggcaagtactacagcaagggcgtgaagctggtgaggaagaagaagaagatccctggctaccgctggggagacatcaagatcaacatcatcggggagaaggatgacctgcccatccacttctgtgacaagtgtgacctgcccatcaagatctacggccgcatcatcccctgcaagcacgccttctgctaccactgtgccaacctgtatgacaaggtgggctacaaggtgtgcccccgctgccgctaccctgtgctgagaattgaggcccacaagaggggcagcgtcttcatgtgcagcatcgtgcagcagtgcaagaggacctacctgagccagaagagcctgcaggcccacatcaagaggaggcacaagagggccaggaagcaggtgaccagcgccagcctggagaaggtgcggccccacatcgccccaccccagacagagatcagtgacatccccaagaggctgcaggaccgggaccacctgagctacatccccccagagcagcacaccatggtgtccctgcccagcgtgcagcacatgctgcaggagcagcacaaccagccccacaaggacatccaggcccctcctcctgagctgagcctgagcctgcccttccccatccagtgggagaccgtgtccatcttcaccaggaagcacggcaacctgactgtggaccacatccagaacaacagcgacagcggggccaagaagcccaccccaccagactactacccagagtgccagagccagcctgctgtgagcagcccccaccacatcatcccccagaagcagcactacgcccccccacccagccccagcagccctgtgaaccaccagatgccctacccaccccaggatgtggtgacccccaacagcgtgcgcagccaggtgcctgccctgaccaccacctatgaccccagcagcggctacatcatcgtgaaggtgcccccagacatgaacagcccccccctgcgggccccccagagccagaatggaaaccccagcgccagcgagtttgccagccaccactacaacctgaacatcctgccccagttcacagagaaccaggagaccctgagcccccagttcacccagacagatgccatggaccaccggcgctggccagcctggaagaggctgagcccctgcccccccaccaggagccccccacccagcaccctgcacggccgcagccaccacagccaccagaggaggcaccggcgctactag

SEQ ID NO: 19009 - DNA, 1926 bp, synthetic construct
  source 1..1926: mol_type = other DNA; note = Synthetic coding sequence
atgggcccccccctgaagctgttcaagaaccagaagtaccaggagctgaagcaggagtgcatcaaggacagccgcctcttctgtgaccccaccttcctgcctgaaaatgacagcctcttctacaaccggctgctgcccgggaaggtggtgtggaagaggccccaggacatctgtgatgacccccacctgattgtgggcaacatcagcaaccaccagctgacccagggccgcctgggccacaagcccatggtgtctgccttcagctgcctggccgtgcaggagagccactggaccaagaccatccccaaccacaaggagcaggagtgggacccccagaagacagagaagtatgccggcatcttccacttccgcttctggcactttggagagtggacagaggtggtgattgatgacctgctgcccaccatcaacggggacctggtgttctccttcagcacctccatgaatgagttctggaatgccctgctggagaaggcctatgccaagctgctgggctgctatgaggccctggatggcctgaccatcacagacatcatcgtggacttcaccggcaccctggccgagaccgtggacatgcagaagggccgctacacagagctggtggaggagaagtacaagctgtttggagagctgtacaagaccttcaccaagggcggcctcatctgctgcagcattgagagccccaaccaggaggagcaggaggtggagacagactggggcctgctgaagggccacacctacaccatgacagacatcaggaagatccggctgggggagcggctggtggaggtgttttctgctgagaaggtgtacatggtgcggctgaggaaccccctgggccggcaggagtggagcggcccctggagcgagatcagcgaggagtggcagcagctgacagccagtgacaggaagaacctgggcctggtgatgtctgatgatggagagttctggatgagcctggaggacttctgcaggaacttccacaagctgaatgtgtgcagaaatgtgaacaaccccatcttcggcaggaaggagctggagagcgtgctgggctgctggacagtggatgatgaccccctgatgaacagaagtggcggctgctacaacaacagagacaccttcctgcagaacccccagtacatcttcaccgtgcctgaagatggccacaaggtgatcatgagcctgcagcagaaggacctgcggacctacagaaggatgggccgcccagacaactacatcattggatttgagctgttcaaggtggagatgaacaggaagttccggctgcaccacctgtacatccaggagagagctggcaccagcacctacatcgacaccaggacagtgttcctgagcaagtacctgaagaagggcaactacgtgctggtgcccaccatgttccagcacggccgcaccagcgagttcctgctgcgcatcttcagcgaggtgcctgtgcagctgcgggagctgaccctggacatgcccaagatgagctgctggaacctggcccggggctaccccaaggtggtgacccagatcaccgtgcacagcgctgaggacctggagaagaagtatgccaatgagaccgtgaacccctacctggtgatcaagtgtgggaaggaggaggtgcgcagccctgtgcagaagaacacagtgcacgccatctttgacacccaggccatcttctacagaaggaccacagacatccccatcatcgtgcaggtgtggaacagcaggaagttctgtgaccagttcctgggccaggtgaccctggatgctgaccccagcgactgccgggacctgaagagcctgtacctgaggaagaagggcggccccacagccaaggtgaagcagggccacatctccttcaaggtgatcagcagtgatgacctgacagagctgtag

SEQ ID NO: 19010 - DNA, 3180 bp, synthetic construct
  source 1..3180: mol_type = other DNA; note = Synthetic coding sequence
atggctgctgtggccggcagcggggctgctgctgcccccagcagcctgctgctggtggtgggcagcgagtttggcagccctggcctgctgacctacgtgctggaggagctggagcggggcatccgctcctgggatgtggaccccggggtgtgcaacctggatgagcagctgaaggtgtttgtgagccgccacagcgccaccttcagcagcatcgtgaagggccagaggagcctgcaccacagaggagacaacctggagaccctggtgctgctgaaccccagcgacaagagcctgtatgatgagctgaggaacctgctgctggaccctgccagccacaagctgctggtgctggccggcccctgcctggaggagactggagagctgctgctgcagacaggaggcttcagcccccaccacttcctgcaggtgctgaaggaccgggagatccgggacatcctggccaccaccccacctcctgtgcagccccccatcctgaccatcacctgccccaccttcggggactgggcccagctggccccagctgtgcccggcctgcagggcgccctgcggctgcagctgcggctgaaccccccagcccagctgcccaacagcgagggcctgtgtgagttcctggagtatgtggccgagagcctggagccccccagcccctttgagctgctggagccccccaccagcggcggcttcctgcggctgggccggccctgctgctacatcttccctgggggcctgggagatgctgccttctttgctgtgaatggcttcaccgtgctggtgaatggaggcagcaaccccaagagcagcttctggaagctggtgcgccacctggacagagtggatgctgtgctggtgacccaccctggagctgacagcctgcccggcctgaacagcctgctgcggaggaagctggccgagaggtctgaggtggccgccggcggcggctcctgggatgaccggctgcggcggctcatcagccccaacctgggcgtggtgttcttcaatgcctgtgaggccgccagccggctggcccggggggaggatgaagctgagctggccctgagcctgctggcccagctgggcatcacccccctgcccctgagccggggccctgtgcctgccaagcccaccgtgctgtttgagaagatgggcgtgggccgcctggacatgtatgtgctgcacccccccagcgctggagctgagaggaccctggcctctgtgtgtgccctgctggtgtggcaccctgctggccctggagagaaggtggtgcgggtgctcttccctggctgcaccccaccagcctgcctgctggatggcctggtgcggctgcagcacctgcgcttcctgcgggagcctgtggtgaccccccaggacctggagggccctggccgggcagagagcaaggagagcgtgggcagccgggacagcagcaagcgggagggcctgctggccacccacccccggcccggccaggagaggcctggggtggccaggaaggagcccgcccgggcagaggcccccaggaagacagagaaggaggccaagaccccccgggagctgaagaaggaccccaagcccagcgtgtccaggacccagccccgggaggtgcggcgggccgccagctctgtgcccaacctgaagaagaccaatgcccaggccgcccccaagcccaggaaggcccccagcaccagccacagcggcttcccccctgtggccaacggccccaggagcccccccagcctgcgctgtggggaggccagccccccatctgctgcctgtggcagccctgccagccagctggtggccacccccagcctggagctgggccccatcccagctggggaggagaaggccctggagctgcccctggccgccagcagcatcccccggcccaggacccccagccctgagagccacaggagccctgctgagggcagcgagcggctgagcctgagccccctgcggggcggggaggccggcccagatgccagccccaccgtgaccacccccaccgtgaccacccccagcctgcctgctgaggtgggcagcccccacagcacagaggtggatgagagcctgtctgtgtcctttgagcaggtgctgcccccatctgcccccaccagcgaggccggcctgagcctgcccctgcggggcccccgggccaggagaagtgccagcccccatgatgtggacctgtgcctggtgagcccctgtgaatttgagcacaggaaggctgtgcccatggccccagccccagccagccctggcagcagcaatgacagcagcgcccggagccaggagcgggccggcggcctgggcgctgaggagaccccacccacctctgtgtctgagagcctgcccaccctgagtgacagcgaccctgtgcccctggcccctggagctgctgacagtgatgaggacacagagggcttcggcgtgcccaggcatgaccccctgcctgaccccctgaaggtgcccccacccctgcctgaccccagcagcatctgcatggtggaccctgagatgctgccccccaagacagcccggcagacagaaaatgtgtccaggaccaggaagcccctggcccggcccaacagcagagctgctgcccccaaggccacccctgtggccgccgccaagaccaagggcctggccggcggggaccgggccagccggcccctgagcgcccggtctgagcccagcgagaagggcggccgggcccccctgagcaggaagagcagcacccccaagacagccacccggggccccagcggcagcgccagcagcaggcctggggtgtctgccaccccacccaagagccctgtgtacctggacctggcctacctgcccagcggcagcagcgcccacctggtggatgaggagttcttccagagggtgcgggccctgtgctacgtgatcagcggccaggaccagaggaaggaggagggcatgagagctgtgctggatgccctgctggccagcaagcagcactgggaccgggacctgcaggtgaccctcatccccacctttgattctgtggccatgcacacctggtatgcagagacccacgcccggcaccaggccctgggcatcaccgtgctgggcagcaacagcatggtgtccatgcaggatgatgccttccctgcctgcaaggtggagttctag

SEQ ID NO: 19011 - DNA, 4734 bp, synthetic construct
  source 1..4734: mol_type = other DNA; note = Synthetic coding sequence
atggaggccggctctgtggtgcgggccatctttgacttctgccccagcgtgtctgaggagctgcccctgtttgtgggggacatcatcgaggtgctggccgtggtggatgagttctggctgctgggcaagaaggaggatgtgacaggccagttccccagcagctttgtggagatcgtgaccatccccagcctgaaggagggggagcggctgtttgtgtgcatctgtgagttcaccagccaggagctggacaacctgcccctgcacagaggagacctggtgatcctggatggcatccccacagctggctggctgcagggccgcagctgctggggcgcccggggcttcttccccagcagctgtgtgcgggagctgtgcctgagcagccagagccggcagtggcacagccagagcgccctcttccagatccctgagtacagcatgggccaggcccgggccctgatgggcctgagcgcccagctggatgaggagctggacttccgggagggagatgtgatcaccatcattggagtgcctgagcccggctggtttgaaggagagctggagggccggcggggcatcttccctgagggctttgtggagctgctgggccccctgaggacagtggatgaatctgtgagcagcggcaaccaggatgactgcatcgtgaatggagaggtggacacccctgtgggggaggaggagattggaccagatgaagatgaggaggagcccggcacctatggagtggccctgtaccgcttccaggccctggagcccaatgagctggactttgaggtgggggacaagatccgcatcctggccaccctggaggatggctggctggagggcagcctgaagggccgcacaggcatcttcccctacagatttgtgaagctgtgcccagacaccagggtggaggagaccatggccctgccccaggagggcagcctggcccgcatccctgagaccagcctggactgcctggagaacaccctgggcgtggaggagcagagacatgagaccagtgaccacgaggccgaggagccagactgcatcatcagcgaggcccccaccagccccctgggccacctgaccagtgaatatgacacagacaggaacagctaccaggatgaggacacagctgggggcccccccaggagccctggggtggagtgggagatgcccctggccacagacagccccaccagtgaccccacagaggtggtgaatggcatcagcagccagccccaggtgcccttccaccccaacctgcagaagagccagtactacagcacagtgggcggcagccacccccacagcgagcagtacccagacctgctgcccctggaggcccggacccgggactatgccagcctgccccccaagaggatgtacagccagctgaagaccctgcagaagcctgtgctgcccctgtaccggggcagctctgtgtctgccagccgggtggtgaagccccggcagagcagcccccagctgcacaacctggccagctacaccaagaagcaccacaccagctctgtgtacagcatcagcgagcggctggagatgaagccaggcccccaggcccagggcctggtgatggaggccgccacccacagccagggagatggcagcacagacctggacagcaagctgacccagcagctgattgaatttgagaagagcctggccggccctggaacagagccagacaagatcctgcggcacttcagcatcatggacttcaacagcgagaaggacatcgtgcggggcagcagcaagctgatcacagagcaggagctgcctgagaggaggaaggccctgcggcccccaccaccccggccctgcacccctgtgtccaccagcccccacctgctggtggaccagaacctgaagccagccccacccctggtggtgcggcccagcaggcctgcccccctgccccccagcgcccagcagaggaccaatgctgtgagccccaagctgctgagccgccaccggcccacctgtgagaccctggagaaggagggccctggccacatgggccgcagcctggaccagaccagcccctgccccctggtgctggtgcgcatcgaggagatggagcgggacctggacatgtacagccgggcccaggaggagctgaacctgatgctggaggagaagcaggatgagagcagcagagctgagaccctggaggacctgaagttctgtgagagcaacatcgagagcctgaacatggagctgcagcagctgcgggagatgaccctgctgagcagccagagcagcagcctggtggcccccagcggctctgtgtctgcagaaaatcctgagcagaggatgctggagaagagggccaaggtgattgaggagctgctgcagacagagcgggactacatccgggacctggagatgtgcatcgagcgcatcatggtgcccatgcagcaggcccaggtgcccaacatcgactttgagggcctgtttggaaacatgcagatggtgatcaaggtgtccaagcagctgctggccgccctggagatcagtgatgctgtgggccctgtgttcctgggccacagagatgagctggagggcacctacaagatctactgccagaaccatgatgaggccatcgccctgctggagatctatgagaaggatgagaagatccagaagcacctgcaggacagcctggccgacctgaagagcctgtacaatgagtggggctgcaccaactacatcaacctgggcagcttcctgatcaagcctgtgcagagggtgatgagataccccctgctgctgatggagctgctgaacagcaccccagagagccacccagacaaggtgcccctgaccaatgctgtgctggccgtgaaggagatcaacgtgaacatcaatgagtacaagaggaggaaggacctggtgctgaagtacagaaaaggagatgaggacagcctgatggagaagatcagcaagctgaacatccacagcatcatcaagaagagcaacagagtgagcagccacctgaagcacctgaccggctttgccccccagatcaaggatgaggtgtttgaggagacagagaagaacttcaggatgcaggagcggctcatcaagagcttcatccgggacctgagcctgtacctgcagcacatccgggagagcgcctgtgtgaaggtggtggccgctgtgtccatgtgggatgtgtgcatggagcggggccaccgggacctggagcagtttgagcgggtgcaccgctacatcagtgaccagctgttcaccaacttcaaggagaggacagagcggctggtgatcagccccctgaaccagctgctgtccatgttcaccggcccccacaagctggtgcagaagagatttgacaagctgctggacttctacaactgcacagagcgggcagagaagctgaaggacaagaagaccctggaggagctgcagagcgccaggaacaactatgaggccctgaatgcccagctgctggatgagctgcccaagttccaccagtatgcccagggcctcttcaccaactgtgtgcacggctatgcagaggcccactgtgactttgtgcaccaggccctggagcagctgaagcccctgctgagcctgctgaaggtggccggccgggagggcaacctgattgccatcttccacgaggagcacagccgggtgctgcagcagctgcaggtgttcaccttcttccctgagagcctgcctgccaccaagaagccctttgagaggaagaccatcgaccggcagagcgccaggaagcccctgctgggcctgcccagctacatgctgcagagcgaggagctgcgggccagcctgctggcccgctacccacctgagaagctgttccaggccgagaggaacttcaatgctgcccaggacctggatgtgtccctgctggagggggacctggtgggcgtcatcaagaagaaggaccccatgggcagccagaaccgctggctgattgacaatggagtgaccaagggctttgtgtacagcagcttcctgaagccctacaaccccaggaggagccacagtgatgcctctgtgggcagccacagcagcacagaaagtgaacatggcagcagcagcccccgcttcccccggcagaacagcggcagcaccctgaccttcaaccccagctccatggctgtgtccttcaccagcggcagctgccagaagcagccccaggatgccagccccccacccaaggaatgtgaccagggcaccctgagcgccagcctgaaccccagcaacagcgagagcagccccagccgctgccccagcgaccctgacagcaccagccagcccaggtctggggacagcgcagatgtggccagagatgtgaagcagcccacagccacccccaggagctacagaaacttccgccaccctgagatcgtgggctacagcgtgcccggcagaaatggccagagccaggacctggtgaagggctgtgccaggacagcccaggccccagaagatagaagcacagagccagatggcagcgaggccgagggcaaccaggtgtactttgctgtgtacaccttcaaggccaggaaccccaatgagctgtctgtgtctgccaaccagaagctgaagatcctggagttcaaggatgtgactggaaacacagagtggtggctggccgaggtgaatggcaagaagggctacgtgcccagcaactacatcaggaagacagagtacacctag

SEQ ID NO: 19012 - DNA, 3186 bp, synthetic construct
  source 1..3186: mol_type = other DNA; note = Synthetic coding sequence
atgctgaggacagctggaagagatggcctgtgccgcctgagcacctacctggaggagctggaggccgtggagctgaagaagttcaagctgtacctgggcacagccacagagctgggggagggcaagatcccctggggctccatggagaaggccggccccctggagatggcccagctgctgatcacccacttcggccctgaggaggcctggaggctggccctgagcacctttgagcgcatcaacaggaaggacctgtgggagcggggccagcgggaggacctggtgcgggacaccccacctgggggccccagcagcctgggcaaccagagcacctgcctgctggaggtgtccctggtgacccccaggaaggacccccaggagacctacagagattatgtgcggaggaagttccggctgatggaggacagaaatgcccggctgggagaatgtgtgaacctgagccaccgctacacccggctgctgctggtgaaggagcacagcaaccccatgcaggtgcagcagcagctgctggacaccggccggggccacgccaggacagtgggccaccaggccagccccatcaagattgagaccctgtttgagccagatgaggagaggcctgagccccccaggacagtggtgatgcagggcgctgctggcatcggcaagtccatgctggcccacaaggtgatgctggactgggcagatggcaagctgttccagggccgctttgactacctgttctacatcaactgccgggagatgaaccagagcgccacagaatgttccatgcaggacctgatcttcagctgctggccagagcccagcgcccccctgcaggagctgatccgggtgcctgagcggctgctcttcatcattgatggctttgatgagctgaagcccagcttccatgacccccagggcccctggtgcctgtgctgggaggagaagaggcccacagagctgctgctgaacagcctcatcaggaagaagctgctgcctgagctgagcctgctgatcaccacccggcccacagccctggagaagctgcaccggctgctggagcaccccaggcatgtggagatcctgggcttcagcgaggccgagaggaaggagtacttctacaagtacttccacaatgctgagcaggccggccaggtgttcaactacgtgcgggacaatgagcccctcttcaccatgtgctttgtgcccctggtgtgctgggtggtgtgcacctgcctgcagcagcagctggagggcggcggcctgctgcggcagaccagcaggaccaccacagctgtgtacatgctgtacctgctgagcctgatgcagcccaagccaggggccccccggctgcagcccccacccaaccagaggggcctgtgcagcctggccgcagatggcctgtggaaccagaagatcctgtttgaggagcaggacctgaggaagcacggcctggatggagaagatgtgtctgccttcctgaacatgaacatcttccagaaggacatcaactgtgagcgctactacagcttcatccacctgtccttccaggagttctttgctgccatgtactacatcctggatgaaggagagggcggggccggccctgaccaggatgtgacccggctgctgacagaatatgccttcagcgagaggagcttcctggccctgaccagccgcttcctgtttggcctgctgaatgaggagaccaggagccacctggagaagagcctgtgctggaaggtgagcccccacatcaagatggacctgctgcagtggatccagagcaaggcccagagtgatggcagcaccctgcagcagggcagcctggagttcttcagctgcctgtatgagatccaggaggaggagttcatccagcaggccctgagccacttccaggtgattgtggtgagcaacatcgccagcaagatggagcacatggtgtcctccttctgcctgaagcgctgccgcagcgcccaggtgctgcacctgtatggagccacctacagcgcagatggagaagatcgggcccgctgcagcgctggggcccacaccctgctggtgcagctgcctgagaggacagtgctgctggatgcctacagcgagcacctggccgccgccctgtgcaccaaccccaacctgattgagctgagcctgtacagaaatgccctgggcagcagaggagtgaagctgctgtgccagggcctgcggcaccccaactgcaagctgcagaacctgcggctgaagcgctgccgcatcagcagcagcgcctgtgaggacctgtctgctgccctgattgccaacaagaacctgaccaggatggacctgtctggaaatggagtgggcttccctggcatgatgctgctgtgtgagggcctgcggcacccccagtgccgcctgcagatgatccagctgaggaagtgccagctggagagcggggcctgccaggagatggcctctgtgctgggcaccaacccccacctggtggagctggacctgactggaaatgccctggaggacctgggcctgcggctgctgtgccagggcctgcggcaccctgtgtgccgcctgcggaccctgtggctgaagatctgccgcctgacagctgctgcctgtgatgagctggccagcaccctgtctgtgaaccagagcctgcgggagctggacctgagcctgaatgagctgggggacctgggcgtgctgctgctgtgtgagggcctgcggcaccccacctgcaagctgcagaccctgcggctgggcatctgccgcctgggcagcgctgcctgtgagggcctgtctgtggtgctgcaggccaaccacaacctgcgggagctggacctgtccttcaatgacctgggggactggggcctgtggctgctggccgagggcctgcagcacccagcctgccgcctgcagaagctgtggctggacagctgtggcctgacagccaaggcctgtgagaacctgtacttcaccctgggcatcaaccagaccctgacagacctgtacctgaccaacaatgccctgggggacacaggagtgcggctgctgtgcaagaggctgagccaccctggctgcaagctgcgggtgctgtggctgtttggcatggacctgaacaagatgacccacagccggctggccgccctgcgggtgaccaagccctacctggacatcggctgctag

SEQ ID NO: 19013 - DNA, 3963 bp, synthetic construct
  source 1..3963: mol_type = other DNA; note = Synthetic coding sequence
atggccaatgacagccctgccaagagcctggtggacatcgacctgagcagcctgcgggaccctgctggcatctttgagctggtggaggtggtgggcaatggcacctacggccaggtgtacaagggccgccacgtgaagacaggccagctggccgccatcaaggtgatggatgtgacagaagatgaggaggaggagatcaagctggagatcaacatgctgaagaagtacagccaccacaggaacatcgccacctactacggggccttcatcaagaagagccccccaggccatgatgaccagctgtggctggtgatggagttctgtggggccggcagcatcacagacctggtgaagaacaccaagggcaacaccctgaaggaggactggatcgcctacatcagccgggagatcctgcggggcctggcccacctgcacatccaccacgtgatccaccgggacatcaagggccagaatgtgctgctgacagaaaatgctgaggtgaagctggtggactttggagtgtctgcccagctggacagaacagtgggcagaagaaacaccttcatcggcaccccctactggatggcccctgaggtgattgcctgtgatgagaacccagatgccacctatgactacagaagtgacctgtggagctgtggcatcacagccatcgagatggccgagggcgccccacccctgtgtgacatgcaccccatgagggccctcttcctgatccccagaaatcctccaccccggctgaagagcaagaagtggagcaagaagttcttctccttcatcgagggctgcctggtgaagaactacatgcagaggcccagcacagagcagctgctgaagcaccccttcatccgggaccagcccaatgaaaggcaggtgcgcatccagctgaaggaccacatcgacaggaccaggaagaagagaggagagaaggatgaaacagaatatgagtacagcggcagcgaggaggaggaggaggaggtgcctgagcaggagggggagcccagcagcatcgtgaatgtgcctggagagagcaccctgcggcgggacttcctgcggctgcagcaggagaacaaggagaggtctgaggccctgcggcggcagcagctgctgcaggagcagcagctgcgggagcaggaggagtacaagaggcagctgctggccgagcggcagaagagaattgagcagcagaaggagcagaggcggcggctggaggagcagcagaggcgggagcgggaggcccggcggcagcaggagcgggagcagaggagaagagagcaggaggagaagaggcggctggaggagctggagaggaggaggaaggaggaggaggagcggcggcgggcagaggaggagaagagaagagtggagcgggagcaggagtacatccggcggcagctggaggaggagcagaggcacctggaggtgctgcagcagcagctgctgcaggagcaggccatgctgctggagtgccgctggagggagatggaggagcaccggcaggccgagcggctgcagaggcagctgcagcaggagcaggcctacctgctgagcctgcagcacgaccacagaagaccccacccccagcacagccagcagcccccaccaccccagcaggagaggagcaagcccagcttccacgcccctgagcccaaggcccactatgagcctgctgaccgggcccgggaggtggaggaccgcttcaggaagaccaaccacagcagccctgaggcccagagcaagcagacaggccgggtgctggagccccctgtgcccagccgctctgagagcttcagcaatggaaacagcgagagcgtgcacccagccctgcagaggcctgctgagccccaggtgcagtggagccacctggccagcctgaagaacaacgtgtcccctgtgagccgcagccacagcttcagtgaccccagccccaagtttgcccaccaccacctgcggagccaggacccctgcccccccagccgctctgaggtgctgagccagagcagtgacagcaagtctgaggccccagaccccacccagaaggcctggagcagaagtgacagtgatgaggtgcccccccgggtgcctgtgaggaccaccagccgcagccctgtgctgagcagaagagacagccccctgcagggcagcggccagcagaacagccaggccggccagaggaacagcaccagcagcattgagccccggctgctgtgggagcgggtggagaagctggtgcccaggcctggcagcggcagcagcagcggcagcagcaacagcggcagccagcccggcagccaccctggcagccagagcggcagcggggagcgcttccgggtgcgcagcagcagcaagtctgagggcagccccagccagaggctggagaatgctgtgaagaagccagaggacaagaaggaggtgttccggcccctgaagccagctgtgagaattgacctgacagccctggccaaggagctgcgggctgtggaggatgtgcggcccccccacaaggtgacagactacagcagcagcagcgaggagagcggcaccacagatgaggaggatgatgatgtggagcaggagggcgcagatgagagcaccagcggccctgaggacaccagggctgccagcagcctgaacctgagcaatggagaaacagagagcgtgaagaccatgattgtgcatgatgatgtggagagcgagcccgccatgacccccagcaaggagggcaccctgattgtgcggcagacccagagcgccagcagcaccctgcagaagcacaagagcagcagcagcttcacccccttcatcgacccccggctgctgcagatcagccccagcagcggcaccaccgtgacctctgtggtgggcttcagctgtgatggcatgaggcctgaggccatccggcaggaccccaccaggaaaggatctgtggtgaatgtgaaccccaccaacacccggccccagagcgacaccccagagatcaggaagtacaagaagcgcttcaacagcgagatcctgtgtgccgccctgtggggcgtgaacctgctggtgggcacagagagcggcctgatgctgctggacaggagcggccagggcaaggtgtaccccctcatcaacagaagacgcttccagcagatggatgtgctggagggcctgaatgtgctggtgaccatcagcggcaagaaggacaagctgcgggtgtactacctgtcctggctgaggaacaagatcctgcacaatgaccctgaggtggagaagaagcagggctggaccaccgtgggggacctggagggctgtgtgcactacaaggtggtgaagtatgaaagaatcaagttcctggtgattgccctgaagagctctgtggaggtgtatgcctgggcccccaagccctaccacaagttcatggccttcaagagctttggagagctggtgcacaagcccctgctggtggacctgactgtggaggagggccagaggctgaaggtgatctacggcagctgtgccggcttccacgctgtggatgtggacagcggctctgtgtatgacatctacctgcccacccacatccagtgcagcatcaagccccacgccatcatcatcctgcccaacacagatggcatggagctgctggtgtgctatgaagatgagggcgtgtatgtgaacacctacggccgcatcaccaaggatgtggtgctgcagtggggcgagatgcccacctctgtggcctacatccgcagcaaccagaccatgggctggggcgagaaggccatcgagatccgctctgtggagaccggccacctggatggagtcttcatgcacaagagggcccagaggctgaagttcctgtgtgaaagaaatgacaaggtgttctttgcctctgtgcgcagcggcggcagcagccaggtgtacttcatgaccctgggccgcaccagcctgctgtcctggtag

SEQ ID NO: 19014 - DNA, 606 bp, synthetic construct
  source 1..606: mol_type = other DNA; note = Synthetic coding sequence
atgtacaccctgctgagcggcctgtacaagtacatgttccagaaggatgagtactgcatcctgatcctgggcctggacaatgctgggaagaccaccttcctggagcagagcaagacccgcttcaacaagaactacaagggcatgagcctgagcaagatcaccaccaccgtgggcctgaacattggaacagtggatgtgggcaaggcccggctgatgttctgggacctgggcggccaggaggagctgcagagcctgtgggacaagtactatgcagagtgccacggcgtcatctacgtgattgacagcacagatgaggagcggctggccgagagcaagcaggcctttgagaaggtggtgaccagcgaggccctgtgtggggtgcctgtgctggtgctggccaacaagcaggatgtggagacctgcctgagcatcccagacatcaagacagccttcagtgactgcaccagcaagattggccggcgggactgcctgacccaggcctgcagcgccctgaccgggaagggcgtgcgggagggcatcgagtggatggtgaagtgtgtggtgagaaatgtgcaccggcccccccggcagagggacatcacctag

SEQ ID NO: 19015 - DNA, 1329 bp, synthetic construct
  source 1..1329: mol_type = other DNA; note = Synthetic coding sequence
atgagaggagccatggagctggagcctgagctgctgctgcaggaggcccgggagaatgtggaggccgcccagagctacagaagagagctgggccaccggctggagggcctgcgggaggcccggcggcagatcaaggagagcgccagccagaccagagatgtgctgaagcagcacttcaatgacctgaagggcaccctgggcaagctgctggatgagcggctggtgaccctgctgcaggaggtggacaccatcgagcaggagaccatcaagcccctggatgactgccagaagctgattgaacatggagtgaacacagctgaggacctggtgcgggagggggagatcgccatgctgggcggcgtgggggaggagaatgagaagctgtggagcttcaccaagaaggccagccacatccagctggacagcctgcctgaggtgcccctgctggtggatgtgccctgcctgagcgcccagctggatgacagcatcctgaacatcgtgaaggaccacatcttcaagcacggcaccgtggccagcaggcctcctgtgcagatcgaggagctgattgagaagccaggcggcatcatcgtgcgctggtgcaaggtggatgatgacttcaccgcccaggactaccgcctgcagttcaggaagtgcaccagcaaccactttgaagatgtgtatgtgggcagcgagacagagttcatcgtgctgcacatcgaccccaacgtggactaccagttccgggtgtgtgcccggggagatggccggcaggagtggagcccctggagcgtgccccagatcggccacagcaccctggtgccccatgagtggacagctggctttgagggctacagcctgagcagcagaagaaacatcgccctgagaaatgacagcgagagcagtggagtgctgtacagccgggcccccacctacttctgtggccagaccctgaccttccgggtggagaccgtgggccagcctgacagaagagacagcattggagtgtgtgccgagaagcaggacggctatgacagcctgcagagggaccaggccgtgtgcatcagcaccaatggagctgtgtttgtgaatggcaaggagatgaccaaccagctgcctgctgtgaccagcggcagcacagtgacctttgacatcgaggccgtgaccctgggcaccaccagcaacaatgaaggaggccacttcaagctgcgggtgaccatcagcagcaacaaccgggaggtggtgtttgactggctgctggaccagagctgtggcagcctgtacttcggctgcagcttcttctacccaggctggaaggtgctggtgttctag

SEQ ID NO: 19016 - DNA, 1428 bp, synthetic construct
  source 1..1428: mol_type = other DNA; note = Synthetic coding sequence
atggccgccctgaccaccctcttcaagtacattgatgagaaccaggaccgctacatcaagaagctggccaagtgggtggccatccagagcgtgtctgcctggccagagaagagaggagagatccggaggatgatggaggtggccgctgctgatgtgaagcagctgggcggctctgtggagctggtggacatcggcaagcagaagctgcctgatggcagcgagatccccctgccccccatcctgctgggccgcctgggcagtgacccccagaagaagacagtgtgcatctacggccacctggatgtgcagcctgctgccctggaggatggctgggacagcgagcccttcaccctggtggagagagatggcaagctgtatggccggggcagcacagatgacaagggccctgtggccggctggatcaatgccctggaggcctaccagaagacaggccaggagatccctgtgaatgtgcgcttctgcctggagggcatggaggagagcggcagcgagggcctggatgagctgatctttgccaggaaggacaccttcttcaaggatgtggactatgtgtgcatcagtgacaactactggctgggcaagaagaagccctgcatcacctacggcctgcggggcatctgctacttcttcatcgaggtggagtgcagcaacaaggacctgcacagcggcgtgtatggaggctctgtgcatgaggccatgacagacctgatcctgctgatgggcagcctggtggacaagaggggcaacatcctgatccctggcatcaatgaagctgtggccgctgtgacagaggaggagcacaagctgtatgatgacatcgactttgacatcgaggagtttgccaaggatgtgggcgcccagatcctgctgcacagccacaagaaggacatcctgatgcaccgctggagataccccagcctgagcctgcatggaattgaaggagccttcagcggcagcggggccaagacagtcatccccaggaaggtggtgggcaagttcagcatccggctggtgcccaacatgaccccagaggtggtgggggagcaggtgaccagctacctgaccaagaagtttgctgagctgcggagccccaatgagttcaaggtgtacatgggccacggcggcaagccctgggtgtctgacttcagccacccccactacctggccggccggcgggccatgaagacagtgtttggagtggagccagacctgacccgggagggcggcagcatccctgtgaccctgaccttccaggaggccaccgggaagaatgtgatgctgctgcctgtgggcagcgcagatgatggagcccacagccagaatgagaagctgaaccgctacaactacatcgagggcaccaagatgctggccgcctacctgtatgaggtgtcccagctgaaggactag

SEQ ID NO: 19017 - DNA, 6291 bp, synthetic construct
  source 1..6291: mol_type = other DNA; note = Synthetic coding sequence
atggccgaggtgacagtgccccgggtgtatgtggtgtttggcatccactgcatcatggccaaggccagcagtgatgtgcaggtgtctggcttccacaggaagatccagcacgtgaagaatgagctgtgccacatgctgagcctggaggaggtggcccctgtgctgcagcagaccctgctgcaggacaacctgctgggccgggtgcactttgaccagttcaaggaggccctgatcctgatcctgagcaggaccctgagcaatgaggagcacttccaggagccagactgcagcctggaggcccagcccaagtatgtgcggggcggcaagagatatggaagaagaagcctgcctgagttccaggagagcgtggaggagttccctgaggtgaccgtcatcgagcccctggatgaggaggcccggcccagccacatcccagctggggactgcagcgagcactggaagacccagaggtctgaggagtatgaagctgagggccagctgcgcttctggaacccagatgacctgaatgccagccagagcggcagcagccccccccaggactggattgaggagaagctgcaggaggtgtgtgaggacctgggcatcaccagagatggccacctgaacaggaagaagctggtgtccatctgtgagcagtatggcctgcagaatgtggatggagagatgctggaggaggtgttccacaacctggaccctgatggcaccatgtctgtggaggacttcttctacggcctcttcaagaatggcaagagcctgacccccagcgccagcaccccctaccggcagctgaagaggcacctgtccatgcagagctttgatgagagcggccgccgcaccaccaccagcagcgccatgaccagcaccatcggcttccgggtcttcagctgcctggatgatggcatgggccacgcctctgtggagcgcatcctggacacctggcaggaggagggcatcgagaacagccaggagatcctgaaggccctggacttcagcctggatggcaacatcaacctgacagagctgaccctggccctggagaatgagctgctggtgaccaagaacagcatccaccaggccgccctggccagcttcaaggccgagatccgccacctgctggagcgggtggaccaggtggtgcgggagaaggagaagctgcggagtgacctggacaaggccgagaagctgaagagcctgatggccagcgaggtggatgaccaccacgccgccattgaaagaagaaatgagtacaacctgaggaagctggatgaggagtacaaggagagaattgctgccctgaagaatgagctgaggaaggagcgggagcagatcctgcagcaggccggcaagcagaggctggagctggagcaggagattgagaaggccaagacagaggagaactacatccgggaccggctggccctgagcctgaaggagaacagccggctggagaatgagctgctggagaatgctgagaagctggccgagtatgagaacctgaccaacaagctgcagaggaacctggagaatgtgctggccgagaagtttggagacctggaccccagcagcgctgagttcttcctgcaggaggagcggctgacccagatgagaaatgaatatgaaaggcagtgccgggtgctgcaggaccaggtggatgagctgcagagcgagctggaggagtaccgggcccagggccgggtgctgcggctgcccctgaagaacagccccagcgaggaggtggaggccaacagcggcggcatcgagcctgagcacggcctgggcagcgaggagtgcaaccccctgaacatgagcattgaagctgagctggtgattgagcagatgaaggagcagcaccaccgggacatctgctgcctgcggctggagctggaggacaaggtgcgccactatgagaagcagctggatgaaacagtggtgtcctgcaagaaggcccaggagaacatgaagcagagacatgaaaatgagacccacaccctggagaagcagatcagtgacctgaagaatgaaattgctgagctgcagggccaggccgctgtgctgaaggaggcccaccacgaggccacctgcagacatgaggaggagaagaagcagctgcaggtgaagctggaggaggagaagacccacctgcaggagaagctgcggctgcagcacgagatggagctgaaggcccggctgacccaggcccaggccagctttgagcgggagcgggagggcctgcagagcagcgcctggacagaggagaaggtgcggggcctgacccaggagctggagcagttccaccaggagcagctgaccagcctggtggagaagcacaccctggagaaggaggagctgaggaaggagctgctggagaagcaccagcgggagctgcaggagggccgggagaagatggagacagagtgcaacagaaggaccagccagatcgaggcccagttccagagcgactgccagaaggtgacagagcgctgtgagagcgccctgcagagcctggagggccgctaccggcaggagctgaaggacctgcaggagcagcagcgggaggagaagagccagtgggagtttgagaaggatgagctgacccaggagtgtgccgaggcccaggagctgctgaaggagaccctgaagcgggagaagaccaccagcctggtgctgacccaggagcgggagatgctggagaagacctacaaggagcacctgaacagcatggtggtggagcggcagcagctgctgcaggacctggaggacctgagaaatgtgtctgagacccagcagagcctgctgagtgaccagatcctggagctgaagagcagccacaagcgggagctgcgggagcgggaggaggtgctgtgccaggccggggccagcgagcagctggccagccagaggctggagcggctggagatggagcatgaccaggagcggcaggagatgatgagcaagctgctggccatggagaacatccacaaggccacctgtgaaacagctgaccgggagcgggcagagatgagcacagagatcagccggctgcagagcaagatcaaggagatgcagcaggccaccagccccctgtccatgctgcagagcggctgccaggtgattggagaggaggaggtggagggagatggagccctgagcctgctgcagcagggcgagcagctgctggaggagaatggagatgtgctgctgagcctgcagagggcccacgagcaggccgtgaaggaaaatgtgaagatggccacagagatcagccggctgcagcagaggctgcagaagctggagcccggcctggtgatgagcagctgcctggatgagcccgccacagagttcttcggcaacacagctgagcagacagagcagttcctgcagcagaacagaaccaagcaggtggagggcgtgacccggcggcacgtgctgagtgacctggaggatgatgaggtgcgggacctgggcagcacaggcaccagctctgtgcagaggcaggaggtgaagattgaggagagcgaggcctctgtggagggcttcagcgagctggagaacagcgaggagaccaggacagagagctgggagctgaagaaccagatcagccagctgcaggagcagctgatgatgctgtgtgccgactgtgaccgggccagcgagaagaagcaggacctgctgtttgatgtgtctgtgctgaagaagaagctgaagatgctggagcgcatccctgaggccagccccaagtacaagctgctgtatgaagatgtgtcccgggagaatgactgcctgcaggaggagctgaggatgatggagaccaggtatgatgaggccctggagaacaacaaggagctgacagctgaggtgttccggctgcaggatgagctgaagaagatggaggaggtgacagagaccttcctgagcctggagaagagctatgatgaggtgaagattgaaaatgaaggcctgaatgtgctggtgctgcggctgcagggcaagattgagaagctgcaggagagcgtggtgcagagatgtgactgctgcctgtgggaggccagcctggagaacctggagattgaaccagatggcaacatcctgcagctgaaccagaccctggaggagtgtgtgccccgggtgcgctctgtgcaccacgtgattgaggagtgcaagcaggagaaccagtacctggagggcaacacccagctgctggagaaggtgaaggcccatgaaattgcctggctgcacggcaccatccagacccaccaggagcggccccgggtgcagaaccaggtgatcctggaggagaacaccaccctgctgggcttccaggacaagcacttccagcaccaggccaccatcgccgagctggagctggagaagaccaagctgcaggagctgaccaggaagctgaaggagcgggtgaccatcctggtgaagcagaaggatgtgctgagccacggggagaaggaggaggagctgaaggccatgatgcatgacctgcagatcacctgcagcgagatgcagcagaaggtggagctgctgcgctatgagagcgagaagctgcagcaggagaacagcatcctgagaaatgagatcaccaccctgaatgaggaggacagcatcagcaacctgaagctgggcaccctgaatggcagccaggaggagatgtggcagaagacagagaccgtgaagcaggagaatgctgctgtgcagaagatggtggagaacctgaagaagcagatcagcgagctgaagatcaagaaccagcagctggacctggagaacacagagctgagccagaagaacagccagaaccaggagaagctgcaggagctgaaccagaggctgacagagatgctgtgccagaaggagaaggagcccggcaacagcgccctggaggagcgggagcaggagaagttcaacctgaaggaggagctggagcgctgcaaggtgcagagcagcaccctggtgagcagcctggaggccgagctgtctgaggtgaagatccagacccacatcgtgcagcaggagaaccacctgctgaaggatgagctggagaagatgaagcagctgcaccgctgcccagacctgagtgacttccagcagaagatcagctctgtgctgagctacaatgagaagctgctgaaggagaaggaggccctgtctgaggagctgaacagctgtgtggacaagctggccaagagcagcctgctggagcaccgcatcgccaccatgaagcaggagcagaagtcctgggagcaccagagcgccagcctgaagagccagctggtggccagccaggagaaggtgcagaacctggaggacacagtgcagaatgtgaacctgcagatgagcaggatgaagagtgacctgcgggtgacccagcaggagaaggaggccctgaagcaggaggtgatgagcctgcacaagcagctgcagaatgccggcggcaagtcctgggcccctgagatcgccacccaccccagcggcctgcacaaccagcagaagaggctgtcctgggacaagctggaccacctgatgaatgaggagcagcagctgctgtggcaggagaatgaaaggctgcagaccatggtgcagaacaccaaggccgagctgacccacagccgggagaaggtgcggcagctggagagcaacctgctgcccaagcaccagaagcacctgaaccccagcggcaccatgaaccccacagagcaggagaagctgagcctgaagagagaatgtgaccagttccagaaggagcagagccctgccaacaggaaggtgtcccagatgaacagcctggagcaggagctggagaccatccacctggagaatgaaggcctgaagaagaagcaggtgaagctggatgagcagctgatggagatgcagcacctgcggagcacagccacccccagccccagcccccacgcctgggacctgcagctgctgcagcagcaggcctgccccatggtgccccgggagcagttcctgcagctgcagaggcagctgctgcaggccgagcgcatcaaccagcacctgcaggaggagctggagaacagaaccagcgagaccaacaccccccagggcaaccaggagcagctggtgacagtgatggaggagaggatgattgaggtggagcagaagctgaagctggtgaagaggctgctgcaggagaaggtgaaccagctgaaggagcaggtgtccctgcccggccacctgtgcagccccaccagccacagcagcttcaacagcagcttcaccagcctgtactgccactag

SEQ ID NO: 19018 - DNA, 1176 bp, synthetic construct
  source 1..1176: mol_type = other DNA; note = Synthetic coding sequence
atggccgccctgaccaccctcttcaagtacattgatgagaaccaggaccgctacatcaagaagctggccaagtgggtggccatccagagcgtgtctgcctggccagagaagagaggagagatccggaggatgatggaggtggccgctgctgatgtgaagcagctgggcggctctgtggagctggtggacatcggcaagcagaaggagatccctgtgaatgtgcgcttctgcctggagggcatggaggagagcggcagcgagggcctggatgagctgatctttgccaggaaggacaccttcttcaaggatgtggactatgtgtgcatcagtgacaactactggctgggcaagaagaagccctgcatcacctacggcctgcggggcatctgctacttcttcatcgaggtggagtgcagcaacaaggacctgcacagcggcgtgtatggaggctctgtgcatgaggccatgacagacctgatcctgctgatgggcagcctggtggacaagaggggcaacatcctgatccctggcatcaatgaagctgtggccgctgtgacagaggaggagcacaagctgtatgatgacatcgactttgacatcgaggagtttgccaaggatgtgggcgcccagatcctgctgcacagccacaagaaggacatcctgatgcaccgctggagataccccagcctgagcctgcatggaattgaaggagccttcagcggcagcggggccaagacagtcatccccaggaaggtggtgggcaagttcagcatccggctggtgcccaacatgaccccagaggtggtgggggagcaggtgaccagctacctgaccaagaagtttgctgagctgcggagccccaatgagttcaaggtgtacatgggccacggcggcaagccctgggtgtctgacttcagccacccccactacctggccggccggcgggccatgaagacagtgtttggagtggagccagacctgacccgggagggcggcagcatccctgtgaccctgaccttccaggaggccaccgggaagaatgtgatgctgctgcctgtgggcagcgcagatgatggagcccacagccagaatgagaagctgaaccgctacaactacatcgagggcaccaagatgctggccgcctacctgtatgaggtgtcccagctgaaggactag

SEQ ID NO: 19019 - DNA, 5970 bp, synthetic construct
  source 1..5970: mol_type = other DNA; note = Synthetic coding sequence
atggatgaggtggagcaggaccagcacgaggcccggctgaaggagctgtttgacagctttgacaccactggaacaggcagcctgggccaggaggagctgacagacctgtgccacatgctgagcctggaggaggtggcccctgtgctgcagcagaccctgctgcaggacaacctgctgggccgggtgcactttgaccagttcaaggaggccctgatcctgatcctgagcaggaccctgagcaatgaggagcacttccaggagccagactgcagcctggaggcccagcccaagtatgtgcggggcggcaagagatatggaagaagaagcctgcctgagttccaggagagcgtggaggagttccctgaggtgaccgtcatcgagcccctggatgaggaggcccggcccagccacatcccagctggggactgcagcgagcactggaagacccagaggtctgaggagtatgaagctgagggccagctgcgcttctggaacccagatgacctgaatgccagccagagcggcagcagccccccccaggactggattgaggagaagctgcaggaggtgtgtgaggacctgggcatcaccagagatggccacctgaacaggaagaagctggtgtccatctgtgagcagtatggcctgcagaatgtggatggagagatgctggaggaggtgttccacaacctggaccctgatggcaccatgtctgtggaggacttcttctacggcctcttcaagaatggcaagagcctgacccccagcgccagcaccccctaccggcagctgaagaggcacctgtccatgcagagctttgatgagagcggccgccgcaccaccaccagcagcgccatgaccagcaccatcggcttccgggtcttcagctgcctggatgatggcatgggccacgcctctgtggagcgcatcctggacacctggcaggaggagggcatcgagaacagccaggagatcctgaaggccctggacttcagcctggatggcaacatcaacctgacagagctgaccctggccctggagaatgagctgctggtgaccaagaacagcatccaccaggccgccctggccagcttcaaggccgagatccgccacctgctggagcgggtggaccaggtggtgcgggagaaggagaagctgcggagtgacctggacaaggccgagaagctgaagagcctgatggccagcgaggtggatgaccaccacgccgccattgaaagaagaaatgagtacaacctgaggaagctggatgaggagtacaaggagagaattgctgccctgaagaatgagctgaggaaggagcgggagcagatcctgcagcaggccggcaagcagaggctggagctggagcaggagattgagaaggccaagacagaggagaactacatccgggaccggctggccctgagcctgaaggagaacagccggctggagaatgagctgctggagaatgctgagaagctggccgagtatgagaacctgaccaacaagctgcagaggaacctggagaatgtgctggccgagaagtttggagacctggaccccagcagcgctgagttcttcctgcaggaggagcggctgacccagatgagaaatgaatatgaaaggcagtgccgggtgctgcaggaccaggtggatgagctgcagagcgagctggaggagtaccgggcccagggccgggtgctgcggctgcccctgaagaacagccccagcgaggaggtggaggccaacagcggcggcatcgagcctgagcacggcctgggcagcgaggagtgcaaccccctgaacatgagcattgaagctgagctggtgattgagcagatgaaggagcagcaccaccgggacatctgctgcctgcggctggagctggaggacaaggtgcgccactatgagaagcagctggatgaaacagtggtgtcctgcaagaaggcccaggagaacatgaagcagagacatgaaaatgagacccacaccctggagaagcagatcagtgacctgaagaatgaaattgctgagctgcagggccaggccgctgtgctgaaggaggcccaccacgaggccacctgcagacatgaggaggagaagaagcagctgcaggtgaagctggaggaggagaagacccacctgcaggagaagctgcggctgcagcacgagatggagctgaaggcccggctgacccaggcccaggccagctttgagcgggagcgggagggcctgcagagcagcgcctggacagaggagaaggtgcggggcctgacccaggagctggagcagttccaccaggagcagctgaccagcctggtggagaagcacaccctggagaaggaggagctgaggaaggagctgctggagaagcaccagcgggagctgcaggagggccgggagaagatggagacagagtgcaacagaaggaccagccagatcgaggcccagttccagagcgactgccagaaggtgacagagcgctgtgagagcgccctgcagagcctggagggccgctaccggcaggagctgaaggacctgcaggagcagcagcgggaggagaagagccagtgggagtttgagaaggatgagctgacccaggagtgtgccgaggcccaggagctgctgaaggagaccctgaagcgggagaagaccaccagcctggtgctgacccaggagcgggagatgctggagaagacctacaaggagcacctgaacagcatggtggtggagcggcagcagctgctgcaggacctggaggacctgagaaatgtgtctgagacccagcagagcctgctgagtgaccagatcctggagctgaagagcagccacaagcgggagctgcgggagcgggaggaggtgctgtgccaggccggggccagcgagcagctggccagccagaggctggagcggctggagatggagcatgaccaggagcggcaggagatgatgagcaagctgctggccatggagaacatccacaaggccacctgtgaaacagctgaccgggagcgggcagagatgagcacagagatcagccggctgcagagcaagatcaaggagatgcagcaggccaccagccccctgtccatgctgcagagcggctgccaggtgattggagaggaggaggtggagggagatggagccctgagcctgctgcagcagggcgagcagctgctggaggagaatggagatgtgctgctgagcctgcagagggcccacgagcaggccgtgaaggaaaatgtgaagatggccacagagatcagccggctgcagcagaggctgcagaagctggagcccggcctggtgatgagcagctgcctggatgagcccgccacagagttcttcggcaacacagctgagcagacagagcagttcctgcagcagaacagaaccaagcaggtggagggcgtgacccggcggcacgtgctgagtgacctggaggatgatgaggtgcgggacctgggcagcacaggcaccagctctgtgcagaggcaggaggtgaagattgaggagagcgaggcctctgtggagggcttcagcgagctggagaacagcgaggagaccaggacagagagctgggagctgaagaaccagatcagccagctgcaggagcagctgatgatgctgtgtgccgactgtgaccgggccagcgagaagaagcaggacctgctgtttgatgtgtctgtgctgaagaagaagctgaagatgctggagcgcatccctgaggccagccccaagtacaagctgctgtatgaagatgtgtcccgggagaatgactgcctgcaggaggagctgaggatgatggagaccaggtatgatgaggccctggagaacaacaaggagctgacagctgaggtgttccggctgcaggatgagctgaagaagatggaggaggtgacagagaccttcctgagcctggagaagagctatgatgaggtgaagattgaaaatgaaggcctgaatgtgctggtgctgcggctgcagggcaagattgagaagctgcaggagagcgtggtgcagagatgtgactgctgcctgtgggaggccagcctggagaacctggagattgaaccagatggcaacatcctgcagctgaaccagaccctggaggagtgtgtgccccgggtgcgctctgtgcaccacgtgattgaggagtgcaagcaggagaaccagtacctggagggcaacacccagctgctggagaaggtgaaggcccatgaaattgcctggctgcacggcaccatccagacccaccaggagcggccccgggtgcagaaccaggtgatcctggaggagaacaccaccctgctgggcttccaggacaagcacttccagcaccaggccaccatcgccgagctggagctggagaagaccaagctgcaggagctgaccaggaagctgaaggagcgggtgaccatcctggtgaagcagaaggatgtgctgagccacggggagaaggaggaggagctgaaggccatgatgcatgacctgcagatcacctgcagcgagatgcagcagaaggtggagctgctgcgctatgagagcgagaagctgcagcaggagaacagcatcctgagaaatgagatcaccaccctgaatgaggaggacagcatcagcaacctgaagctgggcaccctgaatggcagccaggaggagatgtggcagaagacagagaccgtgaagcaggagaatgctgctgtgcagaagatggtggagaacctgaagaagcagatcagcgagctgaagatcaagaaccagcagctggacctggagaacacagagctgagccagaagaacagccagaaccaggagaagctgcaggagctgaaccagaggctgacagagatgctgtgccagaaggagaaggagcccggcaacagcgccctggaggagcgggagcaggagaagttcaacctgaaggaggagctggagcgctgcaaggtgcagagcagcaccctggtgagcagcctggaggccgagctgtctgaggtgaagatccagacccacatcgtgcagcaggagaaccacctgctgaaggatgagctggagaagatgaagcagctgcaccgctgcccagacctgagtgacttccagcagaagatcagctctgtgctgagctacaatgagaagctgctgaaggagaaggaggccctgtctgaggagctgaacagctgtgtggacaagctggccaagagcagcctgctggagcaccgcatcgccaccatgaagcaggagcagaagtcctgggagcaccagagcgccagcctgaagagccagctggtggccagccaggagaaggtgcagaacctggaggacacagtgcagaatgtgaacctgcagatgagcaggatgaagagtgacctgcgggtgacccagcaggagaaggaggccctgaagcaggaggtgatgagcctgcacaagcagctgcagaatgccggcggcaagtcctgggcccctgagatcgccacccaccccagcggcctgcacaaccagcagaagaggctgtcctgggacaagctggaccacctgatgaatgaggagcagcagctgctgtggcaggagaatgaaaggctgcagaccatggtgcagaacaccaaggccgagctgacccacagccgggagaaggtgcggcagctggagagcaacctgctgcccaagcaccagaagcacctgaaccccagcggcaccatgaaccccacagagcaggagaagctgagcctgaagagagaatgtgaccagttccagaaggagcagagccctgccaacaggaaggtgtcccagatgaacagcctggagcaggagctggagaccatccacctggagaatgaaggcctgaagaagaagcaggtgaagctggatgagcagctgatggagaacagcgtggtgggcagcagccgggagggctgcagcagcctgcctgagatcgtgtgtgaagatgctgcccctgaggtgcactgtgatgcctag

SEQ ID NO: 19020 - DNA, 915 bp, synthetic construct
  source 1..915: mol_type = other DNA; note = Synthetic coding sequence
atgggccagtgtgtgaccaagtgcaagaaccccagcagcaccctgggcagcaagaatggagaccgggagcccagcaacaagagccacagcagaagaggagctggccaccgggaggagcaggtgcccccctgtgggaagccaggaggagacatcctggtgaatggcaccaagaaggccgaggccgccacagaggcctgccagctgcccaccagcagtggagatgctggccgggagagcaagagcaatgctgaggagagcagcctgcagaggctggaggagctgttccgccgctacaaggatgaaagagaagatgccatcctggaggagggcatggagcgcttctgcaatgacctgtgtgtggaccccacagagttccgggtgctgctgctggcctggaagttccaggccgccaccatgtgcaagttcaccaggaaggagttctttgatggctgcaaggccatctctgctgacagcattgatggcatctgtgcccgcttccccagcctgctgacagaggccaagcaggaggacaagttcaaggacctgtaccgcttcaccttccagtttggcctggacagcgaggagggccagaggagcctgcaccgggagatcgccatcgccctgtggaagctggtgttcacccagaacaacccccctgtgctggaccagtggctgaacttcctgacagagaaccccagcggcatcaagggcatcagccgggacacctggaacatgttcctgaacttcacccaggtgattggaccagacctgagcaactacagtgaagatgaggcctggcccagcctgtttgacacctttgtggagtgggagatggagaggaggaagcgggagggggagggccgcggggccctgagcagcggccctgagggcctgtgcccagaggagcagacctag

SEQ ID NO: 19021 - DNA, 1914 bp, synthetic construct
  source 1..1914: mol_type = other DNA; note = Synthetic coding sequence
atggccgccatggctgtgggcggggccggcggcagccgggtgagcagcggccgggacctgaactgtgtgcctgagattgctgacaccctgggcgctgtggccaagcagggctttgacttcctgtgcatgcctgtgttccacccccgcttcaagcgggagttcatccaggagcccgccaagaacagacctggcccccagaccaggagtgacctgctgctgagcggccgggactggaacaccctcatcgtgggcaagctgagcccctggatccggccagacagcaaggtggagaagatcagaagaaattctgaggccgccatgctgcaggagctgaactttggagcctacctgggcctgcctgccttcctgctgcccctgaaccaggaggacaacaccaacctggcccgggtgctgaccaaccacatccacacaggccaccacagctccatgttctggatgagggtgcccctggtggcccctgaggacctgagagatgacatcattgaaaatgcccccaccacccacacagaggagtacagcggggaggagaagacctggatgtggtggcacaacttccgcaccctgtgtgactacagcaagagaattgctgtggccctggagatcggggctgacctgcccagcaaccacgtgattgaccgctggctgggggagcccatcaaggccgccatcctgcccaccagcatcttcctgaccaacaagaagggcttccctgtgctgagcaagatgcaccagaggctcatcttccggctgctgaagctggaggtgcagttcatcatcaccggcaccaaccaccacagcgagaaggagttctgcagctacctgcagtacctggagtacctgagccagaaccggcccccaccaaatgcctatgagctgtttgccaagggctatgaggactacctgcagagccccctgcagcccctgatggacaacctggagagccagacctatgaggtgtttgagaaggaccccatcaagtacagccagtaccagcaggccatctacaagtgcctgctggacagagtgcctgaggaggagaaggacaccaacgtgcaggtgctgatggtgctgggcgccggccggggccccctggtgaatgccagcctgcgggccgccaagcaggccgaccggcgcatcaagctgtatgctgtggagaagaaccccaatgctgtggtgaccctggagaactggcagtttgaggagtggggcagccaggtgacagtggtgtccagtgacatgagggagtgggtggcccctgagaaggctgacatcatcgtgtctgagctgctgggcagctttgctgacaatgagctgagccctgagtgcctggatggagcccagcacttcctgaaggatgatggagtgtccatccctggagagtacaccagcttcctggcccccatcagcagcagcaagctgtacaatgaggtgcgggcctgccgggagaaggaccgggaccctgaggcccagtttgagatgccctacgtggtgcggctgcacaacttccaccagctgagcgccccccagccctgcttcaccttcagccaccccaacagagaccccatgattgacaacaaccgctactgcaccctggagttccctgtggaggtgaacacagtgctgcacggctttgctggctactttgaaacagtgctgtaccaggacatcaccctgagcatccggcctgagacccacagccctggcatgttctcctggttccccatcctcttccccatcaagcagcccatcaccgtgcgggagggccagaccatctgtgtgcgcttctggcgctgcagcaacagcaagaaggtgtggtatgagtgggccgtgacagcccctgtgtgcagcgccatccacaaccccaccggccgcagctacaccatcggcctgtag

SEQ ID NO: 19022 - DNA, 1041 bp, synthetic construct
  source 1..1041: mol_type = other DNA; note = Synthetic coding sequence
atggcccctggctctgtgaccagtgacatcagccccagcagcaccagcacagctggcagcagccgcagccctgagagcgagaagccaggccccagccatggaggagtgcccccaggcggccccagccacagcagcctgcctgtgggccgccgccacccccctgtgctgaggatggtgctggaggccctgcaggccggggagcagaggcggggcacctctgtggccgccatcaagctgtacatcctgcacaagtaccccaccgtggatgtgctgcgcttcaagtacctgctgaagcaggccctggccaccggcatgaggcggggcctgctggcccggcccctgaacagcaaggcccggggggccaccggcagcttcaagctggtgcccaagcacaagaagaagatccagcccaggaagatggccccagccacagcccccaggagagctggggaggccaagggcaagggccccaagaagcccagcgaggccaaggaggaccccccaaatgtgggcaaggtgaagaaggccgccaagaggcctgccaaggtgcagaagcccccacccaagccaggggccgccacagagaaggccaggaagcagggcggggccgccaaggacacccgggcccagagcggggaggccaggaaggtgccccccaagccagacaaggccatgagggcccccagcagcgctgggggcctgagcaggaaggccaaggccaagggcagccgcagcagccagggagatgctgaggcctacaggaagaccaaggccgagagcaagagcagcaagcccacagccagcaaggtgaagaatggagctgccagccccaccaagaagaaggtggtggccaaggccaaggcccccaaggccggccagggccccaacaccaaggccgccgccccagccaagggcagcggcagcaaggtggtgcctgcccacctgagcaggaagacagaggcccccaagggccccaggaaggccggcctgcccatcaaggccagcagcagcaaggtgagcagccagagagctgaggcctag

SEQ ID NO: 19023 - DNA, 1869 bp, synthetic construct
  source 1..1869: mol_type = other DNA; note = Synthetic coding sequence
atggccatggcccccagccccagcctggtgcaggtgtacaccagccctgctgctgtggccgtgtgggagtggcaggacggcctgggcacctggcacccctacagcgccaccgtgtgcagcttcatcgagcagcagtttgtgcagcagaagggccagcgcttcggcctgggcagcctggcccacagcatccccctgggccaggccgaccccagcctggccccctacatcatcgacctgcccagctggacccagttccggcaggacaccggcaccatgagagctgtgcggcggcacctgttcccccagcacagcgcccctggccggggcgtggtgtgggagtggctgagtgatgatggctcctggacagcctatgaggcctctgtgtgtgactacctggagcagcaggtggcccggggcaaccagctggtggacctggcccccctgggctacaactacacagtgaactacaccacccacacccagaccaacaagaccagcagcttctgccgctctgtgcggcggcaggccggccccccctaccctgtgaccaccatcatcgcccctcctggccacactggagtggcctgcagctgccaccagtgcctgagcggcagcaggactggacctgtgtctggccgctaccgccacagcatgaccaacctgcctgcctaccctgtgccccagcaccccccccacaggacagcctctgtgtttggcacccaccaggcctttgccccctacaacaagcccagcctgagcggggcccggagcgccccccggctgaacaccaccaatgcctggggcgccgccccacccagcctgggcagccagcccctgtaccgcagcagcctgagccacctgggcccccagcacctgcccccaggcagcagcaccagcggggctgtgtctgccagcctgcccagcggccccagcagcagccctggctctgtgcctgccaccgtgcccatgcagatgcccaagcccagccgggtgcagcaggccctggccggcatgacctctgtgctgatgtctgccatcggcctgcctgtgtgcctgagccgggccccccagcccaccagccccccagccagccggctggccagcaagagccacggctctgtgaagaggctgaggaagatgtctgtgaagggggccacccccaagccagagcctgagcctgagcaggtgatcaagaactacacagaggagctgaaggtgcccccagatgaggactgcatcatctgcatggagaagctgagcacagccagcggctacagtgatgtgacagacagcaaggccatcggcagcctggccgtgggccacctgaccaagtgcagccacgccttccacctgctgtgcctgctggccatgtactgcaatggaaacaaggatggcagcctgcagtgccccagctgcaagaccatctacggggagaagacaggcacccagccccagggcaagatggaggtgctgcgcttccagatgagcctgcccggccacgaggactgtggcaccatcctgattgtgtacagcatcccccacggcatccagggccctgagcaccccaaccctgggaagcccttcaccgcccggggcttcccccggcagtgctacctgcctgacaatgcccagggcaggaaggtgctggagctgctgaaggtggcctggaagaggaggctcatcttcaccgtgggcaccagcagcaccaccggggagacagacacagtggtgtggaatgagatccaccacaagacagagatggacaggaacatcaccggccacggctacccagaccccaactacctgcagaatgtgctggccgagctggccgcccagggcgtgacagaggactgcctggagcagcagtag

SEQ ID NO: 19024 - DNA, 786 bp, synthetic construct
  source 1..786: mol_type = other DNA; note = Synthetic coding sequence
atggccgccacagccagagaagatggagccagcggccaggagcggggccagaggggctgtgagcactatgaccggggctgcctgctgaaggccccctgctgtgacaagctgtacacctgccgcctgtgccacgacaacaatgaagaccaccagctggaccgcttcaaggtgaaggaggtgcagtgcatcaactgtgagaagatccagcacgcccagcagacctgtgaagaatgttccaccctgtttggagagtactactgtgacatctgccacctgtttgacaaggacaagaagcagtaccactgtgagaactgtggcatctgccgcatcggccccaaggaggacttcttccactgcctgaagtgcaacctgtgcctggccatgaacctgcagggccgccacaagtgcattgaaaatgtgtcccggcagaactgccccatctgcctggaggacatccacaccagccgggtggtggcccacgtgctgccctgtggccacctgctgcacaggacctgctatgaggagatgctgaaggagggctaccgctgccccctgtgcatgcacagcgccctggacatgacccgctactggaggcagctggatgatgaggtggcccagacccccatgcccagcgagtaccagaacatgacagtggacatcctgtgcaatgactgcaatggccgcagcacagtgcagttccacatcctgggcatgaagtgcaagatctgtgagagctacaacacagcccaggccggcggccgccgcatcagcctggaccagcagtag

SEQ ID NO: 19025 - DNA, 1983 bp, synthetic construct
  source 1..1983: mol_type = other DNA; note = Synthetic coding sequence
ctgagcctgcccagcgtgacctacctgctgctggaggtgatcccagacagcatgaggaagcaggaggtgaggacaggccgggaggccggccagggccatggaacaggcagccctgctgagcaggtgaaggccctgatggacctgctggccggcaagggcagccagggcagccaggccccccaggccctggacaggaccccagatgcccccctgggcccctgcagcaatgacagccgcatccagaggcacaggaaggccctgctgagcaaggtggaggccacccggggcggcggccacccagccaggacagtggccctggacaggctcttcctgcccctgagccgggtgtctgtgcccccccgggtgtccatcaccatcggcgtggccggcatgggcaagaccaccctggtgcgccactttgtgcggctgtgggcccacggccaggtgggcaaggacttcagcctggtgctgcccctgaccttccgggacctgaacacccatgagaagctgtgtgccgacaggctcatctgcagcgtcttcccccacgtgggggagcccagcctggccgtggccgtgcctgcccgggccctgctgatcctggatggcctggatgaatgtaggacccccctggacttcagcaacacagtggcctgcacagaccccaagaaggagatccctgtggaccacctgatcaccaacatcatccggggcaacctcttccctgaggtgtccatctggatcaccagccggcccagcgccagcggccagatccctgggggcctggtggacaggatgacagagatccggggcttcaatgaggaggagatcaaggtgtgcctggagcagatgtttcctgaggaccaggccctgctgggctggatgctgagccaggtgcaggccgaccgggccctgtacctgatgtgcaccgtgcctgccttctgccgcctgaccggcatggccctgggccacctgtggaggagcaggacaggcccccaggatgctgagctgtggccacccaggaccctgtgtgagctgtacagctggtacttcaggatggccctgtctggagagggccaggagaagggcaaggccagcccccgcatcgagcaggtggcccatggaggcaggaagatggtgggcaccctgggccgcctggccttccacggcctgctgaagaagaagtatgtgttctatgagcaggacatgaaggcctttggagtggacctggccctgctgcagggcgccccctgcagctgcttcctgcagcgggaggagaccctggccagctctgtggcctactgcttcacccacctgagcctgcaggagtttgtggccgccgcctactactacggggccagccggcgggccatctttgacctcttcacagagagcggcgtgtcctggccccggctgggcttcctgacccacttccgctctgctgcccagagggccatgcaggccgaggatggccgcctggatgtgttcctgcgcttcctgagcggcctgctgagcccccgggtgaatgccctgctggccggcagcctgctggcccagggcgagcaccaggcctaccgcacccaggtggccgagctgctgcagggctgcctgcggccagatgctgctgtgtgtgcccgggccatcaacgtgctgcactgcctgcacgagctgcagcacacagagctggcccggtctgtggaggaggccatggagagcggggccctggcccggctgaccggccctgcccaccgggccgccctggcctacctgctgcaggtgtctgatgcctgtgcccaggaggccaacctgagcctgagcctgagccagggcgtgctgcagagcctgctgccccagctgctgtactgcaggaagctgcgctggatccctggccagggcgctggggccggggagggcgctgaggagcgggcagaggccgtgcccagccccccacccagcttctctgtgtccctgctgggcctgccctag

SEQ ID NO: 19026 - DNA, 1152 bp, synthetic construct
  source 1..1152: mol_type = other DNA; note = Synthetic coding sequence
atgctgagcaggaagaagaccaagaatgaggtgtccaagccagctgaggtgcagggcaagtatgtgaagaaggagaccagccccctgctgaggaacctgatgcccagcttcatccgccacggccccaccatccccaggagaacagacatctgcctgcctgacagcagccccaatgccttcagcaccagcggagatgtggtgtccaggaaccagagcttcctgcggacccccatccagaggacccctcatgagatcatgagaagagagagcaaccggctgagcgcccccagctacctggcccggagcctggctgatgtgccccgggagtatggcagcagccagagctttgtgacagaggtgtcctttgctgtggagaatggagacagcggcagccgctactactacagcgacaacttctttgatggccagaggaagaggcccctgggggaccgggcccacgaggactaccgctactatgagtacaaccacgacctcttccagaggatgccccagaaccagggcagacatgccagcggcatcggccgggtggccgccaccagcctgggcaacctgaccaaccacggcagcgaggacctgcccctgcccccaggctggagcgtggactggaccatgaggggcaggaagtactacatcgaccacaacaccaacaccacccactggagccaccccctggagcgggagggcctgcccccaggctgggagcgggtggagagcagcgagtttggcacctactacgtggaccacaccaacaagaaggcccagtaccgccacccctgtgcccccagcgtgcccaggtatgaccagcccccacctgtgacctaccagccccagcagacagagaggaaccagagcctgctggtgcctgccaacccctaccacacagctgagatcccagactggctgcaggtgtatgcccgggcccctgtgaagtatgaccacatcctgaagtgggagctgttccagctggccgacctggacacctaccagggcatgctgaagctgctcttcatgaaggagctggagcagatcgtgaagatgtatgaggcctaccggcaggccctgctgacagagctggagaacaggaagcagaggcagcagtggtacgcccagcagcacggcaagaacttctag

SEQ ID NO: 19027 - DNA, 2376 bp, synthetic construct
  source 1..2376: mol_type = other DNA; note = Synthetic coding sequence
atgagcaaccagcaggagaagtatgaggcccagaacatcgtgaacagcacagaggagagtgatgatgcctttgacacagtgaccatccctgtgcccagcgaggagccccaggagagtgaccagacagaggagcatgaaagtggcatcgagcagttcagcgagagccacgccatccacgtggaggagcagagcgaccagagcttcagcagcctggagccagacaatgagcagctgatggaggaggtgatcagcccccggcaggtgtcctacaccccccagcaccacgagaagcagtatgccatgcagaggcccaatgatgacagcctggccttcctggacaagatcaagtctgtgaaggagagcctgcaggagagcgtggaggacagcctggccaccgtgaaggtggtgctgatccctgtgggccaggagatcgtcatccccttcaaggtggacaccatcctgaagtacctgaaggaccacttcagccacctgctgggcatcccccacagcgtgctgcagatccgctacagcggcaagatcctgaagaacaatgagaccctggtgcagcacggcgtgaagccccaggagatcgtgcaggtggagatcttcagcaccaacccagacctgtaccctgtgagaagaattgatggcctgacagatgtgtcccagatcatcaccgtgacagtgcagacaggcctggaccagtaccagcaggtgcctgtggagatcgtgaagagtgacttccacaagcccttcctgggcggcttccgccacaaggtgactggagtggagtaccacaatgccggcacccagacagtgcccaagagaattcctgagcggctgagcatcttctgccgggacacccagaccgtcttccagaagaagaacctgcagcagaccaccaacaccaccagcacccagatgaccaacattggagtgtatgtgagcaacatgacagacaagctggtgaccccaggcaagtacttctctgctgctgagtaccacgcccagaggctgaaggctgtgattgtcatccagacctactaccggcagtggcacgccaagatctttgtggagaacctgcggcggcagaagagcctgcggctggagtgggagacccagcaggagctgaggaagatccgggagaaggaggagtggatcaagctggactaccacagaagacacaaccccaagaccaatgaagattttgagttcctgtacaatgccctggagttctggaggcaggaggagctgacccgcatcaaccagagcttcaccggggctgagaggaaggccgccctgtgtgagctgctggagaaggagacccagatcatcgccagcatcggccgccaccgctacatcgcctacatggccaaccaggaggccgccatccaggccttcctggacaagtgcagcgcccccaagatctggaggaccccaaatggcaagaccatcgagatggacacccagttcaccatccgggcccgggagctgcagaacatctacaagtgcatcatgctgaagaacatcagccaggatgagcggctggatgtgctgctgaccctgaagcacacagtgaaggagcacgagtgcaagctgacccaggagatcctggagctgattgaccgggaggtggacctgatgatgagaggagtgaagcaccacaacctggagggcctgaggaagagaattgccaccctcttcttccactacatcaagacccccctcttcaaccctgaggtggccaagtacctgaaggtgccccaggaccccctgaagttctacaagaagatctacttctgccacagctgccagctgtacctgcccagcacagagttctctgtgagcagcaccagccgccgcatctaccgctgcaggaactgcatcaacctgcagaatgaggcccagaagcgggagagcttcctgaagtacaagtgcctgctgcagcagctgtactacacagaggccgactatgaagatgacagcaagatcgccttcctgatgcagctgcaggacatccagtacctgacagagaacatctgggccagccagagcgtgctgagcgcctgtgacaacctgagtgacctggtgatggtgcgctggaacaagagcctggagtggagcccctggaactgcatcctgctgaccaaggatgaggccgccgcccacctgaagctgaccagcattgaggagggctatgaaagaagcttcatccacaagatcaagcacaagcacatcctggccaagaactacttcagccaggtgcctgtgctggccagcttcatcctggatgatggagaaattgatgagatccgctggaagtaccacagcgacaccacccccaagatcatcgagagccagaggcctccccactag

SEQ ID NO: 19028 - DNA, 1767 bp, synthetic construct
  source 1..1767: mol_type = other DNA; note = Synthetic coding sequence
atgagcagctgtgtgagcagccagcccagcagcaacagagctgccccccaggatgagctgggcggccggggcagcagcagcagcgagagccagaagccctgtgaggccctgcggggcctgagcagcctgagcatccacctgggcatggagagcttcatcgtggtgacagaatgtgagcccggctgtgctgtggacctgggcctggcccgggaccggcccctggaggctgatggccaggaggtgcccctggacaccagcggcagccaggcccggccccacctgagcggcaggaagctgagcctgcaggagaggagccagggcggcctggccgccggcggcagcctggacatgaatggccgctgcatctgccccagcctgccctacagccctgtgagcagcccccagagcagcccccggctgccccggcggcccaccgtggagagccaccacgtgtccatcaccggcatgcaggactgtgtgcagctgaaccagtacaccctgaaggatgaaattggcaagggcagctatggagtggtgaagctggcctacaatgaaaatgacaacacctactatgccatgaaggtgctgagcaagaagaagctgatccggcaggccggcttcccccggcggcccccaccccggggcaccaggcctgcccctgggggctgcatccagccccggggccccatcgagcaggtgtaccaggagatcgccatcctgaagaagctggaccaccccaacgtggtgaagctggtggaggtgctggatgaccccaatgaagaccacctgtacatggtgtttgagctggtgaaccagggccctgtgatggaggtgcccaccctgaagcccctgtctgaggaccaggcccgcttctacttccaggacctgatcaagggcatcgagtacctgcactaccagaagatcatccaccgggacatcaagcccagcaacctgctggtgggggaggatggccacatcaagattgctgactttggagtgtccaatgagttcaagggcagtgatgccctgctgagcaacacagtgggcaccccagccttcatggcccctgagagcctgtctgagaccaggaagatcttcagcggcaaggccctggatgtgtgggccatgggcgtgaccctgtactgctttgtgtttggccagtgccccttcatggatgagcgcatcatgtgcctgcacagcaagatcaagagccaggccctggagttcccagaccagcctgacattgctgaggacctgaaggacctgatcaccaggatgctggacaagaaccctgagagcagaattgtggtgcctgagatcaagctgcacccctgggtgaccaggcatggagctgagcccctgcccagtgaagatgagaactgcaccctggtggaggtgacagaggaggaggtggagaacagcgtgaagcacatccccagcctggccaccgtcatcctggtgaagaccatgatcaggaagaggagctttggaaacccctttgagggcagccggcgggaggagaggagcctgagcgcccctggcaacctgctgaccaagaagcccacccgggagtgtgagagcctgtctgagctgaaggaggcccggcagaggcggcagcccccaggccacaggcctgccccccggggcggcggcggcagcgccctggtgcggggcagcccctgtgtggagagctgctgggccccagcccctggcagccctgccaggatgcaccccctgcggcctgaggaggccatggagcctgagtag

SEQ ID NO: 19029 - DNA, 2052 bp, synthetic construct
  source 1..2052: mol_type = other DNA; note = Synthetic coding sequence
atggccctgagcaagcgggagctggatgagctgaagccctggattgagaagacagtgaagagggtgctgggcttcagcgagcccaccgtggtgacagctgccctgaactgtgtgggcaagggcatggacaagaagaaggctgctgaccacctgaagcccttcctggatgacagcaccctgcgctttgtggacaagctgtttgaagctgtggaggagggccgcagcagccgccacagcaagagcagcagtgacaggagcaggaagcgggagctgaaggaggtgtttggagatgattctgagatcagcaaggagagcagcggcgtgaagaagaggcgcatccccaggtttgaggaggtggaggaggagcctgaggtgattcctggccccccatctgagagccctggcatgctgaccaagctgcagatcaagcagatgatggaggccgccacccggcagatcgaggagaggaagaagcagctgtccttcatcagcccccccaccccccagcccaagacccccagcagcagccagcctgagcggctgcccatcggcaacaccatccagcccagccaggccgccaccttcatgaatgatgccatcgagaaggccaggaaggctgctgagctgcaggcccgcatccaggcccagctggccctgaagccaggcctgattggaaatgccaacatggtgggcctggccaacctgcacgccatgggcatcgccccacccaaggtggagctgaaggaccagaccaagcccacccccctcatcctggatgagcagggccgcacagtggatgccaccgggaaggagattgagctgacccacaggatgcccaccctgaaggccaacatccgggctgtgaagcgggagcagttcaagcagcagctgaaggagaagcccagcgaggacatggagagcaacaccttctttgacccccgggtgtccatcgcccccagccagaggcagaggaggaccttcaagttccatgacaagggcaagtttgagaagatcgcccagaggctgcggaccaaggcccagctggagaagctgcaggccgagatcagccaggccgccaggaagacaggcatccacaccagcacccggctggccctgattgcccccaagaaggagctgaaggagggggacatccctgagattgagtggtgggacagctacatcatccccaatggatttgacctgacagaggagaaccccaagcgggaggactacttcggcatcaccaacctggtggagcacccagcccagctgaacccccctgtggacaatgacacccctgtgaccctgggcgtgtacctgaccaagaaggagcagaagaagctgcggcggcagacccggcgggaggcccagaaggagctgcaggagaaggtgcggctgggcctgatgcctcctcctgagcccaaggtgcgcatcagcaacctgatgagggtgctgggcacagaagctgtgcaggaccccaccaaggtggaggcccacgtgcgggcccagatggccaagaggcagaaggcccacgaggaggccaatgctgccaggaagctgacagctgagcagaggaaggtgaagaagatcaagaagctgaaggaggacatcagccagggcgtgcacatctctgtgtacagagtgaggaacctgagcaacccagccaagaagttcaagattgaggccaatgccggccagctgtacctgactggagtggtggtgctgcacaaggatgtgaatgtggtggtggtggagggcggccccaaggcccagaagaagttcaagaggctgatgctgcaccgcatcaagtgggatgagcagaccagcaacaccaagggagatgatgatgaggagagtgatgaggaggccgtgaagaagaccaacaagtgtgtgctggtgtgggagggcacagccaaggacaggagctttggagagatgaagttcaagcagtgccccacagagaacatggcccgggagcacttcaagaagcacggggctgagcactactgggacctggccctgtctgagagcgtgctggagagcacagactag

SEQ ID NO: 19030 - DNA, 1938 bp, synthetic construct
  source 1..1938: mol_type = other DNA; note = Synthetic coding sequence
atgtctgacaagagtgacctgaaggccgagctggagaggaagaagcagaggctggcccagatccgggaggagaagaagaggaaggaggaggagaggaagaagaaggaggccgacatgcagcagaagaaggagcctgtgcaggatgacagcgacctggacaggaagaggcgggagacagaggccctgctgcagagcatcggcatcagccctgagccccccctggtgcagcccctgcacttcctgacctgggacacctgctacttccactacctggtgcccacccccatgagccccagcagcaagtctgtgtccaccccatctgaggccggcagccaggacagcggggacctgggccccctgaccaggaccctgcagtgggacacagaccccagcgtgctgcagctgcagagcgacagcgagctgggccgccgcctgcacaagctgggcgtgtccaaggtgacccaggtggacttcctgccccgggaggtggtgtcctacagcaaggagacccagacccccctggccacccaccagagtgaagaagatgaggaggatgaggagatggtggagagcaaggtgggccaggacagcgagctggagaaccaggacaagaagcaggaggtgaaggaggccccaccccgggagctgacagaggaggagaagcagcagatcctgcacagcgaggagttcctgatcttctttgacaggaccatccgggtgattgagcgggccctggctgaagattctgacatcttctttgactacagcggccgggagctggaggagaaggatggagatgtgcaggccggggccaacctgtccttcaaccggcagttctatgatgagcactggagcaagcaccgggtggtgacctgcatggactggagcctgcagtacccagagctgatggtggccagctacaacaacaatgaagatgcccctcatgagccagatggagtggccctggtgtggaacatgaagttcaagaagaccaccccagaatatgtgttccactgccagagctctgtgatgtctgtgtgctttgcccgcttccaccccaacctggtggtgggcggcacctacagcggccagatcgtgctgtgggacaacagaagccacaggaggacccctgtgcagaggacccccctgtctgctgctgcccacacccaccctgtgtactgtgtgaatgtggtgggcacccagaatgcccacaacctgatcaccgtgtccacagatggcaagatgtgctcctggagcctggacatgctgagcaccccccaggagagcatggagctggtgtacaacaagagcaagcctgtggccgtgacaggcatggccttccccactggagatgtgaacaactttgtggtgggcagcgaggagggcaccgtgtacacagcctgccgccacggcagcaaggccggcatcggggaggtgtttgagggccaccagggccctgtgacaggcatcaactgccacatggctgtgggccccatcgacttcagccacctgtttgtgaccagcagctttgactggacagtgaagctgtggaccaccaagcacaacaagcccctgtacagctttgaagataatgctgactatgtgtatgatgtgatgtggagccctgtgcacccagccctgtttgcctgtgtggatggcatgggccgcctggacctgtggaacctgaacaatgacacagaggtgcccacagcctctgtggccattgaaggagccagcgccctgaacagagtgcgctgggcccaggccggcaaggaggtggccgtgggggacagcgagggccgcatctgggtgtatgatgtgggggagctggccgtgccccacaatgatgagtggaccaggtttgcccggaccctggtggagatccgggccaacagagctgacagcgaggaggagggcaccgtggagctgagcgcctag

SEQ ID NO: 19031 - DNA, 7806 bp, synthetic construct
  source 1..7806: mol_type = other DNA; note = Synthetic coding sequence
atgaagaggaaggtggtgaacacccacaagctgcggctgagccccaatgaggaggccttcatcctgaaggaggactatgaaagaagaaggaagctgcggctgctgcaggtgcgggagcaggagcgggacatcgccctgcagatccgggaggacatcaagcagaggaggaaccagcagttcacccggctggccgaggagctgcgggcagagtgggaggagagccagacccagaagatccagaacctggagaagctgtacctggccagcctgcgctccatgggagagggccaccggcaggccaaggaaaatgaaccagacctggatgccctggcccagagagctgctgagaggaagaggaaggctgacctgcggcacaaggaggccctgaaggtgcagaagaaccagaaggagatcctgctgaagcagaagacctggcacatcaaggccaggaaggaggccctgctggtggagaaggagaggtctgccaagatcaccagcctgcccccacctccacccaccctgtttgagaacatcgaggtgaagaggatctctgctgtgaagaccaacagcagcacctaccaccacctgcacacctttgtgaaccgggagacagacaccaagaggccagatgcccggctggccgctgaggaggaggccaagaggctggaggagctgcagaagcaggccgcccaggagaggatggagagatttgagaaggcccacgtgcggggcttccaggccatgaagaagatccacctggcccagaaccaggagaagctgatgaaggagctgaagcagctgcagcaggaggacctggcccggcggcggcagacagtggcccagatgccaccccagctggtggagctgccctacaagaggtctgagatgaaggaggactggcagcgggagctggagtttgcctttgaggacatgtacaatgctgacaggaaggtgaagggcaacctgatcctgcacctggagcctgagcccctgcccaccgtgaccaaccagatccaggatgaggagctggacctgtccatggagcaggagaacctgggcgctgctgaggacctgcctgtgacagaagctgagatctgcagcagcgagacagatgtgcccctggtgatgaagacccagcagatccccagcaaggtgctcttcaagaagctgctgaacaagatccgcagccagaagagcctgtggaccatcaagtccatgtctgaagatgaaagtgagatgatcaccaccgtgtctgaaattgagagcaaggcccccaccgtggagagcggcaccatcgccagcaaggagaggaccctgagcagcggccaggagcaggtggtggagagtgacaccctgaccatcgagagcggccccctggccagcgaggacaagcccctgagctgtggcaccaacagcggcaaggagcaggagatcaatgagaccctgcccatcaccaccgtggcccagagctctgtgctgctgcacccccaggaggccgccgcccgcatccgcatgtctgcccggcagaagcagatcatggagattgaggagcagaagcagaagcagctggagctgctggagcagatcgagcagcagaagctgcggctggagacagactgcttccgggcccagctggaggaggagaagaggaagaagacccagcccaccggggtgggcatcgccccagccagctgccctgtgatcagtgatgaggacagccaccggcagatgatccggaactaccagcaccagctgctgcagcagaaccggctgcaccggcagagcgtggagacagccaggaagcagctgctggagtaccagaccatgctgaagggccgctgccccagcgtgtctgcccccagcctcatcacagacagcgtcatctctgtgcccagctggaagtctgagcggcccacagccatcagcgagcactgggaccagggccagaggctgaagctgagccccaacaagtaccagcccatccagcccatccagaccagcaagctggagcaggaccacttccaggtggcccggcagaaccacttcccccagaggcaggtggagaccacagagaccctgcgggccagtgacatcctgaccaaccaggccctggagagccaggagcacctgcggcagttcagccagacagagacccagcagagggactacaagctggtgcccaaggacagcgagaccctgagccgggccctgagccatgaccggcagctgatcagccaggatgccaggaagatcagcgagacctttggagccaccaccttccagagcctggagagccagcagctgttctctgaaaattctgagaacatctcctaccacctgacagagcccagcagctttgtgcccctggtgccccagcacagcttcagcagcctgcctgtgaaggtggagagcggcaagatccaggagcccttcagcgccatgagcaagagcacagtgtccaccagccacagcatcatcagccagatgcatgaccggcccctgctgcccagcgagaacatcacagcccagcagggcaacatgaaggccctgcaggagcagctggacctgcagaagaaggtgctgcaggccacccaggaggcccaggagcagctgctgctgtgcaagcagaaggaggtggagcagcagacaggcctgagcgtcttcctgcccctggtgaccccagacagcagcgccctgctgcccagcgccaaggctgacctgggccgcatccaggagagcagccccaccaagaacaacattgctgtgtccagtgaccaccacgtgatcagccagctgcaggacaagaggctgagcctgagccagcccatcctgagccagcagaacaacttcaagttcctgcaggagcagctgaacatccagaaggacagcctgcaggcccggcgggaggcccaggaggtgctgtatgtgcacaagcagagcgagctggaccggcgggtgtgcagcgagcaggccgagcccagcttccccttccaggtggcccagcacaccttcaccagcctgcccagcgctgacaccaagagcggcaagatccaggagcagcacagcagcaagtctgagaagggcctggtgtcctgccagagcgacatccccatcagccaggacggcagcctgtccttcctgcagcagttcctgcccctgcatgacagcctgaagctgctgcaggagcagctgaccaagcagagggacaccctgcaggcccggcatgaggcccaggtggagctgctgctgcaccggcagagggacctgggggacagcaagagcggcctggtgagcagcagcagcagccctgtggtggtgcagcacagcgtggccagccaggccagcgccaaggccgagccccggcgcatccaggagctgtacctgtctgagaaggaaaatgtgggccccagctgccacctgatcatccccaccttccaggacaagagcctgtccttcccccagcacagcctggcccagcaggagaacctgaccatcctgcaggagcagagccagatccagagggtcatcctgggcgccaaggagggcacccaggagtttgtgcacacagaaagtgagctggagaagaggatcagcagcgagcagacaggcaccagcagcagcctgagccaggtggatgagagcgagcgcttccaggagtgcatcagcatcaagagtgacagcaccatccccctgagccaccccaagatcccccgctgccaggagcggctgctgcgggtgtcccagcacatgctgcccctgcaggacaacctggaggagcaccaggcctggctggacacagagaaggaggccttccacttcagccagaagacccaggagaacaccagcagcgagcagacaggcagcagcagcttcatcccccagctggtgcagctgtccttcaccagcctggccagcgctgagagcggcaccatcctggagcccctcttcacagaaagtgagagcaagatcttcagcagccacctgcagatcccccagctgcaggaccggctgctgcgcatcagccagctgatccagccccagcaggacaacctgaaggccctgcaggagcagctggccacccagcgggaggccatcatcctggcccggcaggaggcccgggaggagctgctgctgcaccagagcgagtgggagggccgcatcagccctgagcaggtggacaccagcagcctgcccctggtgccccagcacagctttgccagcctgcccctgaatgaaagtgaaagaaaccaggagccctgcagcatcaacagcgacaacatcgtgagcagcggccacagcgagatccccaccctgcctgatggcctgctgggcctgagccacctggtgctgccccagcaggacaacctgattgccctggaggagcacctgcacgcccagacagacttcctgcccagcattgagaagacccagaaggagctggtgctgagcaagccctgcaagtttgaggagaaggtgagcagcgagcacttcatccagagccaccacggggacctgcaggccctgcagcagcagctggacacccagaagaaggccatccgcagcatccaggaggtgcaggaggagctgctgctgcagaggctgtctgagctggagaagagggtgtcctctgagcaggtgtgcagcagcagctttgtgtcccaggtgcctgtggccgacagcgagaggacccagaagagcttccccaccaagagcaatgacaccctgcccagcagccaccgggagatcccccggctgcaggaccggctgctgagcctgagcaagcccatcctgccccagcaggacaacatgacagcccagctggatgcccagcgggaggtgatgtacagctatgagaagccccaggaggagctgagcctgaacaagcagaggaagctgaacaagtctgagagcgctgagcacaccatccccagcctcttcctgcccaaggagacagagcacagcttcatccccctgccctttgctgaggccaagcccaagagcacctgtgagctgtacagcagccagaatgagcacgccgccccacccagcaaccctgtgattcctggcttccaggaccggctgctgtccttcagccagagcgtgctgacccagcaggacaacctgggcctgcagaagcagctggacctgcagcgggaggtgctgcactacagccagaaggcccaggagaagctgctggtgcagaggcagacagccctgcagcagcagatccagaagcatgaggagaccctgaaggacttcttcaaggacagccagatcagcaagcccaccgtggagaatgacctgaagacccagaagatgggccagctgcgggactggttccccaacacccaggacctggccggaaatgaccaggagaacatcagacatgctgacaggaacaacagtgatgacaaccacctggccagcgaggacaccagcgccaagcagagcggggagcacctggagaaggacctgggcagaagaagcagcaagccccctgtggccaaggtgaagtgtggcctggacctgaaccagcacgagctgagcgccatccaggaggtggagagccctgccatcggccgcaccagcatcctgggcaagccaggcatctatgaggaccgggaccccctgcgggtgtccatcagccgggagcagagcttcttcggcagccccctggcccatgaccccttcagctgcctgcagctggtgggccaggagaatgtgtgtggagatgattatgatgaggccgtgaagctgaaggagagcgtggtggagaaccacgctgtgctgtcctatgctgtggaggaggagcacgcctacctgggccccaccgtgaagccagatgacaaggccaagaccctgtcctatgagcccctgagcagcgccaccgtgtccacaggcagcctgctgtcctatgaaaatacagacctgagcctgacagatcctgagagcttcagcgagcacatggatgacagcaagcaggagagcaccaccagcaaggaggaggagaccaacatcatcagcagcatcgtgcccagcacccaggacatctaccagaggcagaacagcagtgatgtgcacaagagcctgctgcctgctgtggatgagaccacctgtggccacacccacttccagcagatgattgacaagtacatcaatgaggccaacctgatccctgagaagacagacctgcaggagctggagcacatcttccccaacctgcaccaccagctgttcaagcccctggagccccacccagactttgacctgagcagcagcagcagcggcatcagcccagacaacagagacttctaccagaggagtgacagcagcagcgagagccactgtgccaccggcctgagcaagagcacagtgtacttcaccgccctgcggaggacctccatgcacagcagcctgaacaccagccccaaccagcagcctgacaccaacctggcccacgtgggcgcccacagctttgccacagagaacatcattggaggcagcgagcagtgctttgagcagctgcagcctgagtacagcagccaggaggagagccagcacgccgacctgcccagcatcttcagcattgaggcccgggacagcagccagggcatgaagaaccagaactaccccagcgaggagcacacagagatcctgcagaacaagaagaagatcgtgcacttccagctgagcatcggcaacctgagctctgtgtacagcagcagtgatgaggccaacgtgtttgaccagctgaatgtgcagcacagcaccccctgtggcagcaacagcagtgaatgttccaccaagcaccagctggagagcaggaaggagagcatgggctttgaggagctgagcaagaggggcgtggtgaccatgctgcagagccagggcctgattgaggacaacaagaatgagacctgccgggtgctggacatcaacccccaggtggaggagacagacagccggctgtgtgtgaggacagtggagatgggcaccagcatccaggccccctacagcctgaccacccagaatgagaagtactttgaaaattctgctgagacagacatccccaagatcaccaagaagctgagccagctgggggagagcgagctgtttgccagcagcggcagcttcagcctgcagagcagcatccctgtgtgggagacagaaacaggccacggcatcatggaggagcctgagctgaccctcatcagcaccacagacaccagcattgctgagatggactttgccaacctgaccctggaggagaagtcagaaaatgaggccaagtgcttcttccaggtgtctgagttcctgcccctggtgtctgccacagaggccagtgactacccagctgtgtctgagctgagcattgagaagcccaggacagccagcacagagaccccccggcggctgacccctgtgcccggcagcctgcaggaggccttcatcaagaggaagaagagcttcatggagaggagccaccagaggcagaaggagatccggaacaagatccacgtgtctgagaacagccagatcaagacagtgaaggagaagcccagcatcagcagctctgtgtcccggctgaagggcgtgaacaaggtgcgggccagcttccctgaggacaggaagaccacccaggccctgcggcaccagaggggcctgcggctgtacaaccagctggccgaggtgaagcagcagaaggaggagaagaccaagcaggaggcctatgcccagaacagagcccgggccaaggagttccacaagaagaccctggagaagctgcgggccaagaacacctgctag

SEQ ID NO: 19032 - DNA, 2397 bp, synthetic construct
  source 1..2397: mol_type = other DNA; note = Synthetic coding sequence
atggccgccagcctgcccggccctggcagccgcctcttccgcacctacggggctgctgatggccggcggcagaggaggcctggccgggaggccgcccagtggttccccccccaggacagaagacgcttcttcaacagcagcggcagcagtgatgccagcatcggggaccccagccagagtgatgatcctgatgatcctgatgatcctgacttccctggcagccctgtgagaagaagaagaagaagacctgggggccgggtgcccaaggaccggcccagcctgactgtgacccccaagcgctggaagctgcgggcccggcccagcctgactgtgaccccccggcggctgggcctgcgggcccggcccccccagaagtgcagcaccccctgtggccccctgcggctgccccccttccccagccgggacagcggccgcctgagcccagacctgtctgtgtgtggccagcccagagatggagatgagctgggcatcagcgccagcctcttcagcagcctggccagcccctgccccggcagccccaccccccgggacagcgtcatcagcatcggcaccagcgcctgcctggtggccgccagcgctgtgcccagcggcctgcacctgcctgaggtgtccctggaccgggccagcctgccctgcagccaggaggaggccactggaggagccaaggacaccaggatggtgcaccagacccgggccagcctgcggtctgtgctgtttggcctgatgaacagcggcaccccagaagattctgagttccgggcagatggcaagaacatgagggagagctgctgcaagaggaagctggtggtgggcaatggacctgagggccctggcctgagcagcacaggcaagaggcgggccaccggccaggacagctgccaggagcggggcctgcaggaggccgtgcggcgggagcaccaggaggcctctgtgcccaagggcagaattgtgccccggggcatcgaccggctggagaggaccaggagcagcaggaagagcaagcaccaggaggccacagagaccagcctgctgcacagccaccgcttcaagaagggccagaagctgggcaaggacagcttccccacccaggacctgacccccctgcagaatgtgtgcttctggaccaagacccgggccagcttctccttccacaagaagaagatcgtgacagatgtgtctgaggtgtgcagcatctacaccacagccaccagcctgagcggcagcctgctgtctgaatgtagcaacagacctgtgatgaacagaaccagcggggcccccagctcctggcacagcagctccatgtacctgctgagccccctgaacaccctgagcatcagcaacaagaaggccagtgatgctgagaaggtgtatggagagtgcagccagaagggccctgtgcccttcagccactgcctgcccacagagaagctgcagagatgtgagaagatcggggagggcgtgtttggagaggtgttccagaccatcgctgaccacacccctgtggccatcaagatcatcgccatcgagggccctgacctggtgaatggcagccaccagaagacctttgaggagatcctgcctgagatcatcatcagcaaggagctgagcctgctgagcggggaggtgtgcaacagaacagagggcttcatcggcctgaacagcgtgcactgtgtgcagggcagctacccacccctgctgctgaaggcctgggaccactacaacagcaccaagggcagcgccaatgacagaccagacttcttcaaggatgaccagctgttcatcgtgctggagtttgaatttggaggcatcgacctggagcagatgaggaccaagctgagcagcctggccacagccaagagcatcctgcaccagctgacagccagcctggccgtggccgaggccagcctgcgctttgagcaccgggacctgcactggggcaatgtgctgctgaagaagaccagcctgaagaagctgcactacaccctgaatggcaagagcagcaccatccccagctgtggcctgcaggtgtccatcatcgactacaccctgagccggctggagagagatggcatcgtggtgttctgtgatgtgtccatggatgaggacctcttcaccggagatggagactaccagtttgacatctaccgcctgatgaagaaggagaacaacaaccgctggggcgagtaccacccctacagcaatgtgctgtggctgcactacctgacagacaagatgctgaagcagatgaccttcaagaccaagtgcaacaccccagccatgaagcagatcaagaggaagatccaggagttccacaggaccatgctgaacttcagcagcgccacagacctgctgtgccagcacagcctcttcaagtag

SEQ ID NO: 19033 - DNA, 765 bp, synthetic construct
  source 1..765: mol_type = other DNA; note = Synthetic coding sequence
atggtgcgggaggccaacatcaagcaggccacagctgagaagcagctgaaggaggcccagggcaagattgatgtgctgcaggccgaggtggccgccctgaagaccctggtgctgagcagcagccccaccagccccacccaggagcccctgcccggcggcaagacccccttcaagaagggccacaccaggaacaagagcaccagcagcgccatgagcggcagccaccaggacctgagcgtcatccagcccatcgtgaaggactgcaaggaggccgacctgagcctgtacaatgagttccggctgtggaaggatgagcccaccatggacaggacctgccccttcctggacaagatctaccaggaggacatcttcccctgcctgaccttcagcaagtctgagctggccagcgctgtgctggaggccgtggagaacaacaccctgagcattgagcctgtgggcctgcagcccatccgctttgtgaaggccagcgctgtggagtgtggcggccccaagaagtgtgccctgaccggccagagcaagagctgcaagcaccgcatcaagctgggggacagcagcaactactactacatcagccccttctgccgctaccgcatcacctctgtgtgcaacttcttcacctacatccgctacatccagcagggcctggtgaagcagcaggatgtggaccagatgttctgggaggtgatgcagctgaggaaggagatgagcctggccaagctgggctacttcaaggaggagctgtag

SEQ ID NO: 19034 - DNA, 1077 bp, synthetic construct
  source 1..1077: mol_type = other DNA; note = Synthetic coding sequence
atgtatgccagccagtggttcctgaccctcttcaccgccaagttccccctgtgcatggtgttccacatcatcgacctgctgctgtgtgagggcctgaacatcatcttccacgtggccctggccctgctgaagaccagcaaggaggacctgctgcaggccgactttgaaggagccctgaagttcttccgggtgcagctgcccaagcgctacagagctgaggagaatgcccggcggctgatggagcaggcctgcaacatcaaggtgcccaccaagaagctgaagaagtatgagaaggagtaccagaccatgagggagagccagctgcagcaggaggaccccatggaccgctacaagcgggagaacagaaggctgcaggaggcctccatgaggctggagcaggagaatgatgacctggcccacgagctggtgaccagcaagatcgccctgagaaatgacctggaccaggccgaggacaaggcagatgtgctgaacaaggagctgctgctgaccaagcagaggctggtggagacagaggaggagaagaggaagcaggaggaggagacagcccagctgaaggaggtgttcaggaagcagctggagaaggccgagtatgagatcaagaagaccacagccatcatcgccgagtacaagcagatctgcagccagctgagcacccggctggagaagcagcaggccgccagcaaggaggagctggaggtggtgaagggcaagatgatggcctgcaagcactgcagcgacatcttcagcaaggagggcgccctgaagctggccgccaccggccgggaggaccagggcattgaaacagatgatgagaaggacagcctgaagaagcagctgcgggagatggagctggagctggcccagaccaagctgcagctggtggaggccaagtgcaagatccaggagctggagcaccagagaggagccctgatgaatgagatccaggccgccaagaacagctggttcagcaagaccctgaacagcatcaagacagccaccggcacccagcccctgcagcctgcccctgtgacccagccccccaaggagagcacctag

SEQ ID NO: 19035 - DNA, 2436 bp, synthetic construct
  source 1..2436: mol_type = other DNA; note = Synthetic coding sequence
atgcccctgagcagccccaatgctgctgccacagccagtgacatggacaagaacagcggcagcaacagcagcagcgccagcagcggcagcagcaagggccagcagccccccaggtctgccagcgctggccctgctggggagagcaagcccaagagtgatggcaagaacagcagcggcagcaagcgctacaacaggaagcgggagctgagctaccccaagaatgaaagcttcaacaaccagagccgccgcagcagcagccagaagagcaagaccttcaacaagatgccaccccagaggggcggcggcagcagcaagctgttcagcagcagcttcaacggcggcagaagagatgaggtggccgaggcccagagagctgagttctccccagcccagttcagcggccccaagaagatcaacctgaaccacctgctgaacttcacctttgagccccggggccagacaggccactttgagggcagcggccacggctcctggggcaagaggaacaagtggggccacaagcccttcaacaaggagctgttcctgcaggccaactgccagtttgtggtgtctgaggaccaggactacacagcccactttgctgaccctgacaccctggtgaactgggactttgtggagcaggtgcgcatctgcagccatgaggtgcccagctgccccatctgcctgtacccacccacagctgccaagatcacccgctgtggccacatcttctgctgggcctgcatcctgcactacctgagcctgtctgagaagacctggagcaagtgccccatctgctacagctctgtgcacaagaaggacctgaagtctgtggtggccacagagagccaccagtatgtggtgggggacaccatcaccatgcagctgatgaagcgggagaagggcgtgctggtggccctgcccaagagcaagtggatgaatgtggaccaccccatccacctgggagatgagcagcacagccagtacagcaagctgctgctggccagcaaggagcaggtgctgcaccgggtggtgctggaggagaaggtggccctggagcagcagctggccgaggagaagcacaccccagagagctgcttcatcgaggccgccatccaggagctgaagacccgggaggaggccctgagcggcctggccggcagcagaagagaggtgactggagtggtggccgccctggagcagctggtgctgatggcccccctggccaaggagagcgtcttccagcccaggaagggcgtgctggagtacctgagcgcctttgatgaggagaccacagaggtgtgcagcctggacacccccagccggcccctggccctgcccctggtggaggaggaggaggccgtgtctgagcctgagcctgagggcctgcctgaggcctgtgatgacctggagctggctgatgacaacctgaaggagggcaccatctgcacagagagcagccagcaggagcccatcaccaagagcggcttcacccggctgagcagcagcccctgctactacttctaccaggccgaggatggccagcacatgttcctgcaccctgtgaatgtgcgctgcctggtgcgggagtatggcagcctggagaggagccctgagaagatcagcgccaccgtggtggagattgctggctacagcatgtctgaagatgtgcggcagaggcaccgctacctgagccacctgcccctgacctgtgagttcagcatctgtgagctggccctgcagccccctgtggtgtccaaggagaccctggagatgttcagtgatgacatcgagaagaggaagaggcagaggcagaagaaggcccgggaggagaggagaagagagcggcgcatcgagattgaggagaacaagaagcagggcaagtacccagaggtgcacatccccctggagaacctgcagcagtttcctgccttcaacagctacacctgcagcagtgacagcgccctgggccccaccagcacagagggccacggggccctgagcatcagccccctgagccgcagccctggcagccacgccgacttcctgctgacccccctgagccccacagccagccagggcagccccagcttctgtgtgggcagcctggaggaggacagccccttccccagctttgcccagatgctgcgggtgggcaaggccaaggcagatgtgtggcccaagacagcccccaagaaggatgagaacagcctggtgcccccagcccctgtggacagtgatggagagagtgacaacagcgacagagtgcctgtgcccagcttccagaacagcttcagccaggccattgaagctgccttcatgaagctggacaccccagccaccagtgaccccctgtctgaggagaagggcggcaagaagaggaagaagcagaagcagaagctgctcttcagcacctctgtggtgcacaccaagtag

SEQ ID NO: 19036 - DNA, 5826 bp, synthetic construct
  source 1..5826: mol_type = other DNA; note = Synthetic coding sequence
atgaagaccagtgacctggtgcccagctttggctacttcatccgcagccctgagaagcgggagcccatcgccctgatcaggaagagtgatgtgtcccggggcaacctggagaaggagatggcccacctgaaccacgacctgtacagcggggacctgaatgagcagagccaggcccagctgtctgagggcagcatcaccctgcaggtggaggccgtggagagcaccagccaggtggatgaaaatgatgtgaccctgacagctgacaagggcaagacagaggacaccttcttcatgagcaacaagccccagcgctacaaggacaagctgcctgacagcggggacagcatgctgcgcatcagcaccatcgccagcgccatcgccgaggcctctgtgaacacagaccccagccagctggccgccatgatcaaggccctgagcaacaagacccgggacaagaccttccaggaggatgagaagcagaaggactacagccacgtgcgccacttcctgcccaatgacctggagaagagcaatggcagcaatgccctggacatggagaagtacctgaagaagacagaggtgagccgctatgaaagtgccctggagaacttcagccgggcctccatgtctgacacctgggacctgagcctgcccaaggagcagaccacccaggacatccaccctgtggacctgagcgccacctctgtgtctgtgcgggccccagaagaaaatacagctgccatcgtgtatgtggagaatggagagagcgagaaccaggagagcttccgcaccatcaacagcagcaacagcgtgaccaaccgggagaacaacagcgctgtggtggatgtgaagacctgcagcattgacaacaagctgcaggatgtgggcaatgatgagaaggccaccagcatcagcacccccagcgacagctacagctctgtgaggaacccccgcatcaccagcctgtgcctgctgaaggactgtgaggagatccgggacaaccgggagaaccagaggcagaatgaatgtgtgtctgagatcagcaacagcgagaagcacgtgacctttgagaaccacagaattgtgagccccaagaacagcgacctgaagaacaccagccctgagcacggcggccggggctctgaagatgagcaggagagcttccggcccagcaccagccccctgagccacagcagccccagcgagatcagcggcaccagcagcagcggctgtgccctggagagctttggcagcgctgcccagcagcagcagcccccctgtgagcaggagctgagccccctggtgtgcagccctgctggggtgtcccggctgacctacgtgtctgagcctgagagcagctaccccaccacagccacagatgatgccctggaggacaggaagagtgacatcaccagcgagctgagcaccaccatcatccagggcagccctgctgccctggaggagcgggccatggagaagctgcgggagaaggtgcccttccagaacagaggcaagggcaccctgagcagcatcatccagaacaacagcgacaccaggaaggccacagagaccaccagcctgagcagcaagccagaatatgtgaagccagacttccgctggagcaaggaccccagcagcaagagcggcaacctgctggagaccagcgaggtgggctggaccagcaaccctgaggagctggaccccatccggctggccctgctgggcaagagcggcctgagctgccaggtgggcagcgccaccagccaccctgtgtcctgccaggagcccattgatgaggaccagaggatcagccccaaggacaagagcacagctggccgggagttcagcggccaggtgagccaccagaccaccagcgagaaccagtgcacccccatccccagcagcacagtgcacagctctgtggccgacatgcagaacatgcctgctgctgtgcacgccctgctgacccagcccagcctgtctgctgccccctttgcccagcgctacctgggcaccctgcccagcacaggcagcaccaccctgccccagtgccacgccggaaatgccaccgtgtgtggcttcagcggcggcctgccctacccagctgtggccggggagcctgtgcagaacagcgtggccgtgggcatctgcctgggcagcaacatcggcagcggctggatgggcaccagcagcctgtgcaacccctacagcaacaccctgaaccagaacctgctgagcaccaccaagcccttccctgtgcccagcgtgggcaccaactgtggcatcgagccctgggacagcggcgtgaccagcggcctgggctctgtgcgggtgcctgaggagctgaagctgccccacgcctgctgcgtgggcatcgccagccagaccctgctgtctgtgctgaaccccacagaccgctggctgcaggtgtccattggagtgctgagcatctctgtgaatggagagaaggtggacctgagcacctaccgctgcctggtgttcaagaacaaggccatcatccggccccacgccacagaggagatcaaggtgctcttcatccccagcagccctggggtcttccgctgcaccttctctgtggcctcctggccctgcagcacagatgctgagaccatcgtgcaggccgaggccctggccagcacagtgaccctgacagccatcgccgagagccctgtgattgaggtggagacagagaagaaggatgtgctggactttggagacctgacctacggcggctggaaggccctgcccctgaagctgatcaacagaactcatgccaccgtgcccatccgcctcatcatcaatgccaatgctgtggcctggcgctgcttcaccttcagcaaggagagcgtgcgggcccctgtggaggtggccccctgtgctgatgtggtgacccggctggccggccccagcgtggtgaaccacatgatgcctgccagctatgatggccaggaccctgagttcctgatgatctgggtgctcttccacagccccaagaagcagatcagcagcagtgacatcctggacagcgctgaggagttcagcgccaaggtggacatcgaggtggacagccccaaccccacccctgtgctgcggtctgtgtccctgcgggcccgggccggcatcgcccgcatccacgccccccgggacctgcagaccatgcacttcctggccaaggtggccagcagcaggaagcagcacctgcccctgaagaatgccggcaacatcgaggtgtacctggacatcaaggtgcctgagcagggcagccacttctctgtggaccccaagaacctgctgctgaagccaggagaggagcacgaggtgattgtgtccttcacccccaaggaccctgaggcctgtgaggagcgcatcctgaagatctttgtgcagcccttcggcccccagtatgaggtggtgctgaagggggaggtgatcagcagcggcagcaagcccctgagccctggcccctgcctggacatccccagcatcctgagcaacaagcagttcctggcctggggcggcgtgcccctgggccgcacccagctgcagaagctggccctgaggaacaacagcgccagcaccacccagcacctgcggctgctgatccggggccaggaccaggactgcttccagctgcagaacaccttcggcagcgagcagaggctgaccagcaactgtgagatccgcatccaccccaaggaggacatcttcatctctgtgctgtttgcccccacccggctgagctgcatgctggcccggctggagatcaagcagctgggcaacagaagccagcccggcatcaagttcaccatccccctgagcggctacggcggcaccagcaacctgatcctggagggcgtgaagaagctgagtgacagctacatggtgacagtgaatggcctggtgcctgggaaggagagcaagatcgtgttttctgtgaggaacacaggcagccgggccgcctttgtgaaggctgtgggcttcaaggacagccagaagaaggtgctgctggaccccaaggtgctgcgcatcttcccagacaagtttgtgctgaaggagaggacccaggagaatgtgaccctcatctacaaccccagcgaccggggcatcaacaacaagacagccacagagctgagcacagtgtacctgtttggaggagatgagatcagccggcagcagtacagaagagccctgctgcacaagccagagatgatcaagcagatcctgcctgagcacagcgtgctgcagaacatcaactttgtggaggccttccaggatgagctgctggtgacagaggtgtatgacctgccccagaggcccaatgatgtgcagctgttctacggctccatgtgcaagatcatcctgagcgtcatcggggagttccgggactgcatcagcagccgggagttcctgcagcccagcagcaaggccagcctggagagcaccagtgacctgggcgccagcggcaagcatggaggaaatgtgtccctggatgtgctgcctgtgaagggcccccagggcagccccctgctgagccgggccgcccggccccccctggaccagctggccagcgaggagccctggacagtgctgcctgagcacctgatcctggtggcccccagcccctgtgacatggccaagacaggccgcttccagatcgtgaacaacagcgtgcggctgctgcgctttgagctgtgctggccagcccactgcctgactgtgaccccccagcacggctgtgtggcccctgagagcaagctgcagatcctggtgagccccaacagcagcctgagcaccaagcagagcatgttcccctggagcggcctcatctacatccactgtgatgatggccagaagaagatcgtgaaggtgcagatccgggaggacctgacccaggtggagctgctgacccggctgaccagcaagcccttcggcatcctgagccctgtgtctgagcccagcgtgagccacctggtgaagcccatgaccaagccacccagcaccaaggtggagatccggaacaagagcatcaccttccccaccacagagcccggggagaccagcgagagctgcctggagctggagaaccacggcaccacagatgtgaagtggcacctgagcagcctggccccaccctacgtgaagggcgtggatgagagcggagatgtgttccgggccacctatgctgccttccgctgcagccccatcagcggcctgctggagagccacggcatccagaaggtgtccatcaccttcctgccccggggccgcggggactatgcccagttctgggatgtggagtgccaccccctgaaggagccccacatgaagcacaccctgcgcttccagctgagcggccagagcattgaagcagaaaatgaaccagaaaatgcctgcctgagcacagacagcctcatcaagattgaccacctggtgaagccccggcggcaggccgtgtctgaggccagcgcccgcatccctgagcagctggatgtgacagcccggggcgtgtatgccccagaagatgtgtaccgcttccggcccacctctgtgggggagagcaggaccctgaaggtgaacctgaggaacaacagcttcatcacccacagcctgaagttcctgagcccccgggagcccttctacgtgaagcacagcaagtacagcctgcgggcccagcactacatcaacatgcctgtgcagttcaagcccaagtctgctgggaagtttgaggccctgctggtgatccagacagatgagggcaagagcatcgccatccgcctcatcggggaggccctgggcaagaactag

SEQ ID NO: 19037 - DNA, 4167 bp, synthetic construct
  source 1..4167: mol_type = other DNA; note = Synthetic coding sequence
atggcccctggctgcaagacagagctgcggtctgtgaccaacggccagagcaaccagcccagcaatgaaggagatgccatcaaggtgtttgtgcgcatccggcccccagctgagaggagcggcagcgcagatggagagcagaacctgtgcctgtctgtgctgagcagcaccagcctgcggctgcacagcaaccctgagcccaagaccttcacctttgaccacgtggctgatgtggacaccacccaggagagcgtgtttgccaccgtggccaagagcatcgtggagagctgcatgagcggctacaacggcaccatctttgcctacggccagacaggcagcggcaagaccttcaccatgatgggccccagcgagagtgacaacttcagccacaacctgcggggcgtcatccccaggagctttgagtacctgttcagcctgattgaccgggagaaggagaaggccggggccggcaagagcttcctgtgcaagtgcagcttcatcgagatctacaatgagcagatctatgacctgctggacagcgccagcgctggcctgtacctgcgggagcacatcaagaagggcgtgtttgtggtgggcgctgtggagcaggtggtgaccagcgctgctgaggcctaccaggtgctgagcggcggctggaggaacagaagagtggccagcacctccatgaaccgggagagcagccgcagccatgctgtgttcaccatcaccatcgagagcatggagaagagcaatgaaattgtgaacatccgcaccagcctgctgaacctggtggacctggccggcagcgagcggcagaaggacacccatgctgagggcatgaggctgaaggaggccggcaacatcaacagaagcctgagctgcctgggccaggtgatcacagccctggtggatgtgggcaatggcaagcagagacatgtgtgctacagagacagcaagctgaccttcctgctgcgggacagcctgggcggcaatgccaagacagccatcatcgccaacgtgcaccctggcagccgctgctttggagagaccctgagcaccctgaactttgcccagagggccaagctgatcaagaacaaggctgtggtgaatgaagacacccagggcaatgtgtcccagctgcaggccgaggtgaagaggctgaaggagcagctggccgagctggccagcggccagaccccacctgagagcttcctgacccgggacaagaagaagaccaactacatggagtacttccaggaggccatgctgttcttcaagaagtctgagcaggagaagaagagcctcatcgagaaggtgacccagctggaggacctgaccctgaagaaggagaagttcatccagagcaacaagatgattgtgaagttccgggaggaccagatcatccggctggagaagctgcacaaggagagcagaggaggcttcctgcctgaggagcaggaccggctgctgtctgagctgagaaatgagatccagaccctgcgggagcagatcgagcaccacccccgggtggccaagtatgccatggagaaccacagcctgcgggaggagaacagaaggctgcggctgctggagcctgtgaagagggcccaggagatggatgcccagaccatcgccaagctggagaaggccttcagcgagatcagcggcatggagaagagtgacaagaaccagcagggcttcagccccaaggcccagaaggagccctgcctgtttgccaacacagagaagctgaaggcccagctgctgcagatccagacagagctgaacaacagcaagcaggagtatgaggagttcaaggagctgaccaggaagaggcagctggagctggagagcgagctgcagagcctgcagaaggccaacctgaacctggagaacctgctggaggccaccaaggcctgcaagaggcaggaggtgtcccagctgaacaagatccatgctgagaccctgaagatcatcaccacccccaccaaggcctaccagctgcacagcaggcctgtgcccaagctgagccctgagatgggcagctttggcagcctgtacacccagaacagcagcatcctggacaatgacatcctgaatgaacctgtgcccccagagatgaatgagcaggcctttgaggccatcagcgaggagctgaggacagtgcaggagcagatgtctgccctgcaggccaagctggatgaggaggagcacaagaacctgaagctgcagcagcacgtggacaagctggagcaccacagcacccagatgcaggagctgttcagcagcgagagaattgactggaccaagcagcaggaggagctgctgagccagctgaatgtgctggagaagcagctgcaggagacccagaccaagaatgacttcctgaagtctgaggtgcatgacctgcgggtggtgctgcacagcgctgacaaggagctgagctctgtgaagctggagtacagcagcttcaagaccaaccaggagaaggagttcaacaagctgtctgagcggcacatgcacgtgcagctgcagctggacaacctgcggctggagaatgagaagctgctggagagcaaggcctgcctgcaggacagctatgacaacctgcaggagatcatgaagtttgaaattgaccagctgagcaggaacctgcagaacttcaagaaggaaaatgagaccctgaagagtgacctgaacaacctgatggagctgctggaggccgagaaggagaggaacaacaagctgagcctgcagtttgaggaggacaaggagaacagcagcaaggagatcctgaaggtgctggaggccgtgcggcaggagaagcagaaggagacagccaagtgtgagcagcagatggccaaggtgcagaagctggaggagagcctgctggccacagagaaggtgatcagcagcctggagaagagccgggacagcgacaagaaggtggtggccgacctgatgaaccagatccaggagctgcggacctctgtgtgtgagaagacagagaccatcgacaccctgaagcaggagctgaaggacatcaactgcaagtacaacagcgccctggtggaccgggaggagagccgggtgctgatcaagaagcaggaggtggacatcctggacctgaaggagaccctgcggctgcgcatcctgtctgaggacatcgagcgggacatgctgtgtgaggacctggcccacgccacagagcagctgaacatgctgacagaggccagcaagaagcacagcggcctgctgcagagcgcccaggaggagctgaccaagaaggaggccctgatccaggagctgcagcacaagctgaaccagaagaaggaggaggtggagcagaagaagaatgagtacaacttcaagatgaggcagctggagcacgtgatggacagcgctgctgaggacccccagagccccaagaccccaccccacttccagacccacctggccaagctgctggagacccaggagcaggagattgaagatggccgggccagcaagaccagcctggagcacctggtgaccaagctgaatgaagatcgggaggtgaagaatgctgagatcctgaggatgaaggagcagctgcgggagatggagaacctgcggctggagagccagcagctgattgagaagaactggctgctgcagggccagctggatgacatcaagaggcagaaggagaacagcgaccagaaccacccagacaaccagcagctgaagaatgagcaggaggagagcatcaaggagcggctggccaagagcaagatcgtggaggagatgctgaagatgaaggctgacctggaggaggtgcagagcgccctgtacaacaaggagatggagtgcctgaggatgacagatgaggtggagaggacccagaccctggagagcaaggccttccaggagaaggagcagctgcggagcaagctggaggagatgtatgaggagcgggagaggaccagccaggagatggagatgctgaggaagcaggtggagtgcctggccgaggagaatggcaagctggtgggccaccagaacctgcaccagaagatccagtatgtggtgcggctgaagaaggaaaatgtgcggctggccgaggagacagagaagctgcgggcagaaaatgtgttcctgaaggagaagaagaggtctgagagctag

SEQ ID NO: 19038 - DNA, 4767 bp, synthetic construct
  source 1..4767: mol_type = other DNA; note = Synthetic coding sequence
atgctgccccccaagcacctgagcgccaccaagcccaagaagtcctgggcccccaacctgtatgagctggacagcgacctgaccaaggagccagatgtgatcattggagagggccccacagacagcgagttcttccaccagcgcttcaggaacctgatctacgtggagtttgtgggccccaggaagaccctcatcaagctgaggaacctgtgcctggactggctgcagcctgagaccaggaccaaggaggagatcatcgagctgctggtgctggagcagtacctgaccatcatccctgagaagctgaagccctgggtgcgggccaagaagccagagaactgtgagaagctggtgaccctgctggagaactacaaggagatgtaccagccagaagatgacaacaacagtgatgtgaccagtgatgatgacatgaccaggaacagaagagagagcagccccccccacagcgtgcacagcttcagtgaccgggactgggacagaagaggccgcagccgggacatggagccccgggaccgctggagccacaccaggaaccccaggagcaggatgccaccccgggacctgagcctgcctgtggtggccaagaccagctttgagatggaccgggaggatgaccgggacagccgggcctatgagagccgcagccaggatgctgagagctaccagaatgtggtggacctggccgaggacaggaagccccacaacaccatccaggacaacatggagaactacaggaagctgctgagcctggtgcagctggccgaggatgatggccacagccacatgacccagggccacagcagccgcagcaagaggtctgcctaccccagcaccagccggggcctgaagaccatgcctgaggccaagaagagcacccacagaagaggcatctgtgaagatgagagcagccatggagtcatcatggagaagttcatcaaggatgtgagccgcagcagcaagagcggccgggcccgggagagcagtgacaggagccagcgcttccccaggatgtctgatgacaactggaaggacatcagcctgaacaagcgggagagcgtcatccagcagagggtgtatgagggcaatgccttccggggcggcttccgcttcaacagcaccctggtgtccaggaagagggtgctggagaggaagaggcgctaccactttgacacagatggcaagggcagcatccatgaccagaagggctgccccaggaagaagccctttgaatgtggcagcgagatgaggaaggccatgtctgtgagcagcctgagcagcctgagcagccccagcttcacagagagccagcccatcgactttggagccatgccctacgtgtgtgatgaatgtggccgctccttcagcgtcatcagcgagtttgtggagcaccagatcatgcacacccgggagaacctgtatgaatatggagagagcttcatccacagcgtggccgtgtctgaggtgcagaagagccaggtgggcggcaagagatttgagtgcaaggactgtggggagaccttcaacaagtctgctgccctggccgagcacaggaagatccacgcccggggctacctggtggagtgcaagaaccaggagtgtgaggaggccttcatgcccagccccaccttcagcgagctgcagaagatctacggcaaggacaagttctatgagtgccgggtgtgcaaggagaccttcctgcacagcagcgccctgattgagcaccagaagatccactttggagatgacaaggacaatgaaagagagcacgagcgggagcgggagcgggagcggggggagaccttccggcccagccctgccctgaatgagttccagaagatgtatggcaaggagaagatgtatgagtgcaaggtgtgtggggagaccttcctgcacagcagcagcctgaaggagcaccagaagatccacacccggggcaacccctttgagaacaagggcaaggtgtgtgaggagaccttcatccctggccagagcctgaagaggcggcagaagacctacaacaaggagaagctgtgtgacttcacagatggaagagatgccttcatgcagagcagcgagctgtctgagcaccagaagatccacagcaggaagaacctgtttgagggccggggctatgagaagagcgtcatccacagcggccccttcacagagagccagaagagccacaccatcacccggcccctggagagtgatgaagatgagaaggccttcaccatcagcagcaacccctatgagaaccagaagatccccaccaaggaaaatgtgtatgaggccaagagctatgaaagaagtgtcatccacagcctggcctctgtggaggcccagaagagccacagcgtggccggccccagcaagcccaaggtgatggccgagagcaccatccagagctttgatgccatcaaccaccagagggtgcgggccggcggcaacaccagcgagggccgggagtacagccgcagcgtcatccacagcctggtggccagcaagcccccaagaagccacaatggaaatgagctggtggagagcaatgagaagggggagagcagcatctacatcagtgacctgaatgacaagaggcagaagatcccagcccgggagaacccctgtgagggcggcagcaagaacagaaattatgaggacagcgtcatccagagcgtcttccgggccaagccccagaagtctgtgcctggagagggcagcggggagttcaagaaggatggagagttctctgtgcccagcagcaatgtgcgggagtaccagaaggcccgggccaagaagaagtacatcgagcacaggagcaatgagaccagcgtcatccacagcctgccctttggagagcagaccttccggccccggggcatgctgtatgagtgccaggagtgtggggagtgctttgcccacagcagtgacctgacagagcaccagaagatccatgaccgggagaagcccagcggcagcaggaactatgagtggagcgtcatccgcagcctggcccccacagacccccagaccagctatgcccaggagcagtatgccaaggagcaggccaggaacaagtgcaaggacttccggcagttctttgccaccagcgaggacctgaacaccaaccagaagatctatgaccaggagaagagccatggagaggagagccagggcgagaacacagatggagaggagacccacagcgaggagacccacggccaggagaccattgaagatcctgtgatccagggcagtgacatggaggacccccagaaggatgatcctgatgacaagatctatgaatgtgaggactgtggcctgggctttgtggacctgacagacctgacagaccaccagaaggtgcacagcaggaagtgcctggtggacagccgggagtacacccacagcgtcatccacacccacagcatcagcgagtaccagagggactacaccggggagcagctgtatgagtgccccaagtgtggggagagcttcatccacagcagcttcctgtttgagcaccagagaattcatgagcaggaccagctgtacagcatgaagggctgtgatgatggcttcatcgccctgctgcccatgaagcccaggaggaacagagctgctgagaggaacccagccctggccggcagcgccatccgctgcctgctgtgtggccagggcttcatccacagcagcgccctgaatgagcacatgaggctgcacagagaagatgacctgctggagcagagccagatggccgaggaggccatcatccctggcctggccctgacagagttccagaggagccagacagaggagcggctgtttgaatgtgctgtgtgtggggagagctttgtgaacccagctgagctggccgaccacgtgacagtgcacaagaatgagccctatgaatatggcagcagctacacccacaccagcttcctgacagagcccctgaagggggccatccccttctatgagtgcaaggactgtgggaagagcttcatccacagcacagtgctgaccaagcacaaggagctgcacctggaggaggaggaggaggatgaagctgctgctgctgctgctgctgctgcccaggaggtggaggccaacgtgcacgtgccccaggtggtgctgcgcatccagggcctgaatgtggaggccgctgagcctgaggtggaggccgctgagcctgaggtggaggccgctgagcctgaggtggaggccgctgagcccaatggagaggccgagggcccagatggagaggccgctgagcccatcggggaggccggccagcccaacggggaggccgagcagcccaatggagatgctgatgagccagatggagctggcattgaagatcctgaggagagagctgaggagcctgagggcaaggccgaggagccagaaggagatgctgatgagccagatggagtgggcatcgaggaccctgaggagggggaggaccaggagatccaggtggaggagccctactatgactgccatgaatgtacagagaccttcaccagcagcacagccttcagcgagcacctgaagacccacgcctccatgatcatctttgagcccgccaatgcctttggagaatgttctggctacatcgagcgggccagcaccagcactggaggagccaaccaggctgatgagaagtacttcaagtgtgatgtgtgtggccagctgttcaatgaccggctgagcctggcccggcaccagaacacccacactggatag

SEQ ID NO: 19039 - DNA, 2508 bp, synthetic construct
  source 1..2508: mol_type = other DNA; note = Synthetic coding sequence
atgggcaactacaagagccggcccacccagacctgcacagatgagtggaagaagaaggtgtctgagagctatgtgatcaccatcgagcggctggaggatgacctgcagatcaaggagaaggagctgacagagctgaggaacatctttggaagtgatgaggccttcagcaaggtgaacctgaactacagaacagaaaatggcctgagcctgctgcacctgtgctgcatctgtggcggcaagaagagccacatccgcaccctgatgctgaagggcctgcggcccagccggctgaccagaaatggcttcaccgccctgcacctggccgtgtacaaggacaatgctgagctgatcaccagcctgctgcacagcggggctgacatccagcaggtgggctacggcggcctgacagccctgcacatcgccaccatcgccggccacctggaggccgcagatgtgctgctgcagcacggggccaacgtgaacatccaggatgctgtgttcttcacccccctgcacatcgccgcctactacggccacgagcaggtgacccggctgctgctgaagtttggagcagatgtgaatgtgtctggagaggtgggggaccggcccctgcacctggccagcgccaagggcttcctgaacatcgccaagctgctgatggaggagggcagcaaggcagatgtgaatgcccaggacaatgaagaccacgtgcccctgcacttctgcagcagatttggccaccacgacatcgtgaagtacctgctgcagagcgacctggaggtgcagccccacgtggtgaacatctatggagacacccccctgcacctggcctgctacaacgggaagtttgaggtggccaaggagatcatccagatctctggaacagagagcctgaccaaggagaacatcttcagcgagacagccttccacagcgcctgcacctacggcaagagcattgacctggtgaagttcctgctggaccagaatgtcatcaacatcaaccaccagggcagagatggccacacaggcctgcacagcgcctgctaccacggccacatccggctggtgcagttcctgctggacaacggggctgacatgaacctggtggcctgtgaccccagccgcagcagtggagagaaggatgagcagacctgcctgatgtgggcctatgagaagggccatgatgccatcgtgaccctgctgaagcactacaagaggccccaggatgagctgccctgcaatgagtacagccagcctggaggagatggcagctatgtgtctgtgcccagccccctgggcaagatcaagtccatgaccaaggagaaggctgacatcctgctgctgcgggccggcctgcccagccacttccacctgcagctgtctgaaattgagttccacgagatcatcggcagcggcagctttgggaaggtgtacaagggccgctgcaggaacaagatcgtggccatcaagcgctaccgggccaacacctactgcagcaagagtgatgtggacatgttctgccgggaggtgtccatcctgtgccagctgaaccacccctgcgtcatccagtttgtgggcgcctgcctgaatgaccccagccagtttgccatcgtgacccagtacatcagcggcggcagcctcttcagcctgctgcacgagcagaagaggatcctggacctgcagagcaagctgatcatcgctgtggatgtggccaagggcatggagtacctgcacaacctgacccagcccatcatccaccgggacctgaacagccacaacatcctgctgtatgaagatggccatgctgtggtggccgactttggagagagccgcttcctgcagagcctggatgaggacaacatgaccaagcagcccggcaacctgcgctggatggcccctgaggtgttcacccagtgcacccgctacaccatcaaggcagatgtgttctcctatgccctgtgcctgtgggagatcctgaccggggagatcccctttgcccacctgaagccagctgctgctgctgctgacatggcctaccaccacatccggccccccatcggctacagcatccccaagcccatcagcagcctgctgatccggggctggaatgcctgcccagagggccggcctgagttcagcgaggtggtgatgaagctggaggagtgcctgtgcaacatcgagctgatgagccctgccagcagcaacagcagcggcagcctgagccccagcagcagcagtgactgcctggtgaacagaggaggccctggccgcagccacgtggccgccctgcggagcagatttgagctggagtatgccctgaatgcccggagctatgctgccctgagccagagcgctggccagtacagcagccagggcctgagcctggaggagatgaagaggagcctgcagtacacccccatcgacaagtatggctacgtgtctgaccccatgagctccatgcacttccacagctgcaggaacagcagcagctttgaggacagcagctag

SEQ ID NO: 19040 - DNA, 1767 bp, synthetic construct
  source 1..1767: mol_type = other DNA; note = Synthetic coding sequence
atgaacaccagcatcccctaccagcagaacccctacaacccccggggcagcagcaatgtcatccagtgctaccgctgtggggacacctgcaagggggaggtggtgcgggtgcacaacaaccacttccacatccgctgcttcacctgccaggtgtgtggctgcggcctggcccagagcggcttcttcttcaagaaccaggagtacatctgcacccaggactaccagcagctgtatggcacccgctgtgacagctgccgggacttcatcaccggggaggtgatcagcgccctgggccgcacctaccaccccaagtgctttgtgtgcagcctgtgcaggaagcccttccccatcggggacaaggtgaccttcagcggcaaggaatgtgtgtgccagacctgcagccagagcatggccagcagcaagcccatcaagatccggggccccagccactgtgccggctgcaaggaggagatcaagcacggccagagcctgctggccctggacaagcagtggcacgtgtcctgcttcaagtgccagacctgcagcgtcatcctgaccggggagtacatcagcaaggatggagtgccctactgtgagagtgactaccacgcccagtttggcatcaagtgtgagacctgtgaccgctacatcagcggccgggtgctggaggccggcggcaagcactaccaccccacctgtgcccgctgtgtgcgctgccaccagatgttcacagaaggagaggagatgtacctgaccggcagcgaggtgtggcaccccatctgcaagcaggccgcccgggcagagaagaagctgaagcacaggaggaccagcgagaccagcatcagccccccaggcagcagcatcggcagccccaacagagtcatctgtgacatctatgagaacctggacctgcggcagaggcgggccagcagccctggctacatcgacagccccacctacagccggcagggcatgagccccaccttcagccgcagcccccaccactactacagatctgctggggacagcaacatctacaggaagccacccatctacaagagacatggagacctgagcacagccaccaagagcaagaccagcgaggacatcagccagaccagcaagtacagccccatctacagcccagacccctactatgccagcgagagcgagtactggacctaccacggcagccccaaggtgccccgggcccggcgcttcagcagtggaggagaagaagatgactttgaccgctccatgcacaagctgcagagcggcatcggccgcctcatcctgaaggaggagatgaaggcccggagcagcagctatgctgacccctggaccccacccaggagcagcaccagcagccgggaggccctgcacacagctggctatgagatgagcctgaatggcagccccaggagccactacctggccgacagcgaccccctcatcagcaagagcgccagcctgcctgcctacagaagaaatggcctgcacaggacccccagcgctgacctcttccactatgacagcatgaatgctgtgaactggggcatgagggagtacaagatctacccctatgagctgctgctggtgaccacccggggcaggaaccggctgcccaaggatgtggacaggacccggctggagcggcacctgagccaggaggagttctaccaggtgtttggcatgaccatcagcgagtttgaccggctggccctgtggaagagaaatgagctgaagaagcaggcccggctcttctag

SEQ ID NO: 19041 - DNA, 1050 bp, synthetic construct
  source 1..1050: mol_type = other DNA; note = Synthetic coding sequence
atggccatccccatcaccgtgctggactgtgacctgctgctgtatggccggggccacaggaccctggaccgcttcaagctggatgatgtgacagatgagtacctgatgtccatgtatggcttcccccggcagttcatctactacctggtggagctgctgggcgccaacctgagccggcccacccagaggagccgggccatcagccctgagacccaggtgctggccgccctgggcttctacaccagcggcagcttccagaccaggatgggagatgccatcggcatcagccaggcctccatgagccgctgtgtggccaacgtgacagaggccctggtggagcgggccagccagttcatccgcttcccagcagatgaggccagcatccaggccctgaaggatgagttctacggcctggccggcatgcctggggtgatgggcgtggtggactgcatccacgtggccatcaaggccccaaatgctgaggacctgtcctatgtgaacaggaagggcctgcacagcctgaactgcctgatggtgtgtgacatccggggcaccctgatgacagtggagaccaactggccaggcagcctgcaggactgtgctgtgctgcagcagagcagcctgagcagccagtttgaggccggcatgcacaaggacagctggctgctgggggacagcagcttcttcctgcggacctggctgatgacccccctgcacatccctgagaccccagctgagtaccgctacaacatggcccacagcgccacccacagcgtcatcgagaagaccttccgcaccctgtgcagccgcttccgctgcctggatggcagcaagggggccctgcagtacagccctgagaagagcagccacatcatcctggcctgctgcgtgctgcacaacatcagcctggagcacggcatggatgtgtggagcagccccatgacaggccccatggagcagcccccagaggaggagtatgagcacatggagagcctggacctggaggccgaccgcatccggcaggagctgatgctgacccacttctcctag

SEQ ID NO: 19042 - DNA, 1794 bp, synthetic construct
  source 1..1794: mol_type = other DNA; note = Synthetic coding sequence
atgagcagcaagggcagcagcacagatggccgcacagacctggccaacggcagcctgagcagcagccctgaggagatgtctggagctgaggagggccgggagaccagcagcggcatcgaggtggaggccagtgacctgagcctgagcctgactggagatgatggcggccccaacagaaccagcacagagagccggggcacagacacagagagcagcggggaggacaaggacagcgacagcatggaggacaccggccactacagcatcaatgatgagaacagagtgcatgacagaagtgaggaggaggaggaggaggaggaggaggaggaggaggagcagccccggcggcgggtgcagaggaagagggccaacagagaccaggacagcagtgatgatgagcgggccctggaggactgggtgagcagcgagaccagcgccctgccccggccccgctggcaggccctgcctgccctgcgggagcgggagctgggcagcagcgccaggtttgtgtatgaggcctgtggggcccgggtgtttgtgcagcgcttccggctgcagcacggcctggagggccacacaggctgtgtgaacaccctgcacttcaaccagaggggcacctggctggccagcggcagtgatgacctgaaggtggtggtgtgggactgggtgcggcggcagcctgtgctggactttgaaagtggccacaagagcaatgtgttccaggccaagttcctgcccaacagcggggacagcaccctggccatgtgtgccagagatggccaggtgcgggtggccgagctgagcgccacccagtgctgcaagaacaccaagagggtggcccagcacaagggggccagccacaagctggccctggagccagacagcccctgcaccttcctgtctgctggggaggatgctgtggtgttcaccatcgacctgcggcaggacaggcctgccagcaagctggtggtgaccaaggagaaggagaagaaggtgggcctgtacaccatctacgtgaacccagccaacacccaccagtttgctgtgggcggccgggaccagtttgtgcgcatctatgaccagaggaagattgatgaaaatgaaaacaacggggtgctgaagaagttctgcccccaccacctggtgaacagcgagagcaaggccaacatcacctgcctggtgtacagccatgatggaacagagctgctggccagctacaatgatgaggacatctacctgttcaacagcagccacagtgatggagcccagtatgtgaagcgctacaagggccacaggaacaatgccaccgtgaagggcgtgaacttctacggccccaagtcagaatttgtggtgtctggcagtgactgtggccacatcttcctgtgggagaagagcagctgccagatcatccagttcatggagggggacaagggcggcgtggtgaactgcctggagccccacccccacctgcctgtgctggccaccagcggcctggaccatgatgtgaagatctgggcccccacagctgaggccagcacagagctgaccggcctgaaggatgtgatcaagaagaacaagcgggagagagatgaggacagcctgcaccagacagacctgtttgacagccacatgctgtggttcctgatgcaccacctgcggcagaggaggcaccaccggcgctggagggagcccggggtgggcgccacagatgctgacagtgatgagagccccagcagcagtgacaccagtgatgaggaggagggccctgacagagtgcagtgcatgcccagctag

SEQ ID NO: 19043 - DNA, 933 bp, synthetic construct
  source 1..933: mol_type = other DNA; note = Synthetic coding sequence
atgagccagcagctgaagaagagggccaagaccaggcaccagaagggcctgggcggccgggcccccagcggggccaagccccggcagggcaagagcagccaggacctgcaggccgagattgagcctgtgtctgctgtgtgggccctgtgtgatggctacgtgtgctatgagcccggcccccaggccctgggcggagatgacttcagtgactgctacattgaatgtgtgatccggggggagttcagccagcccatcctggaggaggacagcctgtttgagagcctggagtacctgaagaagggcagcgagcagcagctgagccagaaggtgtttgaggccagcagcctggagtgcagcctggagtacatgaagaagggcgtgaagaaggagctgccccagaagatcgtgggggagaacagcctggagtacagcgagtacatgaccgggaagaagctgcccccaggcggcatccctggcatcgacctgagtgaccccaagcagctggccgagtttgccaggaagaagccacccatcaacaaggagtatgacagcctgagcgccatcgcctgcccccagagcggctgcaccaggaagctgaggaacagagctgccctgaggaagcacctgctgatccacggcccccgggaccacgtgtgtgctgaatgtgggaaggcctttgtggagagcagcaagctgaagaggcacttcctggtgcacactggagagaagcccttccgctgcacctttgagggctgtgggaagcgcttcagcctggacttcaacctgcggacccacgtgcgcatccacactggagagaagagatttgtgtgccccttccagggctgcaacagacgcttcatccagagcaacaacctgaaggcccacatcctgacccacgccaacaccaacaagaatgagcaggagggcaagtag

SEQ ID NO: 19044 - DNA, 1149 bp, synthetic construct
  source 1..1149: mol_type = other DNA; note = Synthetic coding sequence
atgctgcgctggacagtgcacctggagggcggccccaggagagtgaaccacgccgctgtggccgtgggccaccgggtgtacagctttggaggctactgcagcggggaggactatgagaccctgcggcagattgatgtgcacatcttcaatgctgtgtccctgcgctggaccaagctgccccctgtgaagagcgccatccggggccaggcccctgtggtgccctacatgagatatggccacagcacagtgctgattgatgacacagtgctgctgtggggcggcagaaatgacacagagggcgcctgcaatgtgctgtatgcctttgatgtgaacacccacaagtggttcaccccccgggtgtctggaacagtgcctggggccagagatggccacagcgcctgtgtgctgggcaagatcatgtacatctttggaggctatgagcagcaggccgactgcttcagcaatgacatccacaagctggacaccagcaccatgacctggaccctcatctgcaccaagggcagccctgcccgctggagggacttccacagcgccaccatgctgggcagccacatgtatgtgtttggaggccgggctgaccgcttcggccccttccacagcaacaatgagatctactgcaaccgcatccgggtgtttgacaccaggacagaggcctggctggactgcccccccacccctgtgctgcctgagggcagaagaagccacagcgccttcggctacaacggggagctgtacatctttggaggctacaatgcccggctgaacagacacttccatgacctgtggaagttcaaccctgtgtccttcacctggaagaagattgagcccaagggcaagggcccctgcccccggcggcggcagtgctgctgcatcgtgggggacaagatcgtgctgtttggaggcaccagccccagccctgaggagggcctgggagatgaatttgacctgattgaccacagcgacctgcacatcctggacttcagccccagcctgaagaccctgtgcaagctggccgtcatccagtacaacctggaccagagctgcctgccccatgacatccgctgggagctgaatgccatgaccaccaacagcaacatcagccggcccatcgtgagcagccatggatag

SEQ ID NO: 19045 - DNA, 1827 bp, synthetic construct
  source 1..1827: mol_type = other DNA; note = Synthetic coding sequence
atggctgctgctgctgctgctgtgggccctggggccggcggggccggcagcgctgtgcctgggggcgccggcccctgtgccaccgtgtctgtgtttcctggggcccggctgctgaccatcggagatgccaacggggagatccagagacatgctgagcagcaggccctgcggctggaggtgcgggccggccctgacagcgctggcatcgccctgtacagccatgaagatgtgtgtgtgttcaagtgcagcgtgtcccgggagacagaatgttcccgggtgggcaagcagagcttcatcatcaccctgggctgcaacagcgtgctgatccagtttgccaccccaaatgacttctgcagcttctacaacatcctgaagacctgccggggccacaccctggagaggtctgtgttcagcgagaggacagaggagagcagcgctgtgcagtacttccagttctacggctacctgagccagcagcagaacatgatgcaggactatgtgaggacaggcacctaccagagggccatcctgcagaaccacacagacttcaaggacaagatcgtgctggatgtgggctgcggcagcggcatcctgtccttctttgctgcccaggccggggccaggaagatctatgctgtggaggccagcaccatggcccagcacgccgaggtgctggtgaagagcaacaacctgacagacagaattgtggtgattcctgggaaggtggaggaggtgtccctgcctgagcaggtggacatcatcatcagcgagcccatgggctacatgctgttcaatgaaagaatgctggagagctacctgcacgccaagaagtacctgaagcccagcggcaacatgttccccaccatcggagatgtgcacctggcccccttcacagatgagcagctgtacatggagcagttcaccaaggccaacttctggtaccagcccagcttccatggagtggacctgagcgccctgcggggagctgctgtggatgagtacttccggcagcctgtggtggacacctttgacatccgcatcctgatggccaagtctgtgaagtacacagtgaacttcctggaggccaaggagggggacctgcaccgcatcgagatccccttcaagttccacatgctgcacagcggcctggtgcacggcctggccttctggtttgatgtggccttcatcggcagcatcatgacagtgtggctgagcacagcccccacagagcccctgacccactggtaccaggtgcgctgcctcttccagagccccctgtttgccaaggccggggacaccctgagcggcacctgcctgctgattgccaacaagaggcagagctatgacatcagcatcgtggcccaggtggaccagacaggcagcaagagcagcaacctgctggacctgaagaaccccttcttccgctacacaggcaccacccccagccccccacctggcagccactacaccagccccagcgagaacatgtggaacacaggcagcacctacaacctgagcagcggcatggctgtggccggcatgcccacagcctatgacctgagcagcgtcatcgccagcggcagctctgtgggccacaacaacctgatccccctggccaacacaggaattgtgaaccacacccacagcaggatgggcagcatcatgagcactggaattgtgcagggcagcagcggggcccagggcagcggcggcggcagcaccagcgcccactatgctgtgaacagccagttcaccatgggcggccctgccatctccatggccagccccatgagcatccccaccaacaccatgcactacggcagctag

SEQ ID NO: 19046 - DNA, 2913 bp, synthetic construct
  source 1..2913: mol_type = other DNA; note = Synthetic coding sequence
atgcagagcacagacctgggcaacaaggagagcggcaagatctggcacaggaagcccagccctgccaccagagatggcatcatcgtgaacatcatccacaacaccagtgactaccaccccaaggtgctgcgcttcctgaatgtggcctttgatggcactggagactgcctgattgctggggaccaccagggcaacatctacgtgtttgacctgcacggcaaccgcttcaacctggtgcagaggacagcccaggcctgcacagccctggccttcaacctgcggaggaagtctgagttcctggtggccctggccgactacagcatcaagtgctttgacacagtgaccaaggagctggtgtcctggatgaggggccacgagagcagcgtcttcagcatctctgtgcacgccagcggcaagtatgccatcaccaccagcagtgacacagcccagctgtgggacctggacaccttccagaggaagaggaagctgaacatccggcagagcgtgggcatccagaaggtgttcttcctgcccctgagcaacaccatcctgagctgcttcaaggacaacagcatctttgcctgggagtgtgacaccctcttctgcaagtaccagctgcctgcccctcctgagagcagcagcatcctgtacaaggtgtttgctgtgaccagagatggccgcatcctggccgccggcggcaagagcaaccacctgcacctgtggtgcctggaggcccggcagctgttccgcatcatccagatgcccaccaaggtgcgggccatccgccacctggagttcctgcctgacagctttgatgctggcagcaaccaggtgctgggcgtgctgagccaggacggcatcatgaggttcatcaacatgcagacctgcaagctgctgtttgagatcggcagcctggatgagggcatcagcagcagcgccatcagcccccacggccgctacatcgccagcatcatggagaatggcagcctgaacatctacagcgtgcaggccctgacccaggagatcaacaagcccccaccacccctggtgaaggtgattgaggacctgcccaagaacaagctgagcagcagtgacctgaagatgaaggtgaccagcggccgggtgcagcagcctgccaagagccgggagagcaagatgcagacccgcatcctgaagcaggacctgaccggggactttgagagcaagaagaatgagctgcctgatggcctgaacaagaagaggctgcagatcctgctgaagggctacggggagtaccccaccaagtacaggatgttcatctggaggagcctgctgcagctgcctgagaaccacacagccttcagcaccctgattgacaagggcacccacgtggccttcctgaacctgcagaagaagtaccccatcaagagcaggaagctgctgcgggtgctgcagaggaccctgagcgccctggcccactggagcgtcatcttcagtgacaccccctacctgcccctgctggccttcccctttgtgaagctgttccagaacaaccagctgatctgctttgaggtgattgccaccctcatcatcaactggtgccagcactggtttgagtacttccccaacccccccatcaacatcctgtccatgattgaaaatgtgctggccttccatgacaaggagctgctgcagcacttcatcgaccatgacatcaccagccagctgtatgcctggcccctgctggagaccgtcttcagcgaggtgctgacccgggaggagtggctgaagctgtttgacaacatcttcagcaaccaccccagcttcctgctgatgacagtggtggcctacaacatctgcagcaggacccccctgctgagctgcaacctgaaggatgactttgagttcttcttccaccacaggaacaacctggacatcaacgtggtgatccggcaggtgtaccacctgatggagaccacccccacagacatccacccagacagcatgctgaatgtgtttgtggccctgaccaagggccagtaccctgtgttcaaccagtaccccaagttcatcgtggactaccagacccaggagcgggagcgcatcagaaatgatgagctggactacctgcgggagcggcagacagtggaggacatgcaggccaaggtggaccagcagagggtggaggatgaggcctggtaccagaagcaggagctgctgaggaaggccgaggagacccggcgggagatgctgctgcaggaggaggagaagatgatccagcagaggcagaggctggccgctgtgaagcgggagctgaaggtgaaggagatgcacctgcaggatgctgcccggcggcgcttcctgaagctgcagcaggaccagcaggagatggagctgcggcggctggatgatgaaattggaaggaagaacctgacagagaaccaggaggccctggccaaggagatgagagcagatgctgatgcctacagaaggaaggtggacctggaggagcacatgttccacaagctgattgaagctggggagacccagagccagaagacccagaagtggaaggaggccgagggcaaggagttccggctgcggagcgccaagaaggccagcgccctgagtgatgccagcaggaagtggttcctgaagcaggagatcaatgctgctgtggagcacgccgagaacccctgccacaaggaggagccccgcttccagaatgagcaggacagcagctgcctgcccaggaccagccagctgaatgacagcagcgagatggaccccagcacccagatcagcctgaacagaagagctgtggagtgggacaccaccggccagaacctgatcaagaaggtgaggaacctgcggcagaggctgacagcccgggcccggcaccgctgccagaccccccacctgctggccgcctag

SEQ ID NO: 19047 - DNA, 648 bp, synthetic construct
  source 1..648: mol_type = other DNA; note = Synthetic coding sequence
atgagctgcaccatcgagaaggccctggctgatgccaaggccctggtggagcggctgcgggaccatgatgatgctgctgagagcctcatcgagcagaccacagccctgaacaagagggtggaggccatgaagcagtaccaggaggagatccaggagctgaatgaggtggcccggcaccggcccaggagcaccctggtgatgggcatccagcaggagaaccggcagatccgggagctgcagcaggagaacaaggagctgcggaccagcctggaggagcaccagagcgccctggagctgatcatgagcaagtaccgggagcagatgttccggctgctgatggccagcaagaaggatgaccccggcatcatcatgaagctgaaggagcagcacagcaaggagctgcaggcccacgtggaccagatcacagagatggctgctgtgatgaggaaggccatcgagattgatgagcagcagggctgcaaggagcaggagcgcatcttccagctggagcaggagaacaagggcctgcgggagatcctgcagatcacccgggagagcttcctgaacctgaggaaggatgatgccagcgagagcaccagcctgagcgccctggtgaccaacagcgacctgagcctgaggaagagctag

SEQ ID NO: 19048 - DNA, 2676 bp, synthetic construct
  source 1..2676: mol_type = other DNA; note = Synthetic coding sequence
atggctgtggcccgggtggatgctgccctgcccccaggagagggctctgtggtgaactggagcggccagggcctgcagaagctgggccccaacctgccctgtgaggccgacatccacaccctcatcctggacaagaaccagatcatcaagctggagaacctggagaagtgcaagaggctcatccagctgtctgtggccaacaaccggctggtgaggatgatgggcgtggccaagctgaccctgctgcgggtgctgaacctgccccacaacagcatcggctgtgtggagggcctgaaggagctggtgcacctggagtggctgaacctggccggcaacaacctgaaggccatggagcagatcaacagctgcacagccctgcagcacctggacctgagtgacaacaacatcagccagattggagacctgagcaagctggtgtccctgaagaccctgctgctgcacggcaacatcatcaccagcctgaggatggccccagcctacctgcccaggagcctggccatcctgagcctggctgaaaatgagatccgggacctgaatgagatctccttcctggccagcctgacagagctggagcagctgagcatcatgaacaacccctgtgtgatggccacccccagcatccctggctttgactaccggccctacatcgtgtcctggtgcctgaacctgcgggtgctggatggctacgtgatcagccagaaggagagcctgaaggccgagtggctgtacagccagggcaagggccgggcctaccggcccggccagcacatccagctggtgcagtacctggccaccgtgtgccccctgaccagcaccctgggcctgcagacagcagaagatgccaagctggagaagatcctgagcaagcagcgcttccaccagaggcagctgatgaaccagagccagaatgaggagctgagccccctggtgcctgtggagacccgggccagcctcatccctgagcacagcagccctgtgcaggactgccagatcagccaggagagcgagcccgtcatccaggtgaacagctgggtgggcatcaacagcaatgatgaccagctgtttgctgtgaagaacaacttccctgcctctgtgcacaccacccgctacagcagaaatgacctgcacctggaggacatccagacagatgaggacaagctgaactgcagcctgctgagcagcgagagcaccttcatgcctgtggccagcggcctgagccccctgagccccaccgtggagctgcggctgcagggcatcaacctgggcctggaggatgatggagtggctgatgaatctgtgaagggcctggagagccaggtgctggacaaggaggaggagcagcccctgtgggccgccaatgaaaattctgtgcagatgatgaggtctgagatcaacacagaggtgaatgagaaggccggcctgctgccctgcccagagcccaccatcatcagcgccatcctgaaggatgacaaccacagcctgaccttcttccctgagagcacagagcagaagcagagcgacatcaagaagccagagaacacccagcctgagaacaaggagaccatcagccaggccaccagcgagaagctgcccatgatcctgacccagaggtctgtggccctgggccaggacaaggtggccctgcagaagctgaatgatgctgccaccaagctgcaggcctgctggaggggcttctacgccaggaactacaacccccaggccaaggatgtgcgctatgagatccggctgcggaggatgcaggagcacatcgtgtgcctgacagatgagatccggcggctgaggaaggagagagatgaggagcgcatcaagaagtttgtgcaggaggaggccttccgcttcctgtggaaccagaagtggggcctggccatcctgcccaggcctgtgagcaacttctgggcccaggccgtgttccccccccagccccccaaggtgcgcagcctgcaggtgtggcagcagacagtggaccagaggctgagctcctggcacacagatgtgccccccatcagcagcaccctggtgcccagcaagcaccccctcttcacccagagccaggagagcagctgtgaccagaatgctgactggttcatcgccagtgatgtggccccccaggagaagagcctgcctgagttcccagattctggcttccacagcagcctgacagagcaggtgcacagcctgcagcacagcctggactttgagaagagcagcacagagggcagcgagagcagcatcatgggcaacagcattgacacagtgcgctatggcaaggagagtgacctgggagatgtgtctgaggagcacggggagtggaacaaggagagcagcaacaatgagcaggacaacagcctgctggagcagtacctgacctctgtgcagcagctggaggatgctgatgagaggaccaactttgacacagagacccgggacagcaagctgcacatcgcctgcttccctgtgcagctggacaccctgagtgatggagcctctgtggatgagagccacggcatcagcccccccctgcagggcgagatcagccagacccaggagaacagcaagctgaatgctgaggtgcagggccagcagccagaatgtgacagcaccttccagctgctgcacgtgggcgtgacagtgtag

SEQ ID NO: 19049 - DNA, 828 bp, synthetic construct
  source 1..828: mol_type = other DNA; note = Synthetic coding sequence
atggccgagcccgcctctgtggccgctgagagcctggccggcagccgggcccgggccgccaggacagtgctgggccaggtggtgctgcccggggaggagctgctgctgcctgagcaggaggatgctgagggccctggaggagctgtggagcggcccctgagcctgaatgcccgggcctgcagccgggtgcgggtggtgtgtggccctggcctgcggcgctgtggggaccggctgctggtgaccaagtgtggccgcctgcggcacaaggagcccggcagcggcagcggcggcggcgtgtactgggtggacagccagcagaagagatatgtgcctgtgaagggggaccacgtgattggcatcgtgacagccaagagcggggacatcttcaaggtggatgtgggcggcagcgagcccgccagcctgagctacctgagctttgagggcgccaccaagaggaaccggcccaacgtgcaggtgggggacctgatctacggccagtttgtggtggccaacaaggacatggagcctgagatggtgtgcatcgacagctgtggccgggccaacggcatgggcgtgattggccaggacggcctgctcttcaaggtgaccctgggcctcatcaggaagctgctggccccagactgtgagatcatccaggaggtgggcaagctgtaccccctggagatcgtgtttggcatgaatggccgcatctgggtgaaggccaagaccatccagcagaccctcatcctggccaacatcctggaggcctgtgagcacatgaccagtgaccagaggaagcagatcttcagccggctggccgagagctag

SEQ ID NO: 19050 - DNA, 1620 bp, synthetic construct
  source 1..1620: mol_type = other DNA; note = Synthetic coding sequence
atggccaccagcgcccccctgcggagcctggaggaggaggtgacctgcagcatctgcctggactacctgcgggaccctgtgaccatcgactgtggccacgtgttctgccgcagctgcaccacagatgtgcggcccatcagcggcagcaggcctgtgtgccccctgtgcaagaagcccttcaagaaggagaacatccggcctgtgtggcagctggccagcctggtggagaacatcgagcggctgaaggtggacaagggccggcagcctggagaggtgacccgggagcagcaggatgccaagctgtgtgagcggcaccgggagaagctgcactactactgtgaagatgatggcaagctgctgtgtgtgatgtgccgggagagccgggagcaccggccccacacagctgtgctgatggagaaggccgcccagccccaccgggagaagatcctgaaccacctgagcaccctgcggcgggaccgggacaagatccagggcttccaggccaagggggaggccgacatcctggccgccctgaagaagctgcaggaccagaggcagtacatcgtggccgagtttgagcagggccaccagttcctgcgggagcgggaggagcacctgctggagcagctggccaagctggagcaggagctgacagagggccgggagaagttcaagagccggggcgtgggggagctggcccggctggccctggtgatcagcgagctggagggcaaggcccagcagcctgctgctgagctgatgcaggacacccgggacttcctgaaccgctaccccaggaagaagttctgggtgggcaagcccatcgcccgggtggtgaagaagaagacaggagagttcagtgacaagctgctgagcctgcagaggggcctgcgggagttccagggcaagctgctgcgggacctggagtacaagacagtgtctgtgaccctggacccccagagcgccagcggctacctgcagctgtctgaggactggaagtgtgtgacctacaccagcctgtacaagagcgcctacctgcacccccagcagtttgactgtgagcccggggtgctgggcagcaagggcttcacctggggcaaggtgtactgggaggtggaggtggagcgggagggctggagcgaagatgaggaggagggagatgaggaggaggagggggaggaggaggaggaggaggaggaggccggctatggagatggctatgatgactgggagacagatgaagatgaggagagcctgggagatgaggaggaggaggaggaggaggaggaggaggaggtgctggagagctgcatggtgggcgtggcccgggacagcgtgaagaggaaaggagacctgagcctgcggccagaagatggagtgtgggccctgcggctgagcagcagcggcatctgggccaacaccagccctgaggccgagctgtttcctgccctgcggcccaggagagtgggcatcgccctggactatgaaggaggcaccgtgaccttcaccaatgctgagagccaggagctgatctacaccttcaccgccaccttcacccggcggctggtgcccttcctgtggctgaagtggccaggcacccggctgctgctgcggccctag

SEQ ID NO: 19051 - DNA, 1233 bp, synthetic construct
  source 1..1233: mol_type = other DNA; note = Synthetic coding sequence
atgttcaacaatgagctgatggctgatgtgcactttgtggtgggccccccaggggccaccaggacagtgcctgcccacaagtatgtgctggccgtgggcagctctgtgttctacgccatgttctacggggacctggccgaggtgaagtctgagatccacatcccagatgtggagcctgctgccttcctgatcctgctgaagtacatgtacagtgatgaaattgacctggaggccgacacagtgctggccaccctgtatgctgccaagaagtacatcgtgcctgccctggccaaggcctgtgtgaacttcctggagaccagcctggaggccaagaatgcctgtgtgctgctgagccagagccggctgtttgaggagcctgagctgacccagcgctgctgggaggtgattgatgcccaggccgagatggccctgcggtctgagggcttctgtgaaattgaccggcagaccctggagatcatcgtgacccgggaggccctgaacaccaaggaggccgtggtgtttgaggccgtgctgaactgggccgaggccgagtgcaagaggcagggcctgcccatcaccccaagaaacaagagacatgtgctgggccgggccctgtacctggtgcgcatccccaccatgaccctggaggagtttgccaacggggccgcccagagcgacatcctgaccctggaggagacccacagcatcttcctgtggtacacagccaccaacaagccccggctggacttccccctgaccaagaggaagggcctggccccccagcgctgccaccgcttccagagcagcgcctaccgcagcaaccagtggagataccggggccgctgtgacagcatccagtttgctgtggacagaagagtcttcatcgccggcctgggcctgtatggcagcagcagcggcaaggccgagtacagcgtgaagattgagctgaagaggctgggcgtggtgctggcccagaacctgaccaagttcatgtctgatggcagcagcaacaccttccctgtgtggtttgagcaccctgtgcaggtggagcaggacaccttctacacagccagcgctgtgctggatggcagcgagctgagctacttcggccaggagggcatgacagaggtgcagtgtgggaaggtggccttccagttccagtgcagcagtgacagcaccaacggcaccggggtgcagggcggccagatccctgagctgatcttctacgcctag

SEQ ID NO: 19052 - DNA, 966 bp, synthetic construct
  source 1..966: mol_type = other DNA; note = Synthetic coding sequence
atgagggccctggccgccctgagcgcccccccaaatgaaaggctgctgccccgggaccctgctgccacccgggaccctgatgctgcccggcctgccaggagatctgctgtggagcggctggccgctgaccgggccaagtatgtgcggggccggcccggcaccggccggggcgtggccagcgagggcagcggccctggggccatcaagtgccctggaaatgaccccggccccccagcccgggccccagcccctgtggcccggcgggccatcgccaggaagcccctgcggccagacagcctcatcatctaccggcagaagtgtgaatttgtgcggggcagcggggctgatggcccccgggccagcctggtgaagaagctgttccagggccctgggaaggacaaggcccctgtgcccaggactggagatgagggcaaggccggcaaccctgagaccgtgcccaccaccccaggccctgctgctgaccctgccatccctgagaccccagccccagctgcccggtctgctgcccccagctctgtgcctgctgcccctcctggccctgagccccgggtggtgagaagaagaggcctgcagaggagccagagcgacctgagcagccgctacagcgctgccctggccgagagtgacaccttcttccagtactgcggcctggaccctgaggtggtggaggccctgggccgggagaacttcaccgctggcagtgactgtgtgaccctgaaggtgcgctctgtgtctgtggccaccagcggcagcggcttcagccgccacagcggaggagatgatgagggcctgcaggaggaggagctgattgagcaggtgcccagcaccacctctgtgattgaaagaaatgcccgcatcatcaagtggctgtacacctgcaagaaggccaaggagacccccagccaggagcagagcaggacccggggcagcaagcccagcaggtag

SEQ ID NO: 19053 - DNA, 945 bp, synthetic construct
  source 1..945: mol_type = other DNA; note = Synthetic coding sequence
atgtctgaaaatgctgcccctggcctcatcagcgagctgaagctggccgtgccctggggccacatcgccgccaaggcctggggcagcctgcagggcccccctgtgctgtgcctgcacggctggctggacaatgccagcagctttgacaggctcatccccctgctgccccaggacttctactacgtggccatggactttggaggccacggcctgagcagccactacagccctggggtgccctactacctgcagacctttgtgtctgagatcagaagagtggtggccgccctgaagtggaaccgcttcagcatcctgggccacagctttggaggagtggtgggcggcatgttcttctgcaccttccctgagatggtggacaagctgatcctgctggacacccccctcttcctgctggagagtgatgagatggagaacctgctgacctacaagagaagagccatcgagcacgtgctgcaggtggaggccagccaggagcccagccacgtgttcagcctgaagcagctgctgcagaggctgctgaagagcaacagccacctgtctgaagaatgtggggagctgctgctgcagaggggcaccaccaaggtggccaccggcctggtgctgaacagagaccagaggctggcctgggccgagaacagcattgacttcatcagccgggagctgtgtgcccacagcatcaggaagctgcaggcccacgtgctgctgatcaaggctgtgcacggctactttgacagccggcagaactacagcgagaaggagagcctgtccttcatgattgacaccatgaagagcaccctgaaggagcagttccagtttgtggaggtgcccggcaaccactgtgtgcacatgtctgagccccagcacgtggccagcatcatcagcagcttcctgcagtgcacccacatgctgcctgcccagctgtag

SEQ ID NO: 19054 - DNA, 3945 bp, synthetic construct
  source 1..3945: mol_type = other DNA; note = Synthetic coding sequence
atggccagcaagggggccggcatgtccttcagcaggaagagctaccgcctgaccagtgatgctgagaagagccgggtgactggaattgtgcaggagaagctgctgaatgactacctgaaccgcatcttcagcagcagcgagcacgcccccccagctgccaccagcaggaagcccctgaacttccagaacctgcctgagcacctggaccagctgctgcaggtggacaatgaggaggaggagagccagggccaggtggagggccgcctgggccccagcacagtggtgctggaccacactggaggctttgagggcctgctgctggtggatgatgacctgctgggcgtcatcggccacagcaactttggcaccatccgcagcaccacctgtgtgtacaagggcaagtggctgtatgaggtgctgatcagcagccagggcctgatgcagatcggctggtgcaccatcagctgccgcttcaaccaggaggagggcgtgggggacacccacaacagctatgcctatgatggcaacagagtgaggaagtggaatgtgaccaccaccaactacggcaaggcctgggccgccggggacatcgtgtcctgcctgattgacctggatgatggcaccctgtccttctgcctgaatggagtgtccctgggcacagcctttgagaacctgagccggggcctgggcatggcctacttccctgccatcagcctgtccttcaaggagagcgtggccttcaactttggcagccggcccctgcgctaccctgtggccggctaccggcccctgcaggaccccccatctgctgacctggtgcgggcccagaggctgctgggctgcttccgggctgtgctgtctgtggagctggaccctgtggagggccgcctgctggacaaggagagcagcaagtggaggctgcggggccagcccaccgtgctgctgaccctggcccacatcttccaccactttgcccccctgctgaggaaggtgtacctggtggaggccgtgctgatgtccttcctgctgggcatcgtggagaagggcacccccacccaggcccagagcgtggtgcaccaggtgctggacctgctgtggctgttcatggaggactatgaggtgcaggactgcctgaagcagctgatgatgagcctgctgcggctgtaccgcttcagccccatcgtgcctgacctgggcctgcagatccactacctgcggctgaccatcgccatcctgcggcatgagaagagcaggaagttcctgctgagcaatgtgctgtttgatgtgctgcggtctgtggtgttcttctacatcaagagccccctgcgggtggaggaggccggcctgcaggagctgatccccaccacctggtggccccactgcagcagccgggagggcaaggagagcacagagatgaaggaggagacagctgaggagcggctgcggcggcgggcctatgaaagaggctgccagaggctgaggaagagaattgaggtggtggaggagctgcaggtgcagatcctgaagctgctgctggacaacaaggatgacaatggaggagaggccagccgctacatcttcctgaccaagttcaggaagttcctgcaggagaatgccagcggccggggcaacatgcccatgctgtgccccccagagtacatggtgtgcttcctgcacaggctcatcagcgccctgcgctactactgggatgagtacaaggccagcaacccccacgccagcttcagcgaggaggcctacatccccccccaggtgttctacaacgggaaggtggactactttgacctgcagaggctgggcggcctgctgagccacctgaggaagaccctgaaggatgacctggccagcaaggccaacatcgtcatcgaccccctggagctgcagagcacagccatggatgacctggatgaagatgaggagcccgccccagccatggcccagaggcccatgcaggccctggccgtgggcggccccctgcccctgccccggcccggctggctgagcagccccaccctgggccgggccaaccgcttcctgagcacagctgctgtgtccctgatgaccccccggcggcccctgagcaccagcgagaaggtgaaggtgaggaccctgtctgtggagcagaggacccgggaggacatcgagggcagccactggaatgaaggcctgctgctgggccggcccccagaggagcctgagcagcccctgacagagaacagcctgctggaggtgctggatggagctgtgatgatgtacaacctgtctgtgcaccagcagctgggcaagatggtgggcgtgtctgatgatgtgaatgaatatgccatggccctgcgggacacagaggacaagctgcggcgctgccccaagaggaggaaggacatcctggccgagctgaccaagagccagaaggtgttcagcgagaagctggaccacctgagccggcggctggcctgggtgcacgccaccgtgtacagccaggagaagatgctggacatctactggctgctgcgggtgtgcctgcggaccattgaacatggagacagaacaggcagcctgtttgccttcatgcctgagttctacctgtctgtggccatcaacagctacagcgccctgaagaactactttggacctgtgcacagcatggaggagctgcccggctatgaggagaccctgacccggctggccgccatcctggccaagcactttgctgatgccagaattgtgggcacagacatccgggacagcctgatgcaggccctggccagctatgtgtgctacccccacagcctgcgggctgtggagcgcatccctgaggagcagagaattgccatggtgaggaacctgctggccccctatgagcagaggccctgggcccagaccaactggatcctggtgcggctgtggaggggctgcggcttcggctaccgctacacccggctgccccacctgctgaagaccaagctggaggatgccaacctgcccagcctgcagaagccctgccccagcaccctgctgcagcagcacatggctgacctgctgcagcagggcccagatgtggcccccagcttcctgaacagcgtgctgaaccagctgaactgggccttcagcgagttcatcggcatgatccaggagatccagcaggccgctgagcggctggagaggaactttgtggacagccggcagctgaaggtgtgtgccacctgctttgacctgtctgtgtccctgctgcgggtgctggagatgaccatcaccctggtgcctgagatcttcctggactggacccggcccaccagcgagatgctgctgcggcggctggcccagctgctgaaccaggtgctgaacagagtgacagctgagaggaacctgtttgacagagtggtgaccctgcggctgcccggcctggagagcgtggaccactaccccatcctggtggccgtgacaggcatcctggtgcagctgctggtgcggggccctgccagcgagcgggagcaggccacctctgtgctgctggccgacccctgcttccagctgcggagcatctgctacctgctgggccagcctgagcccccagcccctggaacagccctgcctgccccagacaggaagcgcttcagcctgcagagctatgctgactacatctctgcagatgagctggcccaggtggagcagatgctggcccacctgaccagcgccagcgcccaggccgctgctgccagcctgcccaccagcgaggaggacctgtgccccatctgctacgcccaccccatctctgctgtgttccagccctgtggccacaagagctgcaaggcctgcatcaaccagcacctgatgaacaacaaggactgcttcttctgcaagaccaccatcgtgtctgtggaggactgggagaagggggccaacaccagcaccaccagcagcgctgcctag

SEQ ID NO: 19055 - DNA, 2646 bp, synthetic construct
  source 1..2646: mol_type = other DNA; note = Synthetic coding sequence
atggccggggccgccccccgggtgcgctacctggccggcttctgctgccccctgggcggcctggccgccggcaagccccgggtgctgtgccatgaagctgaggtgttcctgagcactggaagtgagctggtgtatgtgtatgaccaggagggcggcctgctgacagctgccttccgcttcccagaccaggtgtggcacctggagctgctggccccccggcggctgctgtatgccctgtgtgcccggcggggcctgtactgcctgagcctggaccaccctggccgcagccgcagcaccagccaggatgaccgggacagtgaagatggagaccagcccagccctgtgattcctgtggaccctgatgcctgcatcctgcctgatgctgccctgtgtgccttcaccctgctggacagcgtgctggtgaccctggtgcagggccctgcccgctggaagatgcagctgtttgagcagccctgccctggagaggaccccaggcctgggggccagatcggggaggtggagctgagcagctacaccccacctgctggggtgcctgggaagccagctgccccccacttcctgcctgtgctgtgcagcgtgagccccagcggcagccgggtgccccatgacctgctgggcggcagcggcggcttcaccctggaggatgccctgtttggcctgctgtttggagcagatgccaccctgctgcagagccctgtggtgctgtgtggcctgcctgatggccagctgtgctgcgtcatcctgaaggccctggtgaccagccgcagcgcccctggggaccccaatgccctggtgaagatcctgcaccacctggaggagcctgtgatcttcatcggggccctgaagacagagccccaggccgctgaggccgctgagaacttcctgcctgatgaagatgtgcactgtgactgcctggtggccttcggccaccacggccgcatgctggccatcaaggcctcctgggatgaaagtggcaagctggtgcctgagctgcgggagtactgcctgcccggccctgtgctgtgtgccgcctgtggcggcggcggccgggtgtaccacagcacccccagcgacctgtgtgtggtggacctgagccggggcagcacccccctgggccctgagcagcctgaggagggccctgggggcctgccccccatgctgtgcccagccagcctgaacatctgcagcgtggtgtccctgagcgccagccccaggacccatgagggcggcaccaagctgctggccctgagcgccaagggccgcctgatgacctgcagcctggacctggacagcgagatgcctggccctgccaggatgaccacagagagcgctggccagaagatcaaggagctgctgagcggcatcggcaacatcagcgagcgggtgtccttcctgaagaaggctgtggaccagaggaacaaggccctgaccagcctgaatgaggccatgaatgtgtcctgtgccctgctgagcagcggcaccggcccccggcccatcagctgcaccaccagcaccacctggagccggctgcagacccaggatgtgctgatggccacctgtgtgctggagaacagcagcagcttcagcctggaccagggctggaccctgtgcatccaggtgctgaccagcagctgtgccctggacctggacagcgcctgcagcgccatcacctacaccatccctgtggaccagctgggccctggggcccggcgggaggtgaccctgcccctgggccctggagaaaatggaggcctggacctgcctgtgacagtgtcctgcaccctcttctacagcctgcgggaggtggtgggcggggccctggcccccagcgacagcgaggaccccttcctggatgagtgccccagtgatgtgctgcctgagcaggagggcgtgtgcctgcccctgagccgccacacagtggacatgctgcagtgcctgcgcttccctggcctggccccaccccacacccgggcccccagccccctgggccccacccgggaccctgtggccaccttcctggagacctgccgggagcccggcagccagcctgctggccctgccagcctgcgggcagagtacctgccccccagcgtggccagcatcaaggtgtctgctgagctgctgcgggccgccctgaaggatggccacagcggcgtgcccctgtgctgtgccaccctgcagtggctgctggctgaaaatgctgctgtggatgtggtgcgggcccgggccctgagcagcatccagggcgtggccccagatggagccaacgtgcacctgattgtgcgggaggtggccatgacagacctgtgcccagctggccccatccaggccgtggagatccaggtggagagcagcagcctggccgacatctgccgggcccaccacgctgtggtgggccgcatgcagaccatggtgacagagcaggccacccagggcagcagcgccccagacctgcgggtgcagtacctgcggcagatccacgccaaccacgagaccctgctgcgggaggtgcagaccctgcgggaccggctgtgcacagaagatgaggccagcagctgtgccacagcccagaggctgctgcaggtgtaccggcagctgcggcaccccagcctcatcctgctgtag

SEQ ID NO: 19056 - DNA, 471 bp, synthetic construct
  source 1..471: mol_type = other DNA; note = Synthetic coding sequence
atgggagacaagaagagccccacccggcccaagaggcagcccaagcccagcagtgatgagggctactgggactgcagcgtgtgcaccttcagaaattctgctgaggccttcaagtgcatgatgtgtgatgtgaggaagggcaccagcaccaggaaggagaagaaggacaaggtggagaaggagaagtctgagaaggagaccaccagcaagaagaacagccacaagaagacccggccccggctgaagaatgtggacaggagcagcgcccagcacctggaggtgacagtgggggacctgaccgtcatcatcacagacttcaaggagaagaccaagagccccccagccagcagcgctgccagcgctgaccagcacagccagagcggcagcagcagtgacaacacagagcggggcatgagccgcagcagcagccccagaggagaggccagcagcctgaatggagagagccactag

SEQ ID NO: 19057 - DNA, 777 bp, synthetic construct
  source 1..777: mol_type = other DNA; note = Synthetic coding sequence
atgtgtgccctggagatggctgtgctggagatccagaccaacggggacaccagggtgacagaggaggccatcgcccgggcccggcacagcctgagtgaccccaacatgagggagttcatcctgtgctgcctggcccgggaccctgcccggcggcccagcgcccacagcctgctcttccaccgggtgctgtttgaggtgcacagcctgaagctgctggccgcccactgcttcatccagcaccagtacctgatgccagaaaatgtggtggaggagaagaccaaggccatggacctgcatgctgtgctggccgagctgccccggcccaggaggcctcccctgcagtggagatacagcgaggtgtccttcatggagctggacaagttcctggaggatgtgagaaatggcatctaccccctgatgaactttgctgccacccggcccctgggcctgccccgggtgctggcccctcctcctgaggaggtgcagaaggccaagacccccaccccagagccctttgacagcgagaccaggaaggtgatccagatgcagtgcaacctggagaggtctgaggacaaggcccgctggcacctgaccctgctgctggtgctggaggaccggctgcaccggcagctgacctatgacctgctgcccacagacagcgcccaggacctggccagcgagctggtgcactacggcttcctgcatgaagatgacaggatgaagctggccgccttcctggagagcaccttcctgaagtaccggggcacccaggcctag

SEQ ID NO: 19058 - DNA, 564 bp, synthetic construct
  source 1..564: mol_type = other DNA; note = Synthetic coding sequence
atgctgggccgctaccgggagtacagcaatggccaggccggggccatcgagcacctgaaggagagcctggagcagagcattgaccagctgcggagccagaggctgctgagaaattctgggggccgcagcatctctgtgaccagcctgagcgccagtgacctggatggcggcaccggcagcgagctgcaccacttcccccccaccagccccctgaaggactatggagacccccagggcatcaagaggatgaggagcaggactggagtgcgctttgtgcaggagacagatgacatgacccagctgcacggcttccaccagagcctgcgggacctgagcagcgagcagatccggctgggagatgacttcaaccgggagctgagccgccgcagcagaagtgatgctgagaccaagagggccctggaggagctgacagagaagctgaatgaggcccagaagcaggaggtgttctttgtgaagagcctgggcaaggtgaagatccagtgcctgagcagcgctgaggtggacaacgtgttccccatcaacgtgtggcagtgtggcatctag

SEQ ID NO: 19059 - DNA, 927 bp, synthetic construct
  source 1..927: mol_type = other DNA; note = Synthetic coding sequence
atgatggatgtgtctggagtgggcttccccagcaaggtgccctggaagaagatgtctgctgaggagctggagaaccagtactgccccagccgctgggtggtgcggctgggcgctgaggaggccctgcggacctacagccagatcggcatcgaggccaccacccgggcccgggccaccaggaagagcctgctgcacgtgccctatggagatggagagggggagaaggtggacatctacttcccagatgagagcagcgaggccctgcccttcttcctgttcttccatggaggctactggcagagcggcagcaaggatgaaagtgccttcatggtgcaccccctgacagcccagggcgtggccgtggtgattgtggcctacggcatcgcccccaagggcaccctggaccacatggtggaccaggtgaccaggtctgtggcctttgtgcagaagcgctaccccagcaacaagggcatctacctgtgtggccacagcgctggggcccacctggccgccatgatgctgctggccgactggaccaagcatggagtgacccccaacctgcggggcttcttcctggtgtctggagtgtttgacctggagcccatcgtgtacaccagccagaatgtggccctgcagctgaccctggaggatgcccagaggaacagcccccagctgaaggtggcccaggcccagcctgtggaccccacctgccgggtgctggtggtggtgggccagtttgacagccctgagttccaccggcagagctgggagttctaccaggtgctgcctgtgcagaccctgtgccagggcgagtggaaggccagctttgaggagctgcatgatgtggaccactttgaaattgtggagaacctgacccagaaggacaacgtgctgacccagatcatcctgaagaccatcttccagtag

SEQ ID NO: 19060 - DNA, 1461 bp, synthetic construct
  source 1..1461: mol_type = other DNA; note = Synthetic coding sequence
atgagcggcagcacccccttccagatgaggctggtgcacctggacctgaagggggccccacccaaggtgtcctacctgtctgagatcttccccctcttccgggccctgggcgccaacggcctgctgattgaatatgaggacatgttcccctatgagggccccctgcggctgctgcgggccaagtatgcctacagccccagcgagatcaaggagatcctgcacctggccggcctgaatgagctggaggtgatccccctggtgcagaccttcggccacatggagtttgtgctgaagcacacagcctttgcccacctgcgggaggtgggcagcttcccctgcaccctgaacccccatgaggccgagagcctggccctggtgggcgccatgattgaccaggtgctggagctgcaccctggggcccagaggctgcacatcggctgtgatgaggtgtactacctgggggagggggaggccagccgccgctggctgcagcaggagcagaacagcacaggcaagctgtgcctgagccacatgagagctgtggccagcggcgtgaaggcccggcggcccagcgtgacccccctggtgtgggatgacatgctgcgggacctgcctgaggaccagctggccgccagcggcgtgccccagctggtggagcctgtgctgtgggactacacagctgacctggatgtgcacggcaaggtgctgctgatgcagaagtaccgccgctgtggcttcccccagctgtgggccgccagcgccttcaagggggccaccggccccagccaggccgtgccccctgtggagcaccacctgagaaatcatgtgcagtggctgcaggtggccggcagcggccccacagacagcctgcagggcatcatcctgaccggctggcagagatatgaccactacagcgtgctgtgtgagctgctgcctgctggggtgcccagcctggccgcctgcctgcagctgctgctgcggggcggctttgatgaagatgtgaaggccaaggtggagaacctgctgggcatcagcagcctggagaagacagatcctgtgcgggagggcgccggcagcttccctggcagcaacatcctggccctggtgacccaggtgtccctgcacctgcggagctctgtggatgccctgctggagggcaacagatatgtgacaggctggttcagcccctaccaccggcagaggaagctgatccaccctgtgatggtgcagcacatccagcctgctgccctgagcctgctggcccagtggagcaccctggtgcaggagctggaggccgccctgcagctggccttctacccagatgctgtggaggagtggctggaggagaatgtgcaccccagcctgcagaggctgcaggccctgctgcaggacctgtctgaggtgtctgccccacccctgccccccaccagccctggaagagatgtggcccaggacccctag

SEQ ID NO: 19061 - DNA, 240 bp, synthetic construct
  source 1..240: mol_type = other DNA; note = Synthetic coding sequence
atgagcagccagcagcagcagaggcagcagcagcagtgccccccccagagggcccagcagcagcaggtgaagcagccctgccagcccccacctgtgaagtgccaggagacctgtgcccccaagaccaaggacccctgtgccccccaggtgaagaagcagtgcccccccaagggcaccatcatcccagcccagcagaagtgccccagcgcccagcaggccagcaagagcaagcagaagtag

SEQ ID NO: 19062 - DNA, 822 bp, synthetic construct
  source 1..822: mol_type = other DNA; note = Synthetic coding sequence
atgggccagaaggtgactggaggcatcaagacagtggacatgagggaccccacctaccggcccctgaagcaggagctgcagggcctggactactgcaagcccacccggctggacctgctgctggacatgcctcctgtgtcctatgatgtgcagctgctgcacagctggaacaacaatgacaggagcctgaatgtgtttgtgaaggaggatgacaagctgatcttccaccgccaccctgtggcccagagcacagatgccatccggggcaaggtgggctacacccggggcctgcacgtgtggcagatcacctgggccatgaggcagaggggcacccatgctgtggtgggcgtggccacagcagatgcccccctgcacagcgtgggctacaccaccctggtgggcaacaaccacgagagctggggctgggacctgggcaggaacagactctaccatgatggcaagaaccagcccagcaagacctacccagccttcctggagccagatgagaccttcatcgtgcctgacagcttcctggtggccctggacatggatgatggcaccctgtccttcatcgtggatggccagtacatgggcgtggccttccggggcctgaagggcaagaagctgtaccctgtggtgtctgctgtgtggggccactgtgagatccgcatgagatacctgaatggcctggaccctgagcccctgcccctgatggacctgtgccgccgctctgtgcggctggccctgggccgggagcggctgggggagatccacaccctgcccctgcctgccagcctgaaggcctacctgctgtaccagtag

SEQ ID NO: 19063 - DNA, 3315 bp, synthetic construct
  source 1..3315: mol_type = other DNA; note = Synthetic coding sequence
atgggaaatgctgctggcagcgctgagcagcctgctggccctgctgcccccccacccaagcagcctgccccacccaagcagcccatgcctgctgctggggagctggaggagcgcttcaacagagccctgaactgcatgaacctgcccccagacaaggtgcagctgctgagccagtatgacaatgagaagaagtgggagctgatctgtgaccaggagcgcttccaggtgaagaaccccccagctgcctacatccagaagctgaagagctatgtggacacaggaggagtgtccaggaaggtggccgctgactggatgagcaacctgggcttcaagagaagagtgcaggagagcacccaggtgctgcgggagctggagaccagcctgcggaccaaccacatcggctgggtgcaggagttcctgaatgaagaaaatagaggcctggatgtgctgctggagtacctggcctttgcccagtgcagcgtgacctatgacatggagagcacagacaacggggccagcaacagcgagaagaacaagcccctggagcagagcgtggaggacctgagcaagggcccccccagctctgtgcccaagagccgccacctgaccatcaagctgaccccagcccacagcaggaaggccctgaggaacagccgcatcgtgtcccagaaggatgatgtgcacgtgtgcatcatgtgcctgcgggccatcatgaactaccagagcggcttcagcctggtgatgaaccacccagcctgtgtgaatgaaattgccctgagcctgaacaacaagaaccccaggaccaaggccctggtgctggagctgctggccgctgtgtgcctggtgcggggcggccatgacatcatcctggccgcctttgacaacttcaaggaggtgtgtggggagcagcacagatttgagaagctgatggagtacttcagaaatgaagacagcaacatcgacttcatggtggcctgcatgcagttcatcaacatcgtggtgcacagcgtggagaacatgaacttccgggtcttcctgcagtatgagttcacccacctgggcctggacctgtacctggagcggctgcggctgacagaaagtgacaagctgcaggtgcagatccaggcctacctggacaacatctttgatgtgggcgccctgctggaggacacagagaccaagaatgctgtgctggagcacatggaggagctgcaggagcaggtggccctgctgacagagcggctgagagatgctgaaaatgaatccatggccaagattgctgagctggagaagcagctgagccaggccaggaaggagctggagaccctgcgggagcgcttcagcgagagcacagccatgggccccagcagaagacctcctgagcctgagaaggcccccccagctgcccccacccggcccagcgccctggagctgaaggtggaggagctggaggagaagggcctcatccgcatcctgcggggccctggagatgctgtgtccattgagatcctgcctgtggccgtggccacccccagcggaggagatgcccccaccccaggagtgcccaccggcagccccagcccagacctggccccagctgctgagcccgcccctggggccgcccctcctcctcctccacccctgcccggcctgcccagcccccaggaggccccacccagcgccccaccccaggccccacccctgcccggcagccctgagcccccaccagccccacccctgcccggggacctgcccccacctcctcctcctcctcctcctcctcctggaacagatggccctgtgcccccacctcctcctcctcctcctcctcctcctgggggccccccagatgccctgggcagaagagacagcgagctgggccctggggtgaaggccaagaagcccatccagaccaagttcaggatgcccctgctgaactgggtggccctgaagcccagccagatcaccggcaccgtcttcacagagctgaatgatgagaaggtgctgcaggagctggacatgtctgactttgaggagcagttcaagaccaagagccagggccccagcctggacctgagcgccctgaagagcaaggccgcccagaaggcccccagcaaggccaccctcatcgaggccaacagagccaagaacctggccatcaccctgaggaagggcaacctgggcgctgagcgcatctgccaggccatcgaggcctatgacctgcaggccctgggcctggacttcctggagctgctgatgaggttcctgcccacagaatatgaaagaagcctcatcaccaggtttgagcgggagcagaggcccatggaggagctgtctgaagaagatcgcttcatgctgtgcttcagccgcatcccccggctgcctgagaggatgaccaccctgaccttcctgggcaacttcccagacacagcccagctgctgatgccccagctgaatgccatcatcgccgcctccatgagcatcaagagcagtgacaagctgcggcagatcctggagatcgtgctggccttcggcaactacatgaacagcagcaagagaggagctgcctacggcttccggctgcagagcctggatgccctgctggagatgaagagcacagacaggaagcagaccctgctgcactacctggtgaaggtgattgctgagaagtacccccagctgaccggcttccacagcgacctgcacttcctggacaaggccggctctgtgtccctggacagcgtgctggctgatgtgcgcagcctgcagaggggcctggagctgacccagcgggagtttgtgcggcaggatgactgcatggtgctgaaggagttcctgcgggccaacagccccaccatggacaagctgctggccgacagcaagacagcccaggaggcctttgaatctgtggtggagtactttggagagaaccccaagaccaccagccctggcctcttcttcagcctcttcagccgcttcatcaaggcctacaagaaggccgagcaggaggtggagcagtggaagaaggaggccgccgcccaggaggccggggctgacaccccaggaaaaggagagcccccagcccccaagagcccccccaaggcccggcggccccagatggacctgatcagcgagctgaagaggcggcagcagaaggagcccctcatctatgaaagtgacagagatggagccatcgaggacatcatcacagacctgaggaaccagccctacatccgggctgacaccggccgccgcagcgccaggagaagacctcctggcccccccctgcaggtgaccagtgacctgagcctgtag

SEQ ID NO: 19064 - DNA, 603 bp, synthetic construct
  source 1..603: mol_type = other DNA; note = Synthetic coding sequence
atggaggagaagcccagcaaggtgtccctgaagagcagtgaccggcagggcagtgatgaggagagcgtgcacagcgacacccgggacctgtggaccaccaccaccctgagccaggcccagctgaacatgcccctgtctgaggtgtgtgagggctttgatgaggagggcaggaacatcagcaagacccggggctggcacagccctggccggggcagcctggatgagggctacaaggccagccacaagccagaggagctggatgaacatgccctggtggagctggagctgcaccggggcagctccatggagatcaacctgggggagaaggacacagccagccagattgaagctgagaagagcagctccatgagcagcctgaacatcgccaagcacatgccccaccgggcctactgggccgagcagcagagccggctgcccctgcccctgatggagctgatggagaatgaggccctggagatcctgaccaaggccctgcggagctaccagctgggcatcggccgggaccacttcctgaccaaggagctgcagcgctacatcgagggcctgaagaagaggaggagcaagaggctgtatgtgaactag

SEQ ID NO: 19065 - DNA, 1044 bp, synthetic construct
  source 1..1044: mol_type = other DNA; note = Synthetic coding sequence
atgaagctgaccagcgagaagctgcccaagaaccccttctacgcctctgtgtcccagtatgctgccaagaaccagaagttcttccagtggaagaaggagaagacagactacacccacgccaacctggtggacaaggccctgcagctgctgaaggagcgcatcctgaagggggacaccctggcctacttcctgcggggccagctgtactttgaggagggctggtatgaggaggccctggagcagtttgaggagatcaaggagaaggaccaccaggccacctaccagctgggcgtgatgtactatgatggcctgggcaccaccctggatgctgagaagggcgtggactacatgaagaagatcctggacagcccctgccccaaggcccggcacctgaagtttgctgctgcctacaacctgggccgggcctactatgagggcaaaggagtgaagaggagcaatgaggaggccgagcggctgtggctgattgctgctgacaatggaaaccccaaggcctctgtgaaggcccagagcatgctgggcctgtactacagcaccaaggagcccaaggagctggagaaggccttctactggcacagcgaggcctgtggaaatggaaacctggagagccagggcgccctgggcctgatgtacctgtatggccagggcatccggcaggacacagaagctgccctgcagtgcctgcgggaggccgctgagagaggaaatgtgtatgcccagggcaacctggtggagtactactacaagatgaagttcttcaccaagtgtgtggccttcagcaagagaattgctgactatgatgaggtgcatgacatccccatgattgcccaggtgacagactgcctgcctgagttcatcggccggggcatggccatggccagcttctaccacgcccgctgcctgcagctgggcctgggcatcaccagagatgagaccacagccaagcactactacagcaaggcctgccgcctgaacccagccctggctgatgagctgcacagcctgctgatccggcagaggatctag

SEQ ID NO: 19066 - DNA, 3525 bp, synthetic construct
  source 1..3525: mol_type = other DNA; note = Synthetic coding sequence
atgcccctgcccttcggcctgaagctgaagaggacccggcgctacacagtgagcagcaagagctgcctggtggcccgcatccagctgctgaacaatgaatttgtggagttcaccctgtctgtggagagcacaggccaggagagcctggaggccgtggcccagaggctggagctgcgggaggtgacctacttcagcctgtggtactacaacaagcagaaccagaggcgctgggtggacctggagaagcccctgaagaagcagctggacaagtatgccctggagcccaccgtgtactttggagtggtgttctacgtgcccagcgtgtcccagctgcagcaggagatcacccgctaccagtactacctgcagctgaagaaggacatcctggagggcagcatcccctgcaccctggagcaggccatccagctggccggcctggccgtgcaggccgactttggagactttgaccagtatgagagccaggacttcctgcagaagtttgccctcttccctgtgggctggctgcaggatgagaaggtgctggaggaggccacccagaaggtggccctgctgcaccagaagtaccggggcctgacagccccagatgctgagatgctgtacatgcaggaggtggagaggatggatggctatggagaggagagctacccagccaaggacagccagggcagtgacatcagcatcggggcctgcctggagggcatctttgtgaagcacaagaatggccgccaccctgtggtgttccgctggcatgacatcgccaacatgagccacaacaagagcttctttgccctggagctggccaacaaggaggagaccatccagttccagacagaggacatggagacagccaagtacatctggaggctgtgtgtggcccggcacaagttctaccgcctgaaccagtgcaacctgcagacccagacagtgacagtgaaccccatcagaagaagaagcagcagcaggatgagcctgcccaagccccagccctacgtgatgcctcctccaccccagctgcactacaacggccactacacagagccctatgccagcagccaggacaacctgtttgtgcccaaccagaatggctactactgccacagccagaccagcctggaccgggcccagattgacctgaatggccgcatcagaaatggatctgtgtacagcgcccacagcaccaacagcctgaacaacccccagccctacctgcagcccagccccatgagcagcaaccccagcatcaccggcagtgatgtgatgaggccagactacctgcccagccaccgccacagcgctgtgatcccccccagctaccggcccaccccagactatgaaacagtgatgaagcagctgaacagaggcctggtgcatgctgagcggcagagccacagcctgaggaacctgaacatcggcagcagctatgcctacagcaggcctgctgccctggtgtacagccagcctgagatccgggagcacgcccagctgcccagccctgctgctgcccactgccccttcagcctgagctacagcttccacagccccagcccctacccctacccagctgagcggcggcctgtggtgggcgctgtgtctgtgcctgagctgaccaatgcccagctgcaggcccaggactaccccagccccaacatcatgaggacccaggtgtacagacctcctccaccctaccccccacccaggcctgccaacagcaccccagacctgagccgccacctgtacatcagcagcagcaacccagacctgatcaccaggagagtgcaccacagcgtgcagaccttccaggaggacagcctgcctgtggcccacagcctgcaggaggtgtctgagcccctgacagctgcccggcatgcccagctgcacaagagaaattccattgaggtggccggcctgagccacggcctggagggcctgcggctgaaggagaggaccctgagcgccagcgctgctgaggtggcccccagggctgtgtctgtgggcagccagcccagcgtcttcacagagaggacccagcgggagggccctgaggaggccgagggcctgcgctatggccacaagaagagcctgagtgatgccaccatgctgatccacagcagcgaggaggaggaggatgaagattttgaggaggagagcggggcccgggcccccccagcccgggcccgggagcccaggcctggcctggcccaggaccccccaggctgcccccgggtgctgctggccggccccctgcacatcctggagcccaaggcccacgtgcctgatgctgagaagaggatgatggacagcagccctgtgaggaccacagctgaggcccagaggccctggagagatggcctgctgatgcccagcatgtctgagagtgacctgaccaccagcggccgctaccgggcccggcgggacagcctgaagaagaggcctgtgtctgacctgctgagcggcaagaagaacatcgtggagggcctgccccccctgggcggcatgaagaagaccagggtggatgccaagaagattggccccctgaagctggccgccctgaatggcctgagcctgagccgggtgcccctgcctgatgagggcaaggaggtggccacccgggccaccaatgatgagcgctgcaagatcctggagcagaggctggagcagggcatggtgttcacagaatatgaaagaatcctgaagaagaggctggtggatggagagtgcagcacagcccggctgcctgaaaatgctgagaggaaccgcttccaggatgtgctgccctatgatgatgtgcgggtggagctggtgcccaccaaggagaacaacacaggctacatcaatgccagccacatcaaggtgtctgtgtctggaattgagtgggactacatcgccacccagggccccctgcagaacacctgccaggacttctggcagatggtgtgggagcagggcatcgccatcatcgccatggtgacagctgaggaggagggcggccgggagaagagcttccgctactggccccggctgggcagccgccacaacacagtgacctacggccgcttcaagatcaccacccgcttcagaacagacagcggctgctacgccaccaccggcctgaagatgaagcacctgctgaccggccaggagaggacagtgtggcacctgcagtacacagactggccagagcacggctgcccagaggacctgaagggcttcctgagctacctggaggagatccagagcgtgcggcggcacaccaacagcaccagtgacccccagagccccaacccccccctgctggtgcactgcagcgctggggtgggccgcactggagtggtgatcctgtctgagatcatgattgcctgcctggagcacaatgaggtgctggacatcccccgggtgctggacatgctgcggcagcagaggatgatgctggtgcagaccctgtgccagtacacctttgtgtacagagtgctgatccagttcctgaagagcagccgcctcatctag

SEQ ID NO: 19067 - DNA, 2235 bp, synthetic construct
  source 1..2235: mol_type = other DNA; note = Synthetic coding sequence
atggctgctgacaagccagctgaccagggcgctgagaagcatgagggcaccggccagagcagcggcatcacagaccaggagaaggagctgagcaccaatgccttccaggccttcaccagcggcaactatgatgcctgcctgcagcacctggcctgcctgcaggacatcaacaaggatgactacaagatcatcctgaacacagctgtggccgagttcttcaagagcaaccagaccaccacagacaacctgcggcagaccctgaaccagctgaagaaccaggtgcacagcgctgtggaggagatggatggcctggatgatgtggagaacagcatgctgtactacaaccaggccgtcatcctgtaccacctgcggcagtacacagaggccatctctgtgggggagaagctgtaccagttcatcgagccctttgaggagaagtttgcccaggccgtgtgcttcctgctggtggacctgtacatcctgacctaccaggccgagaaggccctgcacctgctggccgtgctggagaagatgatcagccagggcaacaacaacaagaatggcaagaatgagaccggcaacaacaacaacaaggatggcagcaaccacaaggccgagagcggggccctgattgaagctgccaagagcaagatccaccagtacaaggtgcgggcctacatccagatgaagagcctgaaggcctgcaagcgggagatcaagtctgtgatgaacacagctggcaacagcgcccccagcctcttcctgaagagcaactttgagtacctgcggggcaactacaggaaggctgtgaagctgctgaacagcagcaacattgctgagcaccctggcttcatgaagacaggagaatgtctgcgctgcatgttctggaacaacctgggctgcatccactttgccatgagcaagcacaacctgggcatcttctacttcaagaaggccctgcaggagaatgacaacgtgtgtgcccagctgtctgctggcagcacagatcctgggaagaagttcagcggccggcccatgtgcaccctgctgaccaacaagagatatgagctgctgtacaactgtggcatccagctgctgcacatcggccggcccctggccgcctttgagtgcctgattgaagctgtgcaggtgtaccacgccaacccccggctgtggctgcggctggccgagtgctgcatcgccgccaacaagggcaccagcgagcaggagaccaagggcctgcccagcaagaagggcatcgtgcagagcatcgtgggccagggctaccacaggaagatcgtgctggccagccagagcatccagaacacagtgtacaatgatggccagagcagcgccatccctgtggcctccatggagtttgctgccatctgcctgagaaatgccctgctgctgctgcctgaggagcagcaggaccccaagcaggagaatggagccaagaacagcaaccagctgggcggcaacacagagagcagcgagagcagcgagacctgcagcagcaagagccatgatggagacaagttcatcccagccccacccagcagccccctgaggaagcaggagctggagaacctgaagtgcagcatcctggcctgcagcgcctacgtggccctggccctgggggacaacctgatggccctgaaccacgccgacaagctgctgcagcagcccaagctgagcggcagcctgaagttcctgggccacctgtatgctgctgaggccctgatcagcctggaccgcatcagtgatgccatcacccacctgaacccagaaaatgtgacagatgtgtccctgggcatcagcagcaatgagcaggaccagggcagtgacaagggagaaaatgaggccatggagagcagcggcaagagggccccccagtgctaccccagctctgtgaacagcgccaggacagtgatgctgttcaacctgggcagcgcctactgcctgcggagtgaatatgacaaggccaggaagtgcctgcaccaggccgcctccatgatccaccccaaggaggtgcccccagaggccatcctgctggccgtgtacctggagctgcagaatggaaacacccagctggccctgcagatcatcaagaggaaccagctgctgcctgctgtgaagacccacagcgaggtgaggaagaagcctgtgttccagcctgtgcaccccatccagcccatccagatgcctgccttcaccaccgtgcagaggaagtag

SEQ ID NO: 19068 - DNA, 363 bp, synthetic construct
  source 1..363: mol_type = other DNA; note = Synthetic coding sequence
atgcaccccccacctcctgctgctgccatggacttcagccagaacagcctgtttggctacatggaggacctgcaggagctgaccatcatcgagaggcctgtgagaagaagcctgaagaccccagaggagattgaaaggctgactgtggatgaggacctgagtgacatcgagagagctgtgtacctgctgtctgctggccaggatgtgcagggcacctctgtgattgccaacctgcccttcctgatgaggcagaaccccacagagaccctgcggcgggtgctgcccaaggtgcgggtgcatgaagatgcccacctgttcatccagagggtgtggatcagccacatgtttgtgcagagggtgtag

SEQ ID NO: 19069 - DNA, 1335 bp, synthetic construct
  source 1..1335: mol_type = other DNA; note = Synthetic coding sequence
atgagggagatcgtgctgacccagatcggccagtgtggcaaccagatcggggccaagttctgggaggtgatcagtgatgagcacgccatcgacagcgctggcacctaccatggagacagccacctgcagctggagcgcatcaacgtgtactacaatgaggccagcggcggccgctacgtgcccagggctgtgctggtggacctggagcccggcaccatggattctgtgcgcagcggccccttcggccaggtgttccggccagacaacttcatcttcggccagtgtggggccggcaacaactgggccaagggccactacacagaaggagctgagctgatggagagcgtgatggatgtggtgaggaaggaggccgagagctgtgactgcctgcagggcttccagctgacccacagcctgggcggcggcactggaagtggcatgggcaccctgctgctgagcaagatccgggaggagtacccagaccgcatcatcaacaccttcagcatcctgcccagccccaaggtgtctgacacagtggtggagccctacaatgccaccctgtctgtgcaccagctgattgaaaatgctgatgagaccttctgcatcgacaatgaggccctgtatgacatctgcagcaagaccctgaagctgcccacccccacctacggggacctgaaccacctggtgtctgccaccatgtctggagtgaccacctgcctgcgcttccctggccagctgaatgctgacctgaggaagctggccgtgaacatggtgcccttcccccggctgcacttcttcatgcctggctttgcccccctgaccagccggggcagccagcagtaccgggccctgactgtggccgagctgacccagcagatgtttgatgccaagaacatgatggccgcctgtgaccccaggcatggccgctacctgacagctgctgccatcttccggggccgcatgcccatgagggaggtggatgagcagatgttcaacatccaggacaagaacagcagctactttgctgactggctgcccaacaacgtgaagacagctgtgtgtgacatccccccccggggcctgaagatgtctgccaccttcatcggcaacaacacagccatccaggagctgttcaagagggtgtctgagcagttcaccgccatgttccggaggaaggccttcctgcactggtacacaggagagggcatggatgagatggagttcacagaagctgagagcaacatgaatgacctggtgtctgagtaccagcagtaccaggatgccacagctgaggaggaggaggatgaggagtatgcagaggaggaggtggcctag

SEQ ID NO: 19070 - DNA, 915 bp, synthetic construct
  source 1..915: mol_type = other DNA; note = Synthetic coding sequence
atggccaagattgagaagaatgcccccaccatggagaagaagccagagctgttcaacatcatggaggtggatggagtgcccaccctcatcctgagcaaggagtggtgggagaaggtgtgcaacttccaggccaagccagatgacctgatcctggccacctaccccaagagcggcaccacctggatgcatgagatcctggacatgatcctgaatgatggagatgtggagaagtgcaagagggcccagaccctggacagacatgccttcctggagctgaagttcccccacaaggagaagccagacctggagtttgtgctggagatgagcagcccccagctgatcaagacccacctgcccagccacctgatcccccccagcatctggaaggagaactgcaagatcgtgtatgtggccaggaaccccaaggactgcctggtgtcctactaccacttccacaggatggccagcttcatgccagacccccagaacctggaggagttctatgagaagttcatgtctgggaaggtggtgggcggctcctggtttgaccacgtgaagggctggtgggccgccaaggacatgcaccgcatcctgtacctgttctatgaggacatcaagaaggaccccaagcgggagattgagaagatcctgaagttcctggagaaggacatcagcgaggagatcctgaacaagatcatctaccacaccagctttgatgtgatgaagcagaaccccatgaccaactacaccaccctgcccaccagcatcatggaccacagcatcagccccttcatgaggaagggcatgcctggggactggaagaactacttcaccgtggcccagaatgaggagtttgacaaggactaccagaagaagatggccggcagcaccctgaccttcagaacagagatctag

SEQ ID NO: 19071 - DNA, 216 bp, synthetic construct
  source 1..216: mol_type = other DNA; note = Synthetic coding sequence
atgtgtggcagctactacggcaactactacggcaccccaggctacggcttctgtggctacggcggcctgggctacggctatggaggcctgggctgcggctacggcagctgctgcggctgcggcttccggcggctgggctgcggctacggctacggcagccgcagcctgtgtggctacggctacggctgcggcagcggcagcggctactactactag

SEQ ID NO: 19072 - DNA, 2094 bp, synthetic construct
  source 1..2094: mol_type = other DNA; note = Synthetic coding sequence
atggacaagaagagcacagctgagaagctgggcaaggagctgggcctgcaggccaaggagctgtctgctgtgcacagcagccaccatgaaattggagtgaatgacagcaacctcttcagcctggagatgagggagcccctggagagcagcaacaccaagagcttccacagcgctgtggagatcaagaacagaagccagcacgagctgccctgcttccagcaccacggcatcgacacccccaccagcctgcagaagaggtctgcctgctgcccccccagcctgctgcggctggaggagacagccagcagcagccaggatggagacccccagatctgggatgacctgcccttcagcgagagcctgaacaagttcctggccgtgctggagagcgagattgctgtgacccaggctgatgtgagcagcaggaagcaccacgtggacaatgacatcgacaagttccacgccgaccacagccggctgtctgtgaccccccagaggaccaccggggccctgcacaccccacccatcgccctgcggagcagccaggtgattgtgaaggccaactgcagcaaggatgacttcctgttcaactgcaagggcaacctgagccccagcgtggagaaggagagccagcctgacaacaaggtggaggccgtgtctgtgaaccacaacggccgggacatgtctgagtacttcctgcccaacccctacctgagcgccctgagcagcagcagcaaggacctggagaccatcgtgaccctgaagaagaccatccgcatcagcccccaccgggagagtgaccacagcagcctgaacaacaagtacctgaatggctgtggggagatctctgtgtctgagatgaatgagaagctgaccaccctgtgctacaggaagtacaatgatgtgtctgacctgtgcaagctggagaacaagcagtactgccgctggagcaagaaccaggatgacagcttcaccatctgcaggaagctgacctaccccctggagaccctgtgcaacagccccaacagaagcaccaacaccctgaaggagatgccctggggccacatcaacaacaacgtgacccagagctacagcatcggctatgagggcagctatgatgccagcgctgacctgtttgatgacatcgccaaggagatggacatcgccacagagatcaccaagaagagccaggacatcctgctgaagtggggcaccagcctggccgagagccaccccagcgagagtgacttcagcctgcggagcctgtctgaggacttcatccagcccagccagaagctgagcctgcagagcctgagtgacagccgccacagcaggacctgcagccccaccccccacttccagagcgacagcgagtacaactttgagaacagccaggactttgtgccctgcagccagagcacccccatcagcggcttccaccagacccgcatccacggcatcaacagagccttcaagaagcctgtgttctacagcgacctggatggcaactatgagaagatccgcatcttcccagaaaatgacaagcagcaggccagccccagctgccccaagaacatcaagacccccagccagaagatccgcagccccatcgtgtctggagtgtcccagccagatgtgttcaaccactacccctttgctgagtgccacgagacagacagtgatgagtgggtgccccccaccacccagaagatcttccccagcgacatgctgggcttccagggcatcggcctgggcaagtgcctggccgcctaccacttcccagaccagcaggagctgcccaggaagaagctgaagcacatccggcagggcaccaacaagggcctcatcaagaagaagctgaagaacatgctggccgctgtggtgaccaagaagaagacccacaagtacaactgcaagagcagcggctggatcagcaagtgcccagacatccaggtgctggccgccccccagctgcaccccatcctgggccctgacagctgcagcgaggtgaagtgctgcctgcccttcagcgagaagggccccccatctgtgtgtgagaccaggtctgcctggagccctgagctgttctcctag

SEQ ID NO: 19073 - DNA, 306 bp, synthetic construct
  source 1..306: mol_type = other DNA; note = Synthetic coding sequence
atgagcaacacccaggccgagaggagcatcatcggcatgattgacatgttccacaagtacacaggaagagatggcaagattgagaagcccagcctgctgaccatgatgaaggagaacttccccaacttcctgagcgcctgtgacaagaagggcatccactacctggccaccgtgtttgagaagaaggacaagaatgaagacaagaagattgacttcagcgagttcctgagcctgctgggggacattgctgctgactaccacaagcagagccatggagctgccccctgcagcggcggcagccagtag

SEQ ID NO: 19074 - DNA, 678 bp, synthetic construct
  source 1..678: mol_type = other DNA; note = Synthetic coding sequence
atggctgtgcgcagcctgtgggccggccgcctgcgggtgcagaggctgctggcctggagcgctgcctgggagagcaagggctggcccctgcccttcagcacagccacccagaggacagctggggaggactgccgctcagaagatcctccagatgagctgggcccccccctggccgagcgggccctgcgggtgaaggctgtgaagctggagaaggaggtgcaggacctgactgtgcgctaccagagggccatcgctgactgtgagaacatcagaagaaggacccagagatgtgtggaggatgccaagatcttcggcatccagagcttctgcaaggacctggtggaggtggccgacatcctggagaagaccacagagtgcatcagcgaggagagcgagcctgaggaccagaagctgaccctggagaaggtgttccggggcctgctgctgctggaggccaagctgaagtctgtgtttgccaagcacggcctggagaagctgacccccatcggggacaagtatgacccccatgagcacgagctgatctgccacgtgcctgctggggtgggcgtgcagcccggcaccgtggccctggtgcggcaggacggctacaagctgcacggccgcaccatccggctggcccgggtggaggtggccgtggagagccagaggcggctgtag

SEQ ID NO: 19075 - DNA, 1203 bp, synthetic construct
  source 1..1203: mol_type = other DNA; note = Synthetic coding sequence
atgaccaccaagaacctggagaccaaggtgacagtgaccagcagccccatcagaggagctggagatggcatggagacagaggagccccccaagtctgtggaggtgaccagcggcgtgcagagcaggaagcaccacagcctgcagagcccctggaagaaggctgtgcccagcgagagccctggggtgctgcagctgggcaagatgctgacagagaaggccatggaggtgaaggctgtgcgcatcctggtgcccaaggccgccatcacccatgacatccccaacaagaacaccaaggtgaagagcctgggccaccacaagggggagttcctgggccagagcgagggcgtgattgagcccaacaaggagctgtctgaggtgaagaatgtgctggagaagctgaagaacagcgagcggcggctgctgcaggacaaggagggcctgagcaaccagctgcgggtgcagacagaggtgaaccgggagctgaagaagctgctggtggcctctgtgggagatgacctgcagtaccactttgagcggctggcccgggagaagaaccagctgatcctggagaatgaggccctgggcaggaacacagcccagctgtctgagcagctggagaggatgagcatccagtgtgatgtgtggaggagcaagttcctggccagccgggtgatggctgatgagctgaccaacagccgggccgccctgcagaggcagaacagagatgcccacggggccatccaggacctgctgtctgagcgggagcagttccggcaggagatgattgccacccagaagctgctggaggagctgctggtgtccctgcagtggggccgggagcagacctacagccccagcgtgcagccccacagcacagctgagctggccctgaccaaccacaagctggccaaggctgtgaacagccacctgctgggcaatgtgggcatcaacaaccagaagaagatccccagcacagtggagttctgcagcaccccagctgagaagatggccgagaccgtgctgcgcatcctggaccctgtgacctgcaaggagagcagcccagacaaccccttctttgagagcagccccaccaccctgctggccaccaagaagaacatcggccgcttccacccctacaccaggtatgagaacatcaccttcaactgctgcaaccactgccgcggggagctgattgccctgtag

SEQ ID NO: 19076 - DNA, 735 bp, synthetic construct
  source 1..735: mol_type = other DNA; note = Synthetic coding sequence
atggaccctggagctgccctgcagaggagagctgggggcggcggcggcctgggcgccggcagccctgccctgagcggcggccagggcagaagaaggaagcagccccccaggcctgctgacttcaagctgcaggtgatcatcatcggcagccggggcgtgggcaagaccagcctgatggagcgcttcacagatgacaccttctgtgaggcctgcaagagcacagtgggcgtggacttcaagatcaagacagtggagctgcggggcaagaagatccggctgcagatctgggacacagctggccaggagcgcttcaacagcatcaccagcgcctactaccgcagcgccaagggcatcatcctggtgtatgacatcaccaagaaggagacctttgatgacctgcccaagtggatgaagatgattgacaagtatgcctctgaagatgctgagctgctgctggtgggcaacaagctggactgtgaaacagaccgggagatcacccggcagcagggcgagaagtttgcccagcagatcaccggcatgaggttctgtgaggccagcgccaaggacaacttcaacgtggatgagatcttcctgaagctggtggatgacatcctgaagaagatgcccctggacatcctgagaaatgagctgagcaacagcatcctgagcctgcagcctgagcctgagatccccccagagctgcccccaccccggccccacgtgcgctgctgctag

SEQ ID NO: 19077 - DNA, 1158 bp, synthetic construct
  source 1..1158: mol_type = other DNA; note = Synthetic coding sequence
atggccctgccccatgacagcaatgagaccagctacctgctgccccccaacaatgaagactggggccggcagaccatcccagactttgtgtatggccagaaggacctgatggccgagggcatccagtggcccagaaatgcccctggcatcccagatgccctgccccagagcccctttgatgctgccctgtgcagcgcctggaagcagagggtggagctgggcctcttccgctaccgcctgcgggagctgcagacccagatcctgcctggagctgtgggctttgtggcccagctgaatgtggagcggggcgtgcagaggcggcccccccagaccatcaagtctgtgcggcaggcctttgatcctgtgcagttcaacttcaacaagatccggcctggagaggtgctcttccggctgcaccgggagccagacctgcccggcaccctgctgcaggaggacatcctggtggtgatcaacgtgagccccctggagtggggccacgtgctgctggtgcctgagcccgcccggcagctgccccagaggctgctgcccggggccctgcgggccggcatcgaggccgtgctgctgagcctgcaccctggcttccgggtgggcttcaacagcctgggcggcctggcctctgtgaaccacctgcacctgcacggctactacctggcccaccggctgcctgtggagcaggcccccagcgagcccctggaccccggcggccacctgcacctgctgcaggacctgcctgcccctggcttcctgttctacacccggggccctggccctgacctggagagcctcatcagccgggtgtgccgggccacagactacctgacagaccatgaaattgcccacaacctgtttgtgaccaggggggcccctcctgggaagaccagccccagcagcgccctgactggagtgcgggtcatcctgtgggccaggaagagcagctttggcatcaaggatggagaggccttcaacgtggccctgtgtgagctggccggccacctgcctgtgaagaccagccaggacttcagcagcctgacagaagctgctgctgtggccctgatccaggactgccgcctgccccccagccaggccgaggatgtgcaggccgccctggtggccctgatgagccaggaggagcagtag

SEQ ID NO: 19078 - DNA, 192 bp, synthetic construct
  source 1..192: mol_type = other DNA; note = Synthetic coding sequence
atgctgtgtgacaacttccctggagctgtgtttcctggctgctactggggcagctatggctaccccctgggctacagcgtgggctgcggctacggcagcacctacagccctgtgggctacggcttcggctacggctacaacggctgtggggccttcggctaccgccgctacagcccctttgccctgtactag

SEQ ID NO: 19079 - DNA, 1083 bp, synthetic construct
  source 1..1083: mol_type = other DNA; note = Synthetic coding sequence
atgctgggcagcggcttcaaggccgagcggctgcgggtgaacctgcggctggtgatcaaccggctgaagctgctggagaagaagaagacagagctggcccagaaggccaggaaggagattgctgactacctggccgccggcaaggatgagcgggcccgcatccgggtggagcacatcatccgggaggactacctggtggaggccatggagatcctggagctgtactgtgacctgctgctggccaggtttggcctcatccagagcatgaaggagctggacagcggcctggccgagagcgtgtccaccctcatctgggccgccccccggctgcagagcgaggtggccgagctgaagatcgtggccgaccagctgtgtgccaagtacagcaaggagtatggcaagctgtgcaggaccaaccagattggaacagtgaatgaccggctgatgcacaagctgtctgtggaggccccacccaagatcctggtggagcgctacctgattgaaattgccaagaactacaacgtgccctatgagccagattctgtggtgatggccgaggcccctcctggggtggagacagacctgattgatgtgggcttcacagatgatgtgaagaagggcggccctggccggggcggcagcggcggcttcaccgcccctgtgggcggcccagatggcaccgtgcccatgcccatgcccatgcccatgcccatgcccagcgccaacacccccttctcctaccccctgcccaagggccccagcgacttcaacggcctgcccatgggcacctaccaggccttccccaacatccaccccccccagatcccagccaccccacccagctatgagagcatgaccctgatgctgatccgcatcagcctgctgcaccggctgctggtgctggaccccagccagaagcccctgcagagcttcctgcctgacctgcagatcaccatgaccaccctgagctaccagagctgccacctgtgccagacccactaccagctgcacctgctggtgcctgccccccagcacctgaagaccctgaccctgatgatcttccctgggggcctgaagagctag

SEQ ID NO: 19080 - DNA, 528 bp, synthetic construct
  source 1..528: mol_type = other DNA; note = Synthetic coding sequence
atgcccaagaggagctgcccctttgctgatgtggcccccctgcagctgaaggtgcgggtgtcccagcgggagctgagccggggcgtgtgtgccgagcgctacagccaggaggtgtttgagaagaccaagaggctgctcttcctgggcgcccaggcctacctggaccacgtgtgggatgagggctgtgctgtggtgcacctgcctgagagccccaagccaggccccaccggggcccccagggctgcccggggccagatgctgattggaccagatggccgcctcatccgcagcctgggccaggccagcgaggccgaccccagcggcgtggccagcatcgcctgcagcagctgtgtgcgggctgtggatggcaaggctgtgtgtggccagtgtgagcgggccctgtgtggccagtgtgtgaggacctgctggggctgcggctctgtggcctgcaccctgtgtggcctggtggactgcagcgacatgtatgagaaggtgctgtgcaccagctgtgccatgtttgagacctag

SEQ ID NO: 19081 - DNA, 366 bp, synthetic construct
  source 1..366: mol_type = other DNA; note = Synthetic coding sequence
atggaggccgaggtggacaagctggagctgatgttccagaaggccgagagtgacctggactacatccagtaccgcctggagtatgagatcaagaccaaccacccagattctgccagcgagaagaaccctgtgaccctgctgaaggagctgagcgtcatcaagagccgctaccagaccctgtatgcccgcttcaagcctgtggccgtggagcagaaggagagcaagagccgcatctgtgccaccgtgaagaagaccatgaacatgatccagaagctgcagaagcagacagacctggagctgagccccctgaccaaggaggagaagacagctgctgagcagttcaagttccacatgccagacctgtag

SEQ ID NO: 19082 - DNA, 1968 bp, synthetic construct
  source 1..1968: mol_type = other DNA; note = Synthetic coding sequence
atggtgaccaccctgggccccaagatggctgctgagtggggcggcggcgtgggctacagcggcagcggccctggccgcagccgctggcgctggagcggctctgtgtgggtgcgctctgtgctgctgctgctgggcggcctgcgggccagcgccaccagcacccctgtgtccctgggcagcagccccccctgccgccaccacgtgcccagcgacacagaggtgatcaacaaggtgcacctgaaggccaaccacgtggtgaagagagatgtggatgagcacctgcgcatcaagacagtgtatgacaagtctgtggaggagctgctgcctgagaagaagaacctggtgaagaacaagctgttcccccaggccatctcctacctggagaagaccttccaggtgcggcggcctgctggcaccatcctgctgagccggcagtgtgccaccaaccagtacctgaggaaagaaaatgacccccaccgctactgcacaggagaatgtgccgcccacaccaagtgtggccctgtgattgtgcctgaggagcacctgcagcagtgccgggtgtaccggggcggcaagtggccccatggagctgtgggcgtgcctgaccaggagggcatcagtgatgctgactttgtgctgtatgtgggcgccctggccacagagcgctgcagccatgagaacatcatctcctatgctgcctactgccagcaggaggccaacatggaccggcccatcgccggctacgccaacctgtgccccaacatgatcagcacccagccccaggagtttgtgggcatgctgagcacagtgaagcatgaggtgatccacgccctgggcttctctgctggcctgtttgccttctaccatgacaaggatggcaaccccctgaccagcagatttgctgatggcctgccccccttcaactacagcctgggcctgtaccagtggagcgacaaggtggtgaggaaggtggagcggctgtgggatgtgcgggacaacaagatcgtgcgccacacagtgtacctgctggtgaccccccgggtggtggaggaggccaggaagcactttgactgccctgtgctggagggcatggagctggagaaccagggcggcgtgggcacagagctgaaccactgggagaagaggctgctggagaatgaggccatgacaggcagccacacccagaacagagtgctgagccgcatcaccctggccctgatggaggacaccggccggcagatgctgagcccctactgtgacaccctgcggagcaaccccctgcagctgacctgccggcaggaccagagagctgtggccgtgtgcaacctgcagaagttccccaagcccctgccccaggagtaccagtactttgatgagctgagcggcatcccagctgaggacctgccctactatggaggctctgtggagattgctgactactgccccttcagccaggagttctcctggcacctgagcggggagtaccagaggagcagtgactgccgcatcctggagaaccagcctgagatcttcaagaactacggggctgagaagtatggcccccacagcgtgtgcctgatccagaagagcgcctttgtgatggagaagtgtgagaggaagctgagctacccagactggggcagcggctgctaccaggtgtcctgcagcccccagggcctgaaggtgtgggtgcaggacaccagctacctgtgcagccgggccggccaggtgctgcctgtgtccatccagatgaatggctggattcatgatggcaacctgctgtgccccagctgctgggacttctgtgagctgtgccccccagagacagatcctccagccaccaacctgacccgggccctgcccctggacctgtgcagctgcagcagcagcctggtggtgaccctgtggctgctgctgggcaacctcttccccctgctggccggcttcctgctgtgcatctggcactag

SEQ ID NO: 19083 - DNA, 408 bp, synthetic construct
  source 1..408: mol_type = other DNA; note = Synthetic coding sequence
atgggccgggtgaggaccaagacagtgaagaaggccgcccgggtcatcatcgagaagtactacacccggctgggcaatgacttccacaccaacaagagggtgtgtgaggagatcgccatcatccccagcaagaagctgaggaacaagattgctggctacgtgacccacctgatgaagaggatccagaggggccctgtgcggggcatcagcatcaagctgcaggaggaggagcgggagcggcgggacaactacgtgcctgaggtgtctgccctggaccaggagatcatcgaggtggaccctgacaccaaggagatgctgaagctgctggactttggcagcctgagcaacctgcaggtgacccagcccaccgtgggcatgaacttcaagaccccccggggccctgtgtag

SEQ ID NO: 19084 - DNA, 1119 bp, synthetic construct
  source 1..1119: mol_type = other DNA; note = Synthetic coding sequence
atgaaccactgccagctgcctgtggtgattgacaatggcagcggcatgatcaaggccggcgtggccggctgccgggagccccagttcatctaccccaacatcatcggccgggccaagggccagagccgggccgcccagggcggcctggagctgtgtgtgggggaccaggcccaggactggaggagcagcctcttcatctcctaccctgtggagcggggcctcatcacctcctgggaggacatggagatcatgtggaagcacatctatgactacaacctgaagctgaagccctgtgatggccctgtgctgatcacagagcccgccctgaaccccctggccaaccggcagcagatcacagagatgttctttgagcacctgggcgtgcctgccttctacatgagcatccaggccgtgctggccctgtttgctgctggcttcaccaccggcctggtgctgaacagcggggccggcgtgacccagagcgtgcccatctttgagggctactgcctgccccacggcgtgcagcagctggacctggccggcctggacctgaccaactacctgatggtgctgatgaagaaccacggcatcatgctgctgagcgccagtgacaggaagatcgtggaggacatcaaggagagcttctgctacgtggccatgaactatgaggaggagatggccaagaagccagactgcctggagaaggtgtaccagctgcctgatggcaaggtgatccagctgcatgaccagctgttcagctgcccagaggccctcttcagcccctgccacatgaacctggaggcccctggcatcgacaagatctgcttcagcagcatcatgaagtgtgacaccggcctgagaaattccttcttcagcaacatcatcctggccggcggcagcaccagcttccctggcctggacaagaggctggtgaaggacatcgccaaggtggccccagccaacacagctgtgcaggtgattgcccctcctgagaggaagatctctgtgtggatgggcggcagcatcctggccagcctgagcgccttccaggacatgtggatcacagctgctgagttcaaggaggtgggccccaacatcgtgcaccagcgctgcttctag

SEQ ID NO: 19085 - DNA, 3072 bp, synthetic construct
  source 1..3072: mol_type = other DNA; note = Synthetic coding sequence
atggatgccaacagcaaggacaagcccccagagaccaaggagagcgccatgaacaatgctggaaatgccagcttcatcctgggcaccgggaagatcgtgaccccccagaagcatgctgagctgccccccaacccctgcaccccagacaccttcaagagccccctgaacttcagcacagtgacagtggagcagctgggcatcaccccagagagctttgtgaggaacagcgctgggaagagcagcagctacctgaagaagtgcagaagaagatctgctgtgggcgcccggggcagccctgagaccaaccacctgatccgcttcatcgcccggcagcagaacatcaagaatgccaggaagagccccctggcccaggacagccccagccagggcagccctgccctgtacagaaatgtgaacaccctgcgggagcgcatcagcgccttccagagcgccttccacagcatcaaggaaaatgagaagatgacaggctgcctggagttcagcgaggccggcaaggagagcgagatgacagacctgaccaggaaggagggcctgagcgcctgccagcagagcggcttccctgctgtgctgagcagcaagagaagacgcatctcctaccagagggacagtgatgagaacctgacagatgctgagggcaaggtgattggcctgcagatcttcaacatcgacacagaccgggcctgtgctgtggagacctctgtggacctgtctgagatcagcagcaagctgggcagcacccagagcggcttcctggtggaggagagcctgcccctgtctgagctgacagagaccagcaatgccctgaaggtggccgactgtgtggtgggcaagggcagcagtgatgctgtgtccccagacaccttcaccgctgaggtgtccagtgatgctgtgcctgatgtgcgcagccctgccaccccagcctgccggcgggacctgcccacccccaagacctttgtgctgcggtctgtgctgaagaagcccagcgtgaagatgtgcctggagagcctgcaggagcactgcaacaacctgtatgatgatgatggcacccaccccagcctcatcagcaacctgcccaactgctgcaaggagaaggaggccgaggatgaagaaaattttgaggccccagccttcctgaacatgaggaagaggaagagggtgacctttggagaggacctgagccctgaggtgtttgatgagagcctgcctgccaacacccccctgaggaagggcggcacccctgtgtgcaagaaggacttcagcggcctgagcagcctgctgctggagcagagccctgtgcctgagcccctgccccagcctgactttgatgacaagggggagaacctggagaacatcgagcccctgcaggtgtcctttgctgtgctgagcagccccaacaagagcagcatcagcgagaccctgtctggaacagacaccttcagcagcagcaacaaccacgagaagatcagcagccccaaggtgggccgcatcaccaggaccagcaacagaagaaaccagctggtgtctgtggtggaggagagcgtgtgcaacctgctgaacacagaggtgcagccctgcaaggagaagaagatcaacagaaggaagagccaggagaccaagtgcaccaagagggccctgcccaagaagagccaggtgctgaagagctgcaggaagaagaagggcaagggcaagaagtctgtgcagaagagcctgtatggagagcgggacatcgccagcaagaagcccctgctgagccccatccctgagctgcctgaggtgcctgagatgacccccagcatccccagcatccggcggctgggcagcggctacttcagcagcaatggcaagctggaggaggtgaagacccccaagaaccctgtgaagaggaaggacctgctgcggcatgaccctgacctgcacatgcaccagggctatgacaagtatgatgtgtctgagttctgcagctacatcaagagcagcagcagcctgggcaatgccaccagtgatgaggaccccaacaccaacatcatgaacatcaatgaaaacaagaacatccccaaggccaagaacaagtctgagagtgaaaatgagcccaaggccggcacagacagccctgtgtcctgtgcctctgtgacagaggagcgggtggccagtgacagccccaagccagccctgaccctgcagcagggccaggagttctctgctgggggccagaatgctgagaacctgtgccagttcttcaagatcagcccagacctgaacatcaagtgtgagaggaaggatgacttcctgggcgctgctgagggcaagctgcagtgcaaccggctgatgcccaacagccagaaggactgccactgcctgggagatgtgctgattgagaacaccaaggagagcaagagccagagcgaggacctgggcaggaagcccatggagagcagctctgtggtgtcctgccgggacaggaaggacagaagaagatccatgtgctacagtgatggccgcagcctgcacctggagaagaatggaaaccacacccccagcagctctgtgggcagctctgtggagatcagcctggagaacagcgagctgttcaaggacctgagtgatgccatcgagcagaccttccagaggaggaacagcgagaccaaggtgagaagaagcacccggctgcagaaggacctggagaatgaaggcctggtgtggatcagcctgcccctgcccagcaccagccagaaggccaagaggaggaccatctgcacctttgacagcagcggctttgagagcatgagccccatcaaggagaccgtgagcagccggcagaagccccagatggcccctcctgtgtctgaccctgagaacagccagggccctgctgctggcagcagtgatgagcccgggaagaggaggaagagcttctgcatcagcaccctggccaacaccaaggccaccagccagttcaagggctacagaagaagaagcagcctgaatggcaagggggagagcagcctgacagccctggagagaattgagcacaacggggagaggaagcagtag

SEQ ID NO: 19086 - DNA, 963 bp, synthetic construct
  source 1..963: mol_type = other DNA; note = Synthetic coding sequence
atgagcaagtctgagagccccaaggagcctgagcagctgaggaagctgttcatcggcggcctgagctttgagaccacagatgagagcctgcggagccactttgagcagtggggcaccctgacagactgtgtggtgatgagggaccccaacaccaagaggagccggggctttggatttgtgacctacgccaccgtggaggaggtggatgctgccatgaatgcccggccccacaaggtggatggccgggtggtggagcccaagagagctgtgtcccgggaggacagccagaggcctggggcccacctgactgtgaagaagatctttgtgggcggcatcaaggaggacacagaggagcaccacctgcgggactactttgagcagtatggcaagattgaagtcatcgagatcatgacagaccggggcagcggcaagaagaggggctttgcctttgtgacctttgatgaccatgacagcgtggacaagatcgtcatccagaagtaccacacagtgaatggccacaactgtgaggtgaggaaggccctgagcaagcaggagatggccagcgccagcagcagccagaggggccgcagcggcagcggcaactttggaggcggccggggcggcggctttggaggaaatgacaactttggccggggcggcaacttcagcggccggggcggctttggaggcagcagaggaggcggcggctatggaggcagcggagatggctacaatggatttggaaatgatggcaacaactttggaggcggcggcagctacaatgactttggaaactacaacaaccagagcagcaactttggccccatgaagggcggcaactttggaggccgcagcagcggcccctatggaggcggcggccagtactttgccaagcccaggaaccagggcggctatggaggcagcagcagcagcagcagctatggcagcggccgccgcttctag

SEQ ID NO: 19087 - DNA, 141 bp, synthetic construct
  source 1..141: mol_type = other DNA; note = Synthetic coding sequence
atgtgcagcctggccagcggggccaccggctacagccacctgctgaagaagcacttccacacagtgtccctgagcatcagcctcatcctgacagcctggttcatcaacatggacctgaacttcatggacaccctgtcctag

SEQ ID NO: 19088 - DNA, 198 bp, synthetic construct
  source 1..198: mol_type = other DNA; note = Synthetic coding sequence
atgtgctactacagcaactactacggcggcctgcgctatggctatggagtgctgggcggcggctacggctgcggctgcggctacggccacggctacggcggcctgggctgcggctacggccggggctatggaggctacggctacggctgctgccggcccagctgctacggccgctactggagctgtggcttctactag

SEQ ID NO: 19089 - DNA, 7059 bp, synthetic construct
  source 1..7059: mol_type = other DNA; note = Synthetic coding sequence
atggagaaggccaccgtgcctgtggccgccgccacagctgctgagggggagggcagccccccagctgtggccgctgtggccggccccccagctgctgctgaggtgggcggcggcgtgggcggcagcagccgggcccggagcgccagcagcccccggggcatggtgcgggtgtgtgacctgctgctgaagaagaagccaccccagcagcagcaccacaaggccaagaggaacagaacctgccggccccccagcagcagcgagagcagcagtgacagcgacaacagcggcggcggcggcggcggcggcggcggcggcggcggcggcggcggcaccagcagcaacaacagcgaggaggaggaggatgatgatgatgaggaggaggaggtgtctgaggtggagagcttcatcctggaccaggatgacctggagaaccccatgctggagacagccagcaagctgctgctgagcggcacagcagatggagctgacctgaggacagtggaccctgagacccaggcccggctggaggccctgctggaggccgccggcatcggcaagctgagcacagcagatggcaaggcctttgctgaccctgaggtgctgcggcggctgaccagctctgtgtcctgtgccctggatgaagctgctgctgccctgaccaggatgagagctgagagcacagccaatgccggccagagcgacaacagaagcctggccgaggcctgcagtgaaggagatgtgaatgctgtgaggaagctgctgattgagggccgctctgtgaatgagcacacagaggagggggagagcctgctgtgcctggcctgcagcgctggctactatgagctggcccaggtgctgctggccatgcacgccaacgtggaggaccggggcatcaagggggacatcacccccctgatggccgccgccaacggcggccacgtgaagatcgtgaagctgctgctggcccacaaggcagatgtgaatgcccagagcagcactggaaacacagccctgacctacgcctgtgccggcggctacgtggatgtggtgaaggtgctgctggagagcggggccagcattgaggaccacaatgaaaatggccacacccccctgatggaggccggcagcgctggccacgtggaggtggcccggctgctgctggagaatggagctggcatcaacacccacagcaatgagttcaaggagagcgccctgaccctggcctgctacaagggccacctggagatggtgcgcttcctgctggaggccggggctgaccaggagcacaagacagatgagatgcacacagccctgatggaggcctgcatggatggccacgtggaggtggcccggctgctgctggacagcggggcccaggtgaacatgcctgctgacagctttgagagccccctgaccctggccgcctgtggcggccacgtggagctggccgccctgctgattgagcggggggccagcctggaggaggtgaatgatgagggctacacccccctgatggaggccgcccgggagggccacgaggagatggtggccctgctgctgggccagggcgccaacatcaatgcccagacagaggagacccaggagacagccctgaccctggcctgctgcggcggcttcctggaggtggccgacttcctgatcaaggccggggctgacatcgagctgggctgcagcacccccctgatggaggccgcccaggagggccacctggagctggtgaagtacctgctggccgccggggccaacgtgcacgccaccacagccaccggggacacagccctgacctacgcctgtgaaaatggccacacagatgtggctgatgtgctgctgcaggccggggctgacctggagcatgaaagtgaaggaggccgcacccccctgatgaaggccgcccgggccggccacgtgtgcaccgtgcagttcctgatcagcaagggggccaacgtgaacagaaccacagccaacaatgaccacacagtgctgagcctggcctgtgccggcggccacctggccgtggtggagctgctgctggcccacggggctgaccccacccaccggctgaaggatggcagcaccatgctgattgaggccgccaagggcggccacacctctgtggtgtgctacctgctggactaccccaacaacctgctgagcgcccctcctccagatgtgacccagctgaccccacccagccatgacctgaacagagccccccgggtgcctgtgcaggccctgcccatggtggtgcccccccaggagccagacaagcccccagccaacgtggccaccaccctgcccatccggaacaaggctgtgtctggccgggccagcgccatgagcaacacccccacccacagcattgctgccagcatcagccagccccagacccccacccccagccccatcatcagccccagcgccatgctgcccatctacccagccatcgacattgatgcccagacagagagcaaccacgacacagccctgaccctggcctgtgccggcggccacgaggagctggtgcagaccctgctggagcggggggccagcattgagcaccgggacaagaagggcttcacccccctcatcctggccgccacagctggccacgtgggcgtggtggagatcctgctggacaatggagctgacatcgaggcccagagcgagaggaccaaggacacccccctgagcctggcctgcagcggcggccggcaggaggtggtggagctgctgctggcccggggggccaacaaggagcacagaaatgtgtctgactacacccccctgagcctggccgccagcggcggctacgtgaacatcatcaagatcctgctgaatgctggagctgagatcaacagcaggacaggcagcaagctgggcatcagccccctgatgctggccgccatgaatggccacacagctgctgtgaagctgctgctggacatgggcagtgacatcaatgcccagatcgagaccaacagaaacacagccctgaccctggcctgcttccagggccgcacagaggtggtgtccctgctgctggacaggaaggccaacgtggagcaccgggccaagacaggcctgacccccctgatggaggccgccagcggcggctatgcagaggtgggccgggtgctgctggacaagggagcagatgtgaatgcccctcctgtgcccagcagccgggacacagccctgaccatcgctgctgacaagggccactacaagttctgtgagctgctgattggccgcggggcccacattgatgtgaggaacaagaagggcaacacccccctgtggctggccgccaatggaggccacctggatgtggtgcagctgctggtgcaggccggggctgatgtggatgctgctgacaacaggaagatcacccccctgatggccgccttcagaaaaggacatgtgaaggtggtgcgctacctggtgaaggaggtgaaccagttccccagcgacagcgagtgcatgagatacatcgccaccatcacagacaaggagatgctgaagaagtgccacctgtgcatggagagcatcgtgcaggccaaggaccggcaggccgctgaggccaacaagaatgccagcatcctgctggaggagctggacctggagaagctgcgggaggagagccggcggctggccctggccgccaagcgggagaagaggaaggagaagaggaggaagaagaaggaggagcagaggaggaagctggaggagattgaggccaagaacaaggaaaattttgagctgcaggccgcccaggagaaggagaagctgaaggtggaggatgagcctgaggtgctgacagagccccccagcgccaccaccaccaccaccatcggcatcagcgccacctggaccaccctggccggcagccacggcaagaggaacaacaccatcaccaccaccagcagcaagaggaagaacaggaagaacaagatcaccccagaaaatgtgcagatcatctttgatgaccccctgcccatctcctacagccagcctgagaaggtgaatggagagagcaagagcagcagcaccagcgagagcggggacagcgacaacatgaggatcagcagctgcagtgatgagagcagcaacagcaacagcagcaggaagagtgacaaccacagccctgctgtggtgaccaccaccgtgagcagcaagaagcagcccagcgtgctggtgaccttccccaaggaggagaggaagtctgtgtctgggaaggccagcatcaagctgtctgagaccatcagcgagggcaccagcaacagcctgagcacctgcaccaagagcggccccagccccctgagcagccccaacgggaagctgactgtggccagccccaagaggggccagaagcgggaggagggctggaaggaggtggtgcggcgcagcaagaaggtgtctgtgcccagcaccgtcatcagcagggtcatcggccggggcggctgcaacatcaatgccatccgggagttcaccggggcccacatcgacatcgacaagcagaaggacaagacaggagaccgcatcatcaccatccggggcggcacagagagcacccggcaggccacccagctgatcaatgccctgatcaaggaccctgacaaggagattgatgagctgatccccaagaaccggctgaagagcagcagcgccaacagcaagattggcagcagcgcccccaccaccacagctgccaacaccagcctgatgggcatcaagatgaccaccgtggccctgagcagcaccagccagacagccacagccctgactgtgcctgccatcagcagcgccagcacccacaagaccatcaagaaccctgtgaacaacgtgcggcccggcttccctgtgtccctgcccctggcctaccccccaccccagtttgcccacgccctgctggccgcccagaccttccagcagatccggcccccccggctgcccatgacccactttggaggcaccttccccccagcccagagcacctggggccccttccctgtgcggcccctgagccctgcccgggccaccaacagccccaagccccacatggtgcccaggcacagcaaccagaacagcagcggcagccaggtgaacagcgctggcagcctgaccagcagccccaccaccaccaccagcagcagcgccagcacagtgcccggcaccagcaccaacggcagccccagcagccccagcgtgcggcggcagctgtttgtgacagtggtgaagaccagcaatgccaccaccaccaccgtgaccaccacagccagcaacaacaacacagcccccaccaatgccacctaccccatgcccacagccaaggagcactaccctgtgagcagccccagcagccccagccccccagcccagcctggaggagtgtccaggaacagccccctggactgtggcagcgccagccccaacaaggtggccagcagcagcgagcaggaggccggcagcccccctgtggtggagaccaccaacaccaggcctcccaacagcagcagcagcagcggcagcagcagcgcccacagcaaccagcagcagcccccaggctctgtgtcccaggagccccggccccccctgcagcagagccaggtgcccccacctgaggtgaggatgacagtgccccccctggccaccagcagcgcccctgtggccgtgcccagcacagcccctgtgacctaccccatgccccagacccccatgggctgcccccagcccacccccaagatggagaccccagccatccggcccccaccccacggcaccacagccccccacaagaacagcgcctctgtgcagaacagctctgtggccgtgctgtctgtgaaccacatcaagaggccccacagcgtgcccagctctgtgcagctgcccagcaccctgagcacccagagcgcctgccagaacagcgtgcacccagccaacaagcccatcgcccccaacttcagcgcccccctgcccttcggccccttcagcaccctgtttgagaacagccccaccagcgcccacgccttctggggcggctctgtggtgagcagccagagcaccccagagagcatgctgagcggcaagagcagctacctgcccaacagcgaccccctgcaccagagcgacaccagcaaggcccctggcttccggccccccctgcagaggcctgcccccagccccagcggcatcgtgaacatggacagcccctacggctctgtgacccccagcagcacccacctgggcaactttgccagcaacatcagcggcggccagatgtatggccctggggcccccctgggcggggccccagctgctgccaacttcaaccggcagcacttcagccccctgagcctgctgaccccctgcagcagcgccagcaatgacagcagcgcccagagcgtgagcagcggcgtgcgggcccccagccctgcccccagctctgtgcccctgggcagcgagaagcccagcaatgtgtcccaggacaggaaggtgcctgtgcccatcggcacagagaggtctgcccgcatccggcagacaggcaccagcgcccccagcgtgattggcagcaacctgagcacctctgtgggccacagcggcatctggagctttgagggcatcggcggcaaccaggacaaggtggactggtgcaaccctggcatgggcaaccccatgatccaccggcccatgtctgaccccggggtcttcagccagcaccaggccatggagcgggacagcacaggcatcgtgacccccagcggcaccttccaccagcacgtgcctgctggctacatggacttccccaaggtgggcggcatgcccttctctgtgtatggaaatgccatgatcccccctgtggcccccatcccagatggagctgggggccccatcttcaacggcccccacgccgctgaccccagctggaacagcctcatcaagatggtgagcagcagcacagaaaataatggcccccagacagtgtggacaggcccctgggccccccacatgaacagcgtgcacatgaaccagctgggctag

SEQ ID NO: 19090 - DNA, 1374 bp, synthetic construct
  source 1..1374: mol_type = other DNA; note = Synthetic coding sequence
atgagcggcacccgggccagcaatgacaggcctcctggggccggcggcgtgaagaggggccgcctgcagcaggaggccgccgccaccggcagccgggtgacagtggtgctgggcgcccagtggggagatgagggcaagggcaaggtggtggacctgctggccacagatgctgacatcatcagccgctgccagggcggcaacaatgccggccacacagtggtggtggatggcaaggagtatgacttccacctgctgcccagcggcatcatcaacaccaaggctgtgtccttcatcggaaatggagtggtgatccacctgcccggcctgtttgaggaggccgagaagaatgagaagaagggcctgaaggactgggagaagaggctcatcatcagtgaccgggcccacctggtgtttgacttccaccaggccgtggatggcctgcaggaggtgcagaggcaggcccaggagggcaagaacatcggcaccaccaagaagggcatcggccccacctacagcagcaaggccgccaggacaggcctgcgcatctgtgacctgctgagtgactttgatgagttcagcagccgcttcaagaacctggcccaccagcaccagagcatgttccccaccctggagattgacatcgagggccagctgaagaggctgaagggctttgctgagcgcatccggcccatggtgagagatggagtgtacttcatgtatgaggccctgcacggcccccccaagaagatcctggtggagggcgccaatgctgccctgctggacatcgactttggcacctacccctttgtgaccagcagcaactgcaccgtgggcggcgtgtgcaccggcctgggcatccccccccagaacattggagatgtgtatggagtggtgaaggcctacaccaccagggtgggcattggagccttccccacagagcagatcaatgagatcggcggcctgctgcagacccggggccacgagtggggcgtgaccactggaaggaagagaagatgtggctggctggacctgatgatcctgcgctatgcccacatggtgaatggcttcaccgccctggccctgaccaagctggacatcctggatgtgctgggggaggtgaaggtgggcgtgtcctacaagctgaatggcaagaggatcccctacttccctgccaaccaggagatgctgcagaaggtggaggtggagtatgagaccctgcccggctggaaggctgacaccaccggggcccggcgctgggaggacctgcccccccaggcccagaactacatccgctttgtggagaaccacgtgggcgtggccgtgaagtgggtgggcgtgggcaagagccgggagagcatgatccagctgttctag

SEQ ID NO: 19091 - DNA, 1596 bp, synthetic construct
  source 1..1596: mol_type = other DNA; note = Synthetic coding sequence
atgtgcagcctggccagcggggccactggaggccgcggggctgtggagaatgaggaggacctgcctgagctgagtgacagcggagatgaagctgcctgggaggatgaagatgatgctgacctgccccacggcaagcagcagaccccctgcctcttctgcaacagactcttcaccagcgctgaggagaccttcagccactgcaagtctgagcaccagttcaacatcgacagcatggtgcacaagcacggcctggagttctacggctacatcaagctgatcaacttcatccggctgaagaaccccaccgtggagtacatgaacagcatctacaaccctgtgccctgggagaaggaggagtacctgaagcctgtgctggaggatgacctgctgctgcagtttgatgtggaggacctgtatgagcctgtgtctgtgcccttctcctaccccaacggcctgtctgagaacacctctgtggtggagaagctgaagcacatggaggcccgggccctgtctgctgaggccgccctggcccgggcccgggaggacctgcagaagatgaagcagtttgcccaggactttgtgatgcacacagatgtgaggacctgcagcagcagcacctctgtgattgctgacctgcaggaggatgaagatggagtgtacttcagcagctatggccactacggcatccacgaggagatgctgaaggacaagatcagaacagagagctacagagacttcatctaccagaacccccacatcttcaaggacaaggtggtgctggatgtgggctgcggcaccggcatcctgtccatgtttgctgccaaggccggggccaagaaggtgctgggcgtggaccagagcgagatcctgtaccaggccatggacatcatccggctgaacaagctggaggacaccatcaccctcatcaagggcaagattgaggaggtgcacctgcctgtggagaaggtggatgtgatcatcagcgagtggatgggctacttcctgctgtttgagagcatgctggacagcgtgctgtatgccaagaacaagtacctggccaagggcggctctgtgtacccagacatctgcaccatcagcctggtggccgtgtctgatgtgaacaagcatgctgaccgcatcgccttctgggatgatgtgtatggcttcaagatgagctgcatgaagaaggctgtgattcctgaggccgtggtggaggtgctggaccccaagaccctcatcagcgagccctgtggcatcaagcacatcgactgccacaccaccagcatcagtgacctggagttcagcagtgacttcaccctgaagatcaccaggacctccatgtgcacagccatcgccggctactttgacatctactttgagaagaactgccacaacagagtggtgttcagcacaggcccccagagcaccaagacccactggaagcagacagtgttcctgctggagaagcccttctctgtgaaggccggggaggccctgaagggcaaggtgacagtgcacaagagcaagaaggaccccaggagcctgactgtgaccctgaccctgaacaacagcacccagacctacggcctgcagtag

SEQ ID NO: 19092 - DNA, 1659 bp, synthetic construct
  source 1..1659: mol_type = other DNA; note = Synthetic coding sequence
atgtctgtgctgagccctggggacctgaagcccaagaggggcagcccccaccggggcagcctggacagaacagatgccagcacagacctggccatgaggtcctggcccagcgagctgggcagcaggacctgcagcaccagcgccaccaccacagcccccagcaacagcacccccatcgcccggcaccctggccgcaccaagggctacaacagtgatgacaacctgtgtgagcccagcctggagtttgaggtgcccaaccaccggcagtatgtgtcccggcccagcagcctggagagcagcaggaacaccagcagcaacagcagccccctgaacctgaagggcagcagcgagcagctgcacggccgctctgagagcttcagcagtgaagatctcatccccagccgggacctggccaccctgccccgggaggccagcaccccaggaagaaatgccctgggcagacatgagtaccccctgcccagaaatggccccctgccccaggagggcgcccagaagaggggcacagccccaccctacgtgggcgtgcggccctgcagcgccagccccagcagcgagatggtgaccctggaggagttcctggaggagagcaacagaagcagccccacccatgacacccccagctgcagagatgacctgctgagtgactacttcaggaaggccagtgaccccccagccatcggcggccagcccggccccccagccaagaaggagggcgccaagatgcccaccaactttgtggcccccaccgtgaagatggccgcccccaccagcgagggccggcccctgaagccaggccagtatgtgaagcccaacttccggctgacagaggccgaggcccctccttctgtggccccccggcaggcccagcccccccagagcctgagcctgggccggccccggcaggcccctgtgcccccagccagccacgccccagccagccgcagcgccagcctgagccgggccttcagcctggccagcgctgacctgctgcgggccagcggccctgaggcctgcaagcaggagagcccccagaagctgggcgcccctgaggccctgggcggccgggagaccggcagccacaccctgcagagccctgccccacccagcagccacagcctggcccgggagaggacccccctggtgggcaaggccggcagcagctgccagggccctggccccaggagccggcccctggacacccggcgcttcagcctggccccacccaaggaggagcggctggcccccctgcaccagagcgccacagccccagccatcgccacagctggagctggagctgctgctgctggcagcggcagcaacagccagctgctgcacttctccccagctgctgccccagctgcccggaccaagcccaaggccccacccaggtctggagaggtggccaccatcacccctgtgcgggccggcctgagcctgtctgaaggagatggagtgcccggccagggctgcagcgagggcctgcctgccaagagccctggccgcagcccagacctggccccccacctgggccgggccctggaggactgcagccggggctctgtgtccaagagcagccctgccagccctgagcccggcggggacccccagacagtgtggtatgaatatggctgtgtgtag

SEQ ID NO: 19093 - DNA, 774 bp, synthetic construct
  source 1..774: mol_type = other DNA; note = Synthetic coding sequence
atggctgacaagatggacatgagcctggatgacatcatcaagctgaacagaagccagagaggaggccggggcggcggccggggccggggccgggccggcagccagggcggccggggcggcggggcccaggccgccgcccgggtgaacagaggaggcggccccatccggaacagacctgccatcgcccggggagctgctgggggcggcggcaggaacagacctgccccctacagccggcccaagcagctgcctgacaagtggcagcacgacctgtttgacagcggctttggaggaggagctggggtggagaccggcggcaagctgctggtgagcaacctggactttggagtgtctgatgctgacatccaggagctgtttgctgagtttggcaccctgaagaaggctgctgtgcactatgacaggagcggccgcagcctgggcacagcagatgtgcactttgagaggaaggcagatgccctgaaggccatgaagcagtacaatggagtgcccctggatggccggcccatgaacatccagctggtgaccagccagattgatgcccagaggaggcctgcccagagcgtgaacagaggaggcatgaccaggaacagaggagctgggggctttggaggcggcggcggcacccggcggggcacccggggcggggcccggggccggggccgcggggccggcaggaacagcaagcagcagctgtctgctgaggagctggatgcccagctggatgcctacaatgccaggatggacaccagctag

SEQ ID NO: 19094 - DNA, 876 bp, synthetic construct
  source 1..876: mol_type = other DNA; note = Synthetic coding sequence
atgggcgtggccgcccggcccccagccctgcggcactggttcagccacagcatccccctggccatctttgccctgctgctgctgtacctgtctgtgcgcagcctgggcgcccggagcggctgcggcccccgggcccagccctgtgtgcctggagaaacagcccccttccaggtgcggcaggagagcggcaccctggaggcccctgagaggaagcagcccccctgcctgggcccccggggcatgctgggccgcatgatgaggcgcttccacgccagcctgaagccagaaggagatgtgggcctgagcccctacctggccggctggagggccctggtggagttcctgacccccctgggctctgtgtttgcctttgccacccgggaggccttcaccaaggtgacagacctggaggcccgggtgcacggcccagatgctgagcactactggagcctggtggccatggccgcctgggagaggagagctggcctgctggagcagcctggagctgccccccgggaccccaccaggagcagcggcagcaggaccctgctgctgctgcaccgggccctgcgctggagccagctgtgcctgcaccgggtggccaccggggccctgggcggcccagatgctggggtgcagtgcagtgatgcctaccgggccgccctgggcccccaccacccctggctggtgcggcagacagcccggctggccttcctggccttccctggaagaagaaggctgctggagctggcctgccctggggccacagaggccgaggcccgggccgccctggtgcgggccgccggcaccctggaggatgtgtacaacagaacccagagcctgctggccgagcggggcctgctgcagctggcctag

SEQ ID NO: 19095 - DNA, 3303 bp, synthetic construct
  source 1..3303: mol_type = other DNA; note = Synthetic coding sequence
atgggaaatgctgctggcagcgctgagcagcctgctggccctgctgcccccccacccaagcagcctgccccacccaagcagcccatgcctgctgctggggagctggaggagcgcttcaacagagccctgaactgcatgaacctgcccccagacaaggtgcagctgctgagccagtatgacaatgagaagaagtgggagctgatctgtgaccaggagcgcttccaggtgaagaaccccccagctgcctacatccagaagctgaagagctatgtggacacaggaggagtgtccaggaaggtggccgctgactggatgagcaacctgggcttcaagagaagagtgcaggagagcacccaggtgctgcgggagctggagaccagcctgcggaccaaccacatcggctgggtgcaggagttcctgaatgaagaaaatagaggcctggatgtgctgctggagtacctggcctttgcccagtgcagcgtgacctatgacatggagagcacagacaacggggccagcaacagcgagaagaacaagcccctggagcagagcgtggaggacctgagcaagggcccccccagctctgtgcccaagagccgccacctgaccatcaagctgaccccagcccacagcaggaaggccctgaggaacagccgcatcgtgtcccagaaggatgatgtgcacgtgtgcatcatgtgcctgcgggccatcatgaactaccagagcggcttcagcctggtgatgaaccacccagcctgtgtgaatgaaattgccctgagcctgaacaacaagaaccccaggaccaaggccctggtgctggagctgctggccgctgtgtgcctggtgcggggcggccatgacatcatcctggccgcctttgacaacttcaaggaggtgtgtggggagcagcacagatttgagaagctgatggagtacttcagaaatgaagacagcaacatcgacttcatggtggcctgcatgcagttcatcaacatcgtggtgcacagcgtggagaacatgaacttccgggtcttcctgcagtatgagttcacccacctgggcctggacctgtacctggagcggctgcggctgacagaaagtgacaagctgcaggtgcagatccaggcctacctggacaacatctttgatgtgggcgccctgctggaggacacagagaccaagaatgctgtgctggagcacatggaggagctgcaggagcaggtggccctgctgacagagcggctgagagatgctgaaaatgaatccatggccaagattgctgagctggagaagcagctgagccaggccaggaaggagctggagaccctgcgggagcgcttcagcgagagcacagccatgggccccagcagaagacctcctgagcctgagaaggcccccccagctgcccccacccggcccagcgccctggagctgaaggtggaggagctggaggagaagggcctcatccgcatcctgcggggccctggagatgctgtgtccattgagatcctgcctgtggccgtggccacccccagcggaggagatgcccccaccccaggagtgcccaccggcagccccagcccagacctggccccagctgctgagcccgcccctggggccgcccctcctcctcctccacccctgcccggcctgcccagcccccaggaggccccacccagcgccccaccccaggccccacccctgcccggcagccctgagcccccaccagccccacccctgcccggggacctgcccccacctcctcctcctcctcctcctcctcctggaacagatggccctgtgcccccacctcctcctcctcctcctcctcctcctgggggccccccagatgccctgggcagaagagacagcgagctgggccctggggtgaaggccaagaagcccatccagaccaagttcaggatgcccctgctgaactgggtggccctgaagcccagccagatcaccggcaccgtcttcacagagctgaatgatgagaaggtgctgcaggagctggacatgtctgactttgaggagcagttcaagaccaagagccagggccccagcctggacctgagcgccctgaagagcaaggccgcccagaaggcccccagcaaggccaccctcatcgaggccaacagagccaagaacctggccatcaccctgaggaagggcaacctgggcgctgagcgcatctgccaggccatcgaggcctatgacctgcaggccctgggcctggacttcctggagctgctgatgaggttcctgcccacagaatatgaaagaagcctcatcaccaggtttgagcgggagcagaggcccatggaggagctgtctgaagaagatcgcttcatgctgtgcttcagccgcatcccccggctgcctgagaggatgaccaccctgaccttcctgggcaacttcccagacacagcccagctgctgatgccccagctgaatgccatcatcgccgcctccatgagcatcaagagcagtgacaagctgcggcagatcctggagatcgtgctggccttcggcaactacatgaacagcagcaagagaggagctgcctacggcttccggctgcagagcctggatgccctgctggagatgaagagcacagacaggaagcagaccctgctgcactacctggtgaaggtgattgctgagaagtacccccagctgaccggcttccacagcgacctgcacttcctggacaaggccggctctgtgtccctggacagcgtgctggctgatgtgcgcagcctgcagaggggcctggagctgacccagcgggagtttgtgcggcaggatgactgcatggtgctgaaggagttcctgcgggccaacagccccaccatggacaagctgctggccgacagcaagacagcccaggaggcctttgaatctgtggtggagtactttggagagaaccccaagaccaccagccctggcctcttcttcagcctcttcagccgcttcatcaaggcctacaagaaggccgagcaggaggtggagcagtggaagaaggaggccgccgcccaggaggccggggctgacaccccaggaaaaggagagcccccagcccccaagagcccccccaaggcccggcggccccagatggacctgatcagcgagctgaagaggcggcagcagaaggagcccctcatctatgaaagtgacagagatggagccatcgaggacatcatcaccgtcatcaagacagtgcccttcaccgccaggacaggcaagaggaccagccggctgctgtgtgaggccagcctgggggaggagatgcccctgtag

SEQ ID NO: 19096 - DNA, 1839 bp, synthetic construct
  source 1..1839: mol_type = other DNA; note = Synthetic coding sequence
atggagaaccagctggccaagagcacagaggagaggaccttccagtaccaggacagcctgcccagcctgcctgtgcccagcctggaggagagcctgaagaagtacctggagagcgtgaagccctttgccaaccaggaggagtacaagaagacagaggagatcgtgcagaagttccagagcggcatcggggagaagctgcaccagaagctgctggagcgggccaagggcaagaggaactggctggaggagtggtggctgaatgtggcctacctggatgtgcgcatccccagccagctgaatgtgaactttgctggccctgctgcccactttgagcactactggccacccaaggagggcacccagctggagcggggcagcatcaccctgtggcacaacctgaactactggcagctgctgaggaaggagaaggtgcctgtgcacaaggtgggcaacacccccctggacatgaaccagttcaggatgctgttcagcacctgcaaggtgcccggcatcacccgggacagcatcatgaactacttcagaacagagagcgagggccgcagccccaaccacatcgtggtgctgtgccggggccgggcctttgtgtttgatgtgattcatgagggctgcctggtgaccccacctgagctgctgcggcagctgacctacatccacaagaagtgccacagcgagccagatggccctggcattgctgccctgaccagcgaggagaggacccgctgggccaaggcccgggagtacctgattggcctggaccctgagaacctggccctgctggagaagatccagagcagcctgctggtgtacagcatggaggacagcagcccccacgtgaccccagaggactacagcgagatcatcgccgccatcctgattggagaccccaccgtgcgctggggagacaagagctacaacctgatctccttcagcaatggagtgtttggctgcaactgtgaccacgccccctttgatgccatgatcatggtgaacatctcctactacgtggatgagaagatcttccagaatgaaggccgctggaagggcagcgagaaggtgcgggacatccccctgcctgaggagctgatcttcatcgtggatgagaaggtgctgaatgacatcaaccaggccaaggcccagtacctgcgggaggccagtgacctgcagattgctgcctatgccttcaccagctttgggaagaagctgaccaagaacaagatgctgcacccagacaccttcatccagctggccctgcagctggcctactaccgcctgcacggccaccctggctgctgctatgaaacagccatgaccaggcacttctaccacggccgcacagagaccatgaggagctgcaccgtggaggccgtgcgctggtgccagagcatgcaggaccccagcgtgaacctgcgggagcggcagcagaagatgctgcaggcctttgccaagcacaacaagatgatgaaggactgcagcgctggaaaaggatttgacagacacctgctgggcctgctgctgattgccaaggaggagggcctgcctgtgcctgagctgttcacagaccccctcttcagcaagagcggcggcggcggcaactttgtgctgagcaccagcctggtgggctacctgcgggtgcagggcgtggtggtgcccatggtgcacaacggctacggcttcttctaccacatcagagatgacagatttgtggtggcctgcagcgcctggaagagctgcccagagacagatgctgagaagctggtgcagctgaccttctgtgccttccatgacatgatccagctgatgaacagcacccacctgtag

SEQ ID NO: 19097 - DNA, 1773 bp, synthetic construct
  source 1..1773: mol_type = other DNA; note = Synthetic coding sequence
atgtctgacagccctgctggcagcaaccccaggaccccagagagcagcggcagcggcagcggcggcggcggcaagaggcctgctgtgcctgctgctgtgtccctgctgcccccagctgaccccctgcggcaggccaaccggctgcccatccgggtgctgaagatgctgagcgcccacacaggccacctgctgcaccctgagtacctgcagcccctgagcagcacccctgtgagccccatcgagctggatgccaagaagagccccctggccctgctggcccagacctgcagccagatcggcaagccagaccccccacccagcagcaagctgaacagcgtggccgccgccgccaacggcctgggcgctgagaaggaccccggccgcagcgcccctggagctgccagcgctgctgctgccctgaagcagctgggggacagccctgctgaggacaagagcagcttcaagccctacagcaaaggaagtggcggcggggacagcaggaaggacagcggcagcagctctgtgagcagcaccagcagcagcagcagcagcagccctggggacaaggccggcttccgggtgcccagcgctgcctgcccccccttcccccctcatggagcccctgtgtctgccagcagcagcagcagcagccctgggggcagcagaggaggcagcccccaccacagcgactgcaagaatggaggcggcgtgggcggcggggagctggacaagaaggaccaggagcccaagcccagccctgagcctgctgctgtgtccagaggaggcggcggggagcccggggcccatggaggagctgagagcggggccagcggcaggaagtctgagcccccatctgccctggtgggcgccggccacgtggcccctgtgagcccctacaagccaggccacagcgtcttccccctgccccccagcagcatcggctaccacggcagcatcgtgggcgcctatgccggctaccccagccagtttgtgcccggcctggaccccagcaagagcggcctggtgggcggccagctgagcggcggcctgggcctgcccccaggcaagccacccagcagcagccccctgaccggggccagcccccccagcttcctgcagggcctgtgccgggacccctactgcctgggcggctaccacggggccagccacctgggcggcagcagctgcagcacctgcagcgcccatgaccctgctggccccagcctgaaggccggcggctaccccctggtgtacccaggccaccccctgcagcctgctgccctgagcagcagcgctgcccaggccgccctgcccggccaccccctgtacacctacggcttcatgctgcagaatgagcccctgccccacagctgcaactgggtggccgccagcggcccctgtgacaagagatttgccaccagcgaggagctgctgagccacctgcggacccacacagccctgcccggggctgagaagctgctggccgcctacccaggggccagcggcctgggcagcgctgctgctgctgctgctgctgctgccagctgccacctgcacctgcccccacctgctgcccctggcagccctggcagcctgagcctgaggaacccccacaccctgggcctgagccgctaccacccctacggcaagagccacctgagcacagctgggggcctggccgtgcccagcctgcccacagctggcccctactacagcccctatgccctgtatggccagaggctggccagcgccagcgccctgggctaccagtag

SEQ ID NO: 19098 - DNA, 1020 bp, synthetic construct
  source 1..1020: mol_type = other DNA; note = Synthetic coding sequence
atgtggacagcccggggccccttcagaagagaccgctggagcagtgaagatgaggaggccgccggccccagccaggccctgagccccctgctgagtgacaccaggaagatcgtgtctgagggggagctggaccagctggcccagatccggcccctcatcttcaacttccacgagcagacagccatcaaggactgcctgaagatcctggaggagaagacagctgcctatgacatcatgcaggagttcatggccctggagctgaagaacctgcctggagagttcaacagcggcaaccagcccagcaaccgggagaagaaccgctacagagacatcctgccctatgacagcaccagggtgcccctgggcaagagcaaggactacatcaatgccagctacatcagaattgtgaactgtggggaggagtacttctacatcgccacccagggccccctgctgagcaccattgatgacttctggcagatggtgctggagaacaacagcaatgtcatcgccatgatcacccgggagattgaaggaggcatcatcaagtgctaccactactggcccatcagcctgaagaagcccctggagctgaagcacttccgggtcttcctggagaactaccagatcctgcagtacttcatcatccgcatgttccaggtggtggagaagagcacaggcaccagccacagcgtgaagcagctgcagttcaccaagtggccagaccacggcaccccagccagcgctgacagcttcatcaagtacatccgctatgccaggaagagccacctgaccggccccatggtggtgcactgcagcgctggcatcggccgcactggagtcttcctgtgtgtggatgtggtgttctgtgccatcgtgaagaactgcagcttcaacatcatggacatcgtggcccagatgagggagcagaggagcggcatggtgcagaccaaggagcagtaccacttctgctatgacatcgtgctggaggtgctgaggaagctgctgaccctggactag

SEQ ID NO: 19099 - DNA, 1917 bp, synthetic construct
  source 1..1917: mol_type = other DNA; note = Synthetic coding sequence
atgtctgccctggccggagaagatgtgtggcgctgccccggctgtggggaccacatcgcccccagccagatctggtacagaacagtgaatgagacctggcacggcagctgcttccgctgcagcgagtgccaggacagcctgaccaactggtactatgagaaggatggcaagctgtactgccccaaggactactggggcaagtttggagagttctgccacggctgcagcctgctgatgacaggccccttcatggtggccggggagttcaagtaccaccctgagtgctttgcctgcatgagctgcaaggtgatcattgaagatggagatgcctatgccctggtgcagcacgccaccctgtactgtgggaagtgccacaatgaggtggtgctggcccccatgtttgagcggctgagcacagaatctgtgcaggagcagctgccctacagcgtgaccctcatctccatgcctgccaccacagagggccggcggggcttctctgtgtctgtggagagcgcctgcagcaactatgccaccaccgtgcaggtgaaggaggtgaacaggatgcacatcagccccaacaacagaaatgccatccaccctggggaccgcatcctggagatcaatggcacccctgtgaggaccctgcgggtggaggaggtggaggatgccatcagccagaccagccagaccctgcagctgctgattgaacatgaccctgtgtcccagaggctggaccagctgcggctggaggcccggctggccccccacatgcagaatgccggccacccccacgccctgagcaccctggacaccaaggagaacctggagggcaccctgcggcggcgcagcctgcggcgcagcaacagcatcagcaagagccctggccccagcagccccaaggagcccctgctcttcagccgggacatcagccgctctgagagcctgcgctgcagcagcagctacagccagcagatcttccggccctgtgacctgattcatggagaggtgctgggcaagggcttcttcggccaggccatcaaggtgacccacaaggccaccgggaaggtgatggtgatgaaggagctgatccgctgtgatgaggagacccagaagaccttcctgacagaggtgaaggtgatgaggagcctggaccaccccaacgtgctgaagttcatcggcgtgctgtacaaggacaagaagctgaacctgctgacagagtacatcgagggcggcaccctgaaggacttcctgcgctccatggaccccttcccctggcagcagaaggtgcgctttgccaagggcatcgccagcggcatggcctacctgcacagcatgtgcatcatccaccgggacctgaacagccacaactgcctgatcaagctggacaagacagtggtggtggccgactttggcctgagccgcctcatcgtggaggagaggaagagggcccccatggagaaggccaccaccaagaagaggaccctgaggaagaatgacaggaagaagcgctacacagtggtgggcaacccctactggatggcccctgagatgctgaatggcaagagctatgatgagaccgtggacatcttctcctttggcatcgtgctgtgtgagatcatcggccaggtgtatgctgaccctgactgcctgcccaggaccctggactttggcctgaatgtgaagctgttctgggagaagtttgtgcccacagactgccccccagccttcttccccctggccgccatctgctgccgcctggagcctgagagcaggcctgccttcagcaagctggaggacagctttgaggccctgagcctgtacctgggggagctgggcatccccctgcctgctgagctggaggagctggaccacacagtgtccatgcagtatggcctgacccgggacagccccccatag

SEQ ID NO: 19100 - DNA, 606 bp, synthetic construct
  source 1..606: mol_type = other DNA; note = Synthetic coding sequence
atggctgctgccaaggacacccatgaagatcatgacaccagcacagagaacacagatgagagcaaccacgacccccagtttgagcccatcgtgtccctgcctgagcaggagatcaagaccctggaggaggatgaggaggagctgttcaagatgagggccaagctgttccgctttgcctctgaaaatgacctgcctgagtggaaggagcggggcactggagatgtgaagctgctgaagcacaaggagaagggggccatccggctgctgatgagaagagacaagaccctgaagatctgtgccaaccactacatcacccccatgatggagctgaagcccaatgccggcagtgaccgggcctgggtgtggaacacccacgccgactttgctgatgaatgtcccaagccagagctgctggccatccgcttcctgaatgcagaaaatgcccagaagttcaagaccaagtttgaagaatgtaggaaggagattgaggagcgggagaagaaggccggcagcggcaagaatgaccatgctgagaaggtggccgagaagctggaggccctgtctgtgaaggaggagaccaaggaggatgctgaggagaagcagtag

SEQ ID NO: 19101 - DNA, 2154 bp, synthetic construct
  source 1..2154: mol_type = other DNA; note = Synthetic coding sequence
atggctgctgacaagccagctgaccagggcgctgagaagcatgagggcaccggccagagcagcggcatcacagaccaggagaaggagctgagcaccaatgccttccaggccttcaccagcggcaactatgatgcctgcctgcagcacctggcctgcctgcaggacatcaacaaggatgactacaagatcatcctgaacacagctgtggccgagttcttcaagagcaaccagaccaccacagacaacctgcggcagaccctgaaccagctgaagaaccaggtgcacagcgctgtggaggagatggatggcctggatgatgtggagaacagcatgctgtactacaaccaggccgtcatcctgtaccacctgcggcagtacacagaggccatctctgtgggggagaagctgtaccagttcatcgagccctttgaggagaagtttgcccaggccgtgtgcttcctgctggtggacctgtacatcctgacctaccaggccgagaaggccctgcacctgctggccgtgctggagaagatgatcagccagggcaacaacaacaagaatggcaagaatgagaccggcaacaacaacaacaaggatggcagcaaccacaaggccgagagcggggccctgattgaagctgccaagagcaagatccaccagtacaaggtgcgggcctacatccagatgaagagcctgaaggcctgcaagcgggagatcaagtctgtgatgaacacagctggcaacagcgcccccagcctcttcctgaagagcaactttgagtacctgcggggcaactacaggaaggctgtgaagctgctgaacagcagcaacattgctgagcaccctggcttcatgaagacaggagaatgtctgcgctgcatgttctggaacaacctgggctgcatccactttgccatgagcaagcacaacctgggcatcttctacttcaagaaggccctgcaggagaatgacaacgtgtgtgcccagctgtctgctggcagcacagatcctgggaagaagttcagcggccggcccatgtgcaccctgctgaccaacaagagatatgagctgctgtacaactgtggcatccagctgctgcacatcggccggcccctggccgcctttgagtgcctgattgaagctgtgcaggtgtaccacgccaacccccggctgtggctgcggctggccgagtgctgcatcgccgccaacaagggcaccagcgagcaggagaccaagggcctgcccagcaagaagggcatcgtgcagagcatcgtgggccagggctaccacaggaagatcgtgctggccagccagagcatccagaacacagtgtacaatgatggccagagcagcgccatccctgtggcctccatggagtttgctgccatctgcctgagaaatgccctgctgctgctgcctgaggagcagcaggaccccaagcaggagaatggagccaagaacagcaaccagctgggcggcaacacagagagcagcgagagcagcgagacctgccgctgcagcatcctggcctgcagcgcctacgtggccctggccctgggggacaacctgatggccctgaaccacgccgacaagctgctgcagcagcccaagctgagcggcagcctgaagttcctgggccacctgtatgctgctgaggccctgatcagcctggaccgcatcagtgatgccatcacccacctgaacccagaaaatgtgacagatgtgtccctgggcatcagcagcaatgagcaggaccagggcagtgacaagggggagaatgaggccatggagagcagcggcaagagggccccccagtgctaccccagctctgtgaacagcgccaggacagtgatgctgttcaacctgggcagcgcctactgcctgcggagtgaatatgacaaggccaggaagtgcctgcaccaggccgcctccatgatccaccccaaggaggtgcccccagaggccatcctgctggccgtgtacctggagctgcagaatggaaacacccagctggccctgcagatcatcaagaggaaccagctgctgcctgctgtgaagacccacagcgaggtgaggaagaagcctgtgttccagcctgtgcaccccatccagcccatccagatgcctgccttcaccaccgtgcagaggaagtag

SEQ ID NO: 19102 - DNA, 1488 bp, synthetic construct
  source 1..1488: mol_type = other DNA; note = Synthetic coding sequence
atggaggccctgctggagggcatccagaacagaggacatggaggcggcttcctgaccagctgtgaggccgagctgcaggagctgatgaagcagattgacatcatggtggcccacaagaagtctgagtgggagggccgcacccacgccctggagacctgcctgaagatccgggagcaggagctgaagagcctgcggagccagctggatgtgacccacaaggaggtgggcatgctgcaccagcaggtggaggagcacgagaagatcaagcaggagatgaccatggagtacaagcaggagctgaagaagctgcacgaggagctgtgcatcctgaagaggagctatgagaagctgcagaagaagcagatgagggagttccggggcaacaccaagaaccaccgggaggacagaagtgaaattgagcggctgacagccaagattgaggagttccggcagaagagcctggactgggagaagcagaggctcatctaccagcagcaggtgagcagcctggaggcccagaggaaggccctggccgagcagagcgagatcatccaggcccagctggtgaacaggaagcagaagctggagagcgtggagctgagcagccagagcgagatccagcacctgagcagcaagctggagcgggccaatgacaccatctgtgccaatgagctggagattgagcggctgaccatgagggtgaatgacctggtgggcacctccatgacagtgctgcaggagcagcagcagaaggaggagaagctgcgggagagcgagaagctgctggaggccctgcaggaggagaagcgggagctgaaggccgccctgcagagccaggagaacctgatccacgaggcccgcatccagaaggagaagctgcaggagaaggtgaaggccaccaacacccagcacgctgtggaggccatcagcctggagagcgtgtctgccacctgcaagcagctgagccaggagctgatggagaagtatgaggagctgaagaggatggaggcccacaacaatgagtacaaggccgagatcaagaagctgaaggagcagatcctgcagggcgagcagagctacagcagcgccctggagggcatgaagatggagatcagccacctgacccaggagctgcaccagagggacatcaccatcgccagcaccaagggcagcagcagtgacatggagaagaggctgcgggcagagatgcagaaggccgaggacaaggctgtggagcacaaggagatcctggaccagctggagagcctgaagctggagaacagacacctgtctgagatggtgatgaagctggagctgggcctgcatgaatgttccctgcctgtgagccccctgggcagcatcgccacccgcttcctggaggaggaggagctgcggagccaccacatcctggagcggctggatgcccacatcgaggagctgaagcgggagagcgagaagacagtgcggcagttcaccgccctgaagtag

SEQ ID NO: 19103 - DNA, 1962 bp, synthetic construct
  source 1..1962: mol_type = other DNA; note = Synthetic coding sequence
atgatccccccccaggaggccagcgccaggagaagagaaattgaggacaagctgaagcaggaggaggagaccctgtccttcatccgggacagcctggagaagagtgaccagctgaccaagaacatggtgtccatcctgagcagctttgagagccggctgatgaagctggagaacagcatcatccctgtgcacaagcagacagagaacctgcagaggctgcaggagaatgtggagaagaccctgagctgcctggaccacgtgatctcctactaccacgtggccagtgacacagagaagatcatccgggagggccccaccggccgcctggaggagtacctgggctccatggccaagatccagaaggctgtggagtacttccaggacaacagcccagacagccctgagctgaacaaggtgaagctgctgtttgagcggggcaaggaggccctggagagcgagttccgcagcctgatgaccaggcacagcaaggtggtgtcccctgtgctgatcctggacctgatctctggagatgatgacctggaggcccaggaggatgtgaccctggagcacctgcctgagagcgtgctgcaggacgtcatccgcatcagccgctggctggtggagtatggaagaaaccaggacttcatgaatgtgtactaccagatccgcagcagccagctggacaggagcatcaagggcctgaaggagcacttccacaagagcagcagcagcagtggagtgccctacagccctgccatccccaacaagaggaaggacacccccaccaagaagcctgtgaagaggcctggaagagatgacatgctggatgtggagacagatgcctacatccactgtgtgtctgcctttgtgaagctggcccagagcgagtaccagctgctggccgacatcatccctgagcaccaccagaagaagacctttgacagcctcatccaggatgccctggatggcctgatgctggagggagaaaatattgtgtctgctgccaggaaggccatcgtgagacatgacttcagcacagtgctgactgtgttccccatcctgcggcacctgaagcagaccaagccagagtttgaccaggtgctgcagggcacagctgccagcaccaagaacaagctgcccggcctcatcacctccatggagaccatcggggccaaggccctggaggactttgctgacaacatcaagaatgaccctgacaaggagtacaacatgcccaaggatggcaccgtgcatgagctgaccagcaatgccatcctcttcctgcagcagctgctggacttccaggagacagctggggccatgctggccagccaggagaccagcagcagcgccaccagctacagcagcgagttcagcaagaggctgctgagcacctacatctgcaaggtgctgggcaacctgcagctgaacctgctgagcaagagcaaggtgtatgaggaccctgccctgagcgccatcttcctgcacaacaactacaactacatcctgaagagcctggagaagtctgagctgatccagctggtggccgtgacccagaagacagctgagaggagctaccgggagcacatcgagcagcagatccagacctaccagaggtcctggctgaaggtgacagactacatcgccgagaagaacctgcccgtcttccagcccggggtgaagctgcgggacaaggagcggcagatcatcaaggagcgcttcaagggcttcaatgatggcctggaggagctgtgcaagatccagaaggcctgggccatcccagacacagagcagagggaccgcatccggcaggcccagaagaccatcgtgaaggagacctacggggccttcctgcagaagtttggatctgtgcccttcaccaagaaccctgagaagtacatcaagtatggagtggagcaggtgggggacatgattgaccggctgtttgacaccagcgcctag

SEQ ID NO: 19104 - DNA, 735 bp, synthetic construct
  source 1..735: mol_type = other DNA; note = Synthetic coding sequence
atggagctgaccatcttcatcctgcggctggccatctacatcctgaccttccccctgtacctgctgaacttcctgggcctgtggagctggatctgcaagaagtggttcccctacttcctggtgcgcttcaccgtcatctacaatgagcagatggccagcaagaagcgggagctgttcagcaacctgcaggagtttgctggccccagcggcaagctgagcctgctggaggtgggctgcggcactggagccaacttcaagttctacccacctggctgccgggtgacctgcatcgaccccaaccccaactttgagaagttcctgatcaagagcattgctgaaaatagacacctgcagtttgaaagatttgtggtggccgccggggagaacatgcaccaggtggctgatggctctgtggatgtggtggtgtgcaccctggtgctgtgcagcgtgaagaaccaggagcgcatcctgcgggaggtgtgccgggtgctgcggcctgggggcgccttctacttcatggagcacgtggccgcagaatgttccacctggaactacttctggcagcaggtgctggaccctgcctggcacctgctgtttgatggctgcaacctgacccgggagagctggaaggccctggagcgggccagcttcagcaagctgaagctgcagcacatccaggcccccctgtcctgggagctggtgcggccccacatctacggctatgctgtgaagtag

SEQ ID NO: 19105 - DNA, 3522 bp, synthetic construct
  source 1..3522: mol_type = other DNA; note = Synthetic coding sequence
atggctgtggagaccctgagcccagactgggagtttgacagagtggatgatggcagccagaagatccacgccgaggtgcagctgaagaactacggcaagttcctggaggagtacaccagccagctgcggagaattgaagatgccctggatgacagcattggagatgtgtgggacttcaacctggaccccatcgccctgaagctgctgccctatgagcagagcagcctgctggagctgatcaagacagagaacaaggtgctgaacaaggtgatcaccgtgtatgctgccctgtgctgtgagatcaagaagctgaagtatgaggccgagaccaagttctacaacggcctgctcttctatggagagggcgccacagatgcctccatggtggagggggactgccagatccagatgggccgcttcatctccttcctgcaggagctgagctgctttgtgacccgctgctatgaggtggtgatgaatgtggtgcaccagctggccgccctgtacatcagcaacaagatcgcccccaagatcatcgagaccaccggggtgcacttccagaccatgtatgagcacctgggggagctgctgactgtgctgctgaccctggatgagatcatcgacaaccacatcaccctgaaggaccactggaccatgtacaagaggctgctgaagtctgtgcaccacaaccccagcaagtttggcatccaggaggagaagctgaagccctttgagaagttcctgctgaagctggagggccagctgctggatggcatgatcttccaggcctgcatcgagcagcagtttgacagcctgaatggaggagtgtctgtgtccaagaacagcacctttgctgaggagtttgcccacagcatccgcagcatctttgccaacgtggaggccaagctgggggagcccagcgagattgaccagagggacaagtatgtgggcatctgtggcctgtttgtgctgcacttccagatcttccgcaccatcgacaagaagttctacaagagcctgctggacatctgcaagaaggtgcctgccatcaccctgacagccaacatcatctggttcccagacaacttcctgatccagaagatcccagctgctgccaagctgctggacaggaagagcctgcaggccatcaagatccaccgggacaccttcctgcagcagaaggcccagagcctgaccaaggatgtgcagagctactacgtgtttgtgtcctcctggatgatgaagatggagagcatcctgagcaaggagcagaggatggacaagtttgctgaggacctgaccaaccgctgcaatgtgttcatccagggcttcctgtatgcctacagcatcagcaccatcatcaagaccaccatgaacctgtacatgtccatgcagaagcccatgaccaagacctctgtgaaggccctgtgccgcctggtggagctgctgaaggccatcgagcacatgttctaccgccgctccatggtggtggccgacagcgtgagccacatcacccagcacctgcagcaccaggccctgcacagcatctctgtggccaagaagagggtcatcagtgacaagaagtacagcgagcagaggctggatgtgctgagcgccctggtgctggccgagaacaccctgaatggccccagcaccaagcagaggaggctcatcgtgtccctggccctgtctgtgggcacccagatgaagaccttcaaggatgaggagctgttccccctgcaggtggtgatgaagaagctggacctgatcagcgagctgcgggagcgggtgcagacccagtgtgactgctgcttcctgtactggcacagagctgtgttccccatctacctggatgatgtgtatgaaaatgctgtggatgctgcccggctgcactacatgttttctgccctgcgggactgtgtgcctgccatgatgcacgcccggcacctggagagctatgagatcctgctggactgctatgacaaggagatcatggagatcctgaatgagcacctgctggacaagctgtgcaaggagattgagaaggacctgcggctgtctgtgcacacccacctgaagctggatgacaggaaccccttcaaggtgggcatgaaggacctggccctcttcttcagcctgaaccccatccgcttcttcaaccgcttcatcgacatccgggcctacgtgacccactacctggacaagaccttctacaacctgaccaccgtggccctgcatgactgggccacctacagcgagatgaggaacctggccacccagagatatggcctggtgatgacagaggcccacctgcccagccagaccctggagcagggcctggatgtgctggagatcatgaggaacatccacatctttgtgagccgctacctgtacaacctgaacaaccagatcttcatcgagaggaccagcaacaacaagcacctgaacaccatcaacatccgccacatcgccaacagcatccgcacccacggcaccggcatcatgaacaccaccgtgaacttcacctaccagttcctgaagaagaagttctacatcttcagccagttcatgtatgatgagcacatcaagagccgcctcatcaaggacatccgcttcttccgggagatcaaggaccagaatgaccacaagtacccctttgacagagctgagaagttcaacagaggcatcaggaagctgggcgtgaccccagagggccagagctacctggaccagttccggcagctgatcagccagattggaaatgccatgggctacgtgaggatgatccgcagcggcggcctgcactgcagcagcaatgccatccgctttgtgcctgacctggaggacatcgtgaactttgaggagctggtgaaggaggagggcctggccgaggagaccctgaaggccgcccggcacctggacagcgtgctgagtgaccacaccaggaacagcgctgagggcacagagtacttcaagatgctggtggatgtgtttgcccctgagttcagaagacccaagaacatccacctgaggaacttctacatcatcgtgccccccctgaccctgaactttgtggagcacagcatcagctgcaaggagaagctgaacaagaagaacaagattggagctgccttcacagatgatggctttgccatgggcgtggcctacatcctgaagctgctggaccagtaccgggagtttgacagcctgcactggttccagagcgtgcgggagaagtacctgaaggagatccgggctgtggccaagcagcagaatgtgcagagcgccagccaggatgagaagctgctgcagaccatgaacctgacccagaagaggctggatgtgtacctgcaggagtttgagctgctgtacttcagcctgagcagcgcccgcatcttcttccgggctgacaagacagctgctgaggagaaccaggagaagaaggagaaggaggaggagaccaagaccagcaatggagacctgagtgacagcacagtgtctgctgaccctgtggtgaagtag

SEQ ID NO: 19106 - DNA, 972 bp, synthetic construct
  source 1..972: mol_type = other DNA; note = Synthetic coding sequence
atgctgcgctggacagtgcacctggagggcggccccaggagagtgaaccacgccgctgtggccgtgggccaccgggtgtacagctttggaggctactgcagcggggaggactatgagaccctgcggcagattgatgtgcacatcttcaatgctgacacccacaagtggttcaccccccgggtgtctggcaccgtgcctggggccagagatggccacagcgcctgtgtgctgggcaagatcatgtacatctttggaggctatgagcagcaggccgactgcttcagcaatgacatccacaagctggacaccagcaccatgacctggaccctcatctgcaccaagggcagccctgcccgctggagggacttccacagcgccaccatgctgggcagccacatgtatgtgtttggaggccgggctgacagatttggccccttccacagcaacaatgagatctactgcaaccgcatccgggtgtttgacaccaggacagaggcctggctggactgcccccccacccctgtgctgcctgagggccgccgcagccacagcgccttcggctacaatggagagctgtacatctttggaggctacaatgcccggctgaacagacacttccatgacctgtggaagttcaaccctgtgtccttcacctggaagaagattgagcccaagggcaagggcccctgcccccggcggcggcagtgctgctgcatcgtgggggacaagatcgtgctgtttggaggcaccagccccagccctgaggagggcctgggagatgaatttgacctgattgaccacagcgacctgcacatcctggacttcagccccagcctgaagaccctgtgcaagctggccgtcatccagtacaacctggaccagagctgcctgccccatgacatccgctgggagctgaatgccatgaccaccaacagcaacatcagccggcccatcgtgagcagccacggctag

SEQ ID NO: 19107 - DNA, 2517 bp, synthetic construct
  source 1..2517: mol_type = other DNA; note = Synthetic coding sequence
atgaccggggctgagattgagcccagcgcccaggccaagccagagaagaaggccggggaggaggtgattgctggccctgagagagaaaatgatgtgcccctggtggtgcggcccaaggtgaggacccaggccaccaccggggcccggcccaagacagagaccaagtctgtgcctgctgcccggcccaagacagaggcccaggccatgtctggggcccggcccaagacagaggtgcaggtgatgggcggggcccggcccaagacagaggcccagggcatcaccggggcccggcccaagacagatgcccgggctgtgggcggggcccggagcaagacagatgccaaggccatccctggggcccggcccaaggatgaggcccaggcctgggcccagagcgagtttggaacagaggccgtgtcccaggccgagggcgtgtcccagaccaatgctgtggcctggcccctggccacagctgagagcggctctgtgaccaagagcaagggcctgtccatggaccgggagctggtgaatgtggatgctgagaccttccctggcacccagggccagaagggcatccagccctggtttggacctggagaggagaccaacatgggctcctggtgctacagccggccccgggcccgggaggaggccagcaatgaaagtggcttctggagcgcagatgagaccagcacagccagcagcttctggacaggagaggagacctctgtgcgctcctggccccgggaggagagcaacaccaggagccgccaccgggccaagcaccagaccaaccccaggagccggcccaggagcaagcaggaggcctacgtggacagctggagcggctctgaagatgaggccagcaaccccttctccttctgggtgggggagaacaccaacaacctcttccggccccgggtgcgggaggaggccaacatccgcagcaagctgcggaccaaccgggaggactgctttgagagcgagagtgaagatgagttctacaagcagagctgggtgctgcccggggaggaggccaacagccgcttccgccaccgggacaaggaggaccccaacacagccctgaagctgcgggcccagaaggatgtggacagcgacagagtgaagcaggagcccaggtttgaggaggaggtgatcatcggctcctggttctgggccgagaaggaggccagcctggagggcggggccagcgccatctgtgagagcgagcctggaacagaggagggcgccatcggcggcagcgcctactgggccgaggagaagagcagcctgggcgctgtggcccgggaggaggccaagccagagagcgaggaggaggccatcttcggctcctggttctgggacagagatgaggcctgctttgacctgaacccctgccctgtgtacaaggtgtctgaccgcttcagagatgctgctgaggagctgaatgccagcagccggccccagacctgggatgaggtgacagtggagttcaagccaggcctcttccacggcgtgggcttccgcagcaccagccccttcggcatccctgaggaggccagcgagatgctggaggccaagcccaagaacctggagctgagccctgagggggaggagcaggagagcctgctgcagcctgaccagcccagccctgagttcaccttccagtatgaccccagctacagatctgtgcgggagatccgggagcacctgcgggcccgggagagcgctgagagcgagagctggagctgcagctgcatccagtgtgagctgaagattggcagcgaggagtttgaggagttcctgctgctgatggacaagatccgggaccccttcatccacgagatcagcaagatcgccatgggcatgaggtctgccagccagttcacccgggacttcatccgggacagcggcgtggtgtccctgattgagaccctgctgaactaccccagcagccgggtgaggaccagcttcctggagaacatgatccacatggccccaccctaccccaacctgaacatgattgagaccttcatctgccaggtgtgtgaggagaccctggcccacagcgtggacagcctggagcagctgaccggcatccgcatgctgcggcacctgaccatgaccatcgactaccacaccctcatcgccaactacatgagcggcttcctgagcctgctgaccacagccaatgcccggaccaagttccacgtgctgaagatgctgctgaacctgtctgaaaatcctgctgtggccaagaagctgttcagcgccaaggccctgagcatctttgtgggcctcttcaacatcgaggagaccaatgacaacatccagatcgtcatcaagatgttccagaacatcagcaacatcatcaagagcggcaagatgagcctgattgatgatgacttcagcctggagcccctcatcagcgccttccgggagtttgaggagctggccaagcagctgcaggcccagattgacaaccagaatgaccctgaggtgggccagcagagctag

SEQ ID NO: 19108 - DNA, 2649 bp, synthetic construct
  source 1..2649: mol_type = other DNA; note = Synthetic coding sequence
atgcctggccgggcccggacccgggcccggggccgggccaggagaagagagagctaccagcaggaggcccctgggggcccccgggcccctggcagcgccaccacccaggagcccccccagctgcagagcaccccccggcccctgcaggaggaggtgcctgtggtgcggcccctgcagccccgggccgcccggggcggggccggcggcggggcccagagccagggcgtgaaggagcccggccctgaggccggcctgcacacagcccccctgcaggagaggagaattggaggagtcttccaggacctggtggtgaacacccggcaggacatgaagcacgtgaaggacagcaagacaggcagcgagggcaccgtggtgcagctgctggccaaccacttccgggtcatcagccggccccagtgggtggcctacaagtacaacgtggactacaagccagacattgaagatggcaacctgcggaccatcctgctggaccagcacaggaggaagtttggagagcggcacatctttgatggcaacagcctgctgctgagccggcccctgaaggagcggcgggtggagtggctgagcaccaccaaggacaagaacatcgtgaagatcaccgtggagttcagcaaggagctgacccccaccagcccagactgcctgcgctactacaacatcctcttccggaggaccttcaagctgctggactttgagcaggtgggcaggaactactacaccaagaagaaggccatccagctgtacagacatggcaccagcctggagatctggctgggctacgtgacctctgtgctgcagtatgaaaattccatcaccctgtgtgctgatgtgagccacaagctgctgagaattgaaacagcctatgacttcatcaagaggaccagcgcccaggcccagacaggcaacatccgggaggaggtgaccaacaagctgattggcagcatcgtgctgaccaagtacaacaacaagacctacagagtggatgacatcgactggaagcagaaccctgaggacaccttcaacaagagtgatggcagcaagatcacctacatcgactactaccggcagcagcacaaggagatcgtgacagtgaagaagcagcccctgctggtgtcccagggccgctggaagaagggcctgaccggcacccagcgggagcccatcctgctgatcccccagctgtgccacatgacaggcctgacagatgagatctgcaaggactacagcatcgtgaaggagctggccaagcacacccggctgagccccaggagaagacaccacaccctgaaggagttcatcaacaccctgcaggacaacaagaaggtgcgggagctgctgcagctgtgggacctgaagtttgacaccaacttcctgtctgtgcccggccgggtgctgaagaatgccaacatcgtgcagggccgcaggatggtgaaggccaacagccagggcgactggagccgggagatccgggagctgcccctgctgaatgccatgcccctgcacagctggctgatcctgtacagccgcagcagccaccgggaggccatgagcctgaagggccacctgcagagcgtgacagcccccatgggcatcaccatgaagccagctgagatgattgaggtggatggagatgccaacagctacatcgacaccctgaggaagtacacccggcccaccctgcagatgggcatgagctgcctgctggtgttcaaggtgatctgcatcctgcccaatgatgacaagagaagatatgacagcatcaagcgctacctgtgcaccaagtgccccatccccagccagtgtgtggtgaagaagaccctggagaaggtgcaggcccggaccatcgtgaccaagatcgcccagcagatgaactgcaagatgggcggggccctgtggaaggtggagacagatgtgcagaggaccatgtttgtgggcatcgactgcttccatgacatcgtgaaccggcagaagagcattgctggctttgtggccagcaccaatgctgagctgaccaagtggtacagccagtgtgtgatccagaagacaggagaggagctggtgaaggagctggagatctgcctgaaggccgccctggatgtgtggtgcaagaatgaaagctccatgccccacagcgtcatcgtgtacagagatggagtgggagatggccagctgcaggccctgctggaccacgaggccaagaagatgagcacctacctgaagaccatcagccccaacaacttcaccctggccttcatcgtggtgaagaagaggatcaacacccgcttcttcctgaagcacggcagcaacttccagaaccccccacctggcaccgtgattgatgtggagctgaccagaaatgagtggtatgacttcttcatcgtgtcccagagcgtgcaggacggcaccgtgacccccacccactacaacgtcatctatgacaccatcggcctgagcccagacacagtgcagaggctgacctactgcctgtgccacatgtactacaacctgcccggcatcatccgggtgcctgccccctgccactacgcccacaagctggcctacctggtgggccagagcatccaccaggagcccaacagaagcctgagcaccaggctcttctacctgtag

SEQ ID NO: 19109 - DNA, 1917 bp, synthetic construct
  source 1..1917: mol_type = other DNA; note = Synthetic coding sequence
atgaaccggcaggtgtgcaagaagagcttcagcggccgcagccagggcttcagcggccgctctgctgtggtgtctggcagcagcaggatgagctgtgtggcccggagcggcggggccggcggcggggcctgtggcttccgcagcggggccggcagctttggcagccgcagcctgtacaacctgggcagcaacaagagcatcagcatctctgtggccgccggcagcagccgggccggcggctttggaggcggccgcagcagctgtggctttgctgggggctacggcggcggctttggaggcagctatggaggcggctttggaggcggccggggcgtgggcagcggctttggaggagctgggggctttggaggagctgggggctttggaggccctggggtgtttggaggccctggcagctttggaggccctgggggcttcggccctgggggcttccctgggggcatccaggaggtgattgtgaaccagagcctgctgcagcccctgaatgtggagattgacccccagatcggccaggtgaaggcccaggagcgggagcagatcaagaccctgaacaacaagtttgccagcttcatcgacaaggtgcgcttcctggagcagcagaacaaggtgctggagaccaagtgggagctgctgcagcagcagaccactggaagtggccccagcagcctggagccctgctttgagagctacatctccttcctgtgcaagcagctggacagcctgctgggggagcggggcaacctggagggggagctgaagtccatgcaggacctggtggaggacttcaagaagaagtatgaagatgagatcaacaagaggacagctgctgaaaatgaatttgtgggcctgaagaaggatgtggatgctgccttcatgaacaaggtggagctgcaggccaaggtggacagcctgacagatgaggtgtccttcctgcggaccctgtatgagatggagctgagccagatgcagagccacgccagtgacacctctgtggtgctgtccatggacaacaaccgctgcctggacctgggcagcatcatcgccgaggtgcgggcccagtatgaggagatcgcccagaggagcaagtctgaggccgaggccctgtaccagaccaagctgggggagctgcagaccacagctggaagacatggagatgacctgaggaacaccaagtctgagatcatggagctgaacaggatgatccagaggctgcgggcagaaattgaaaatgtgaagaagcagaatgccaacctgcagacagccatcgccgaggccgagcagagaggagagatggccctgaaggatgccaatgccaagctgcaggacctgcagacagccctgcagaaggccaaggatgacctggcccggctgctgcgggactaccaggagctgatgaatgtgaagctggccctggatgtggagatcgccacctacaggaagctgctggagggggaggagtgcaggatgtctggagagtgccagagcgctgtgtgcatctctgtggtgtccaatgtgaccagcaccagcggcagcagcggcagcagccggggcgtgtttggaggagtgtctggcagcggcagcggcggctacaagggcggcagcagcagcagcagcagcagcggctatggagtgtctgggggcagcggcagcggctatggaggagtgagcagcggcagcactggaggccggggcagcagcggcagctaccagagcagcagcagcggcagccggctgggcggggccggcagcatctctgtgagccacagcggcatgggcagcagcagcggcagcatccagaccagcggcggcagcggctacaagagcggcggcggcggcagcaccagcatccgcttcagccagaccaccagcagcagccagcacagcagcaccaagtag

SEQ ID NO: 19110 - DNA, 1080 bp, synthetic construct
  source 1..1080: mol_type = other DNA; note = Synthetic coding sequence
atggccgagcccttcctgtctgagtaccagcaccagccccagaccagcaactgcacaggagctgctgctgtgcaggaggagctgaaccctgagaggcctcctggagctgaggagcgggtgcctgaggaggacagccgctggcagagccgggccttcccccagctgggcggccggcccggccctgagggggagggcagcctggagagccagcccccacccctgcagacccaggcctgcccagagagcagctgcctgcgggagggggagaagggccagaatggagatgacagcagcgctggaggagacttccccccacctgctgaggtggagcccaccccagaggccgagctgctggcccagccctgccatgattctgaggccagcaagctgggcgccccagctgctggaggagaggaggagtggggccagcagcagaggcagctgggcaagaagaagcacagaagaagacccagcaagaagaagaggcactggaagccctactacaagctgacctgggaggagaagaagaagtttgatgagaagcagagcctgcgggccagccgcatccgggcagagatgtttgccaagggccagcctgtggccccctacaacaccacccagttcctgatggatgaccatgaccaggaggagccagacctgaagacaggcctgtacagcaagagagctgctgccaagagtgatgacaccagtgatgatgacttcatggaggagggcggggaggaggatggcggcagtgatggcatgggaggagatggcagcgagttcctgcagagggacttcagcgagacctatgagcgctaccacacagagagcctgcagaacatgagcaagcaggagctgatcaaggagtacctggagctggagaagtgcctgagcaggatggaggatgagaacaaccggctgcggctggagagcaagaggctgggcggagatgatgcccgggtgcgggagctggagctggagctggaccggctgcgggcagagaacctgcagctgctgacagaaaatgagctgcaccggcagcaggagcgggcccccctgagcaagtttggagactag

SEQ ID NO: 19111 - DNA, 2889 bp, synthetic construct
  source 1..2889: mol_type = other DNA; note = Synthetic coding sequence
atggatgagcaggccctgctgggcctgaaccccaatgctgacagcgacttccggcagagggccctggcctactttgagcagctgaagatcagcccagatgcctggcaggtgtgtgccgaggccctggcccagaggacctacagtgatgaccacgtgaagttcttctgcttccaggtgctggagcaccaggtgaagtacaagtacagcgagctgaccaccgtgcagcagcagctgatccgggagaccctcatctcctggctgcaggcccagatgctgaacccccagcctgagaagaccttcatccggaacaaggccgcccaggtgtttgccctgctgtttgtgacagagtacctgaccaagtggcccaagttcttctttgacatcctgtctgtggtggacctgaacccccggggcgtggacctgtacctgcgcatcctgatggccattgattctgagctggtggacagagatgtggtgcacaccagcgaggaggcccggaggaacaccctcatcaaggacaccatgagggagcagtgcatccccaacctggtggagagctggtaccagatcctgcagaactaccagttcaccaacagcgaggtgacctgccagtgcctggaggtggtgggcgcctacgtgtcctggattgacctgagcctgattgccaatgaccgcttcatcaacatgctgctgggccacatgagcattgaggtgctgcgggaggaggcctgtgactgcctgtttgaggtggtgaacaagggcatggaccctgtggacaagatgaagctggtggagagcctgtgccaggtgctgcagagcgctggcttcttcagcattgaccaggaggaggatgtggacttcctggcccgcttcagcaagctggtgaatggcatgggccagagcctgattgtgtcctggagcaagctgatcaagaatggagacatcaagaatgcccaggaggccctgcaggccatcgagaccaaggtggccctgatgctgcagctgctgattcatgaagatgatgacatcagcagcaacatcatcggcttctgctatgactacctgcacatcctgaagcagctgactgtgctgagtgaccagcagaaggccaacgtggaggccatcatgctggccgtgatgaagaagctgacctatgatgaggagtacaactttgaaaatgaaggagaagatgaggccatgtttgtggagtacaggaagcagctgaagctgctgctggaccggctggcccaggtgtccccagagctgctgctggcctctgtgcggcgggtcttcagcagcaccctgcagaactggcagaccacccgcttcatggaggtggaggtggccatccggctgctgtacatgctggccgaggccctgcctgtgagccacggggcccacttctctggagatgtgtccaaggccagcgccctgcaggacatgatgaggaccctggtgaccagcggcgtgagcagctaccagcacacctctgtgaccctggagttctttgaaacagtggtgcgctatgagaagttcttcaccgtggagccccagcacatcccctgtgtgctgatggccttcctggaccaccggggcctgcggcacagcagcgccaaggtgcgcagcaggacagcctacctgttcagcagatttgtgaagagcctgaacaagcagatgaaccccttcatcgaggacatcctgaaccgcatccaggacctgctggagctgagccccccagaaaatggccaccagagcctgctgagcagtgatgaccagctgttcatctatgaaacagctggggtgctgattgtgaacagcgagtacccagctgagaggaagcaggccctgatgaggaacctgctgacccccctgatggagaagttcaagatcctgctggagaagctgatgctggcccaggatgaggagcggcaggccagcctggccgactgcctgaaccacgctgtgggctttgccagcaggaccagcaaggccttcagcaacaagcagacagtgaagcagtgtggctgcagcgaggtgtacctggactgcctgcagaccttcctgcctgccctgagctgccccctgcagaaggacatcctgcggtctggagtgaggaccttcctgcacaggatgatcatctgcctggaggaggaggtgctgcccttcatccccagcgccagcgagcacatgctgaaggactgtgaggccaaggacctgcaggagttcatccccctcatcaaccagatcacagccaagttcaagatccaggtgagccccttcctgcagcagatgttcatgcccctgctgcacgccatctttgaggtgctgctgcggcctgctgaggagaatgaccagagcgctgccctggagaagcagatgctgcggcgcagctactttgccttcctgcagacagtgacaggcagcggcatgtctgaggtgattgccaaccagggcgcagaaaatgtggagcgggtgctggtgaccgtcatccagggcgctgtggagtacccagaccccatcgcccagaagacctgcttcatcatcctgagcaagctggtggagctgtggggcggcaaggatggccctgtgggctttgctgactttgtgtacaagcacatcgtgcctgcctgcttcctggcccccctgaagcagacctttgacctggctgatgcccagacagtgctggccctgtctgaatgtgctgtgaccctgaagaccatccacctgaagaggggcccagaatgtgtgcagtacctgcagcaggagtacctgcccagcctgcaggtggcccctgagatcatccaggagttctgccaggccctgcagcagccagatgccaaggtgttcaagaactacctgaaggtgttcttccagagggccaagccctag

SEQ ID NO: 19112 - DNA, 2976 bp, synthetic construct
  source 1..2976: mol_type = other DNA; note = Synthetic coding sequence
atggccgagagcttcttcagtgactttggcctgctgtggtacctgaaggagctgaggaaggaggagttctggaagttcaaggagctgctgaagcagcccctggagaagtttgagctgaagcccatcccctgggccgagctgaagaaggccagcaaagaagatgtggccaagctgctggacaagcactacccaggcaagcaggcctgggaggtgaccctgaacctcttcctgcagatcaacaggaaggacctgtggaccaaggcccaggaggagatgaggaacaagctgaacccctacaggaagcacatgaaggagaccttccagctgatctgggagaaggagacctgcctgcacgtgcctgagcacttctacaaggagaccatgaagaatgagtacaaggagctgaatgatgcctacacagctgctgcccggcggcacacagtggtgctggagggcccagatggcatcggcaagaccaccctgctgaggaaggtgatgctggactgggccgagggcaacctgtggaaggaccgcttcacctttgtgttcttcctgaatgtgtgtgagatgaatggaattgctgagaccagcctgctggagctgctgagccgggactggccagagagcagcgagaagattgaggacatcttcagccagcctgagcgcatcctcttcatcatggatggctttgagcagctgaagttcaacctgcagctgaaggctgacctgagtgatgactggaggcagaggcagcccatgcccatcatcctgagcagcctgctgcagaagaagatgctgcctgagagcagcctgctgattgccctgggcaagctggccatgcagaagcactacttcatgctgcggcaccccaagctgatcaagctgctgggcttcagcgagagcgagaagaagagctacttctcctacttctttggagagaagagcaaggccctgaaggtgttcaactttgtgcgggacaatggccccctcttcatcctgtgccacaaccccttcacctgctggctggtgtgcacctgtgtgaagcagaggctggagagaggagaggacctggagatcaacagccagaacaccacctacctgtatgccagcttcctgaccaccgtcttcaaggccggcagccagagcttcccccccaaggtgaacagagcccggctgaagagcctgtgtgccctggccgctgagggcatctggacctacacctttgtgttcagccacggggacctgcggagaaatggcctgtctgagagcgagggcgtgatgtgggtgggcatgaggctgctgcagaggagaggagactgctttgccttcatgcacctgtgcatccaggagttctgtgccgccatgttctacctgctgaagaggcccaaggatgaccccaacccagccatcggcagcatcacccagctggtgcgggcctctgtggtgcagccccagaccctgctgacccaggtgggcatcttcatgtttggcatcagcacagaggagatcgtgtccatgctggagaccagctttggcttccccctgagcaaggacctgaagcaggagatcacccagtgcctggagagcctgagccagtgtgaggccgaccgggaggccatcgccttccaggagctgttcatcggcctgtttgagacccaggagaaggagtttgtgaccaaggtgatgaacttctttgaggaggtgttcatctacatcggcaacatcgagcacctggtgattgccagcttctgcctgaagcactgccagcacctgaccaccctgaggatgtgtgtggagaacatcttcccagatgacagcggctgcatcagtgactacaatgagaagctggtgtactggagggagctgtgcagcatgttcatcaccaacaagaacttccagatcctggacatggagaacaccagcctggatgaccccagcctggccatcctgtgcaaggccctggcccagcctgtgtgcaagctgaggaagctgatcttcacctctgtgtactttggacatgattctgagctgttcaaggctgtgctgcacaacccccacctgaagctgctgagcctgtatggcaccagcctgagccagagcgacatccgccacctgtgtgagaccctgaagcaccccatgtgcaagattgaggagctgatcctgggcaaatgtgacatcagcagcgaggtgtgtgaggacatcgcctctgtgctggcctgcaacagcaagctgaagcacctgagcctggtggagaaccccctgagagatgagggcatgaccctgctgtgtgaggccctgaagcacagccactgtgccctggagcggctgatgctgatgtactgctgcctgacctctgtgtcctgtgacagcatcagcgaggtgctgctgtgcagcaagagcctgagcctgctggacctgggcagcaatgccctggaggacaacggggtggccagcctgtgtgccgccctgaagcaccctggctgcagcatccgggagctgtggctgatgggctgcttcctgaccagtgacagctgcaaggacattgctgctgtgctgatctgcaatggcaagctgaagaccctgaagctgggccacaatgagatcggggacacaggagtgcggcagctgtgtgccgccctgcagcacccccactgcaagctggagtgcctgggcctgcagacctgccccatcacccgggcctgctgtgatgacattgctgctgccctgattgcctgcaagaccctgcggagcctgaacctggactggatcgccctggatgctgatgctgtggtggtgctgtgtgaggccctgagccacccagactgtgccctgcagatgctgggcctgcacaagagcggctttgatgaggagacccagaagatcctgatgtctgtggaggagaagatcccccacctgaccatcagccacggcccctggattgatgaggagtacaagatccggggcgtgctgctgtag

SEQ ID NO: 19113 - DNA, 534 bp, synthetic construct
  source 1..534: mol_type = other DNA; note = Synthetic coding sequence
atggctgctgtgaaggccagcaccagcaaggccacccggccctggtacagccaccctgtgtatgcccgctactggcagcactaccaccaggccatggcctggatgcagagccaccacaatgcctacaggaaggctgtggagagctgcttcaacctgccctggtacctgcccagcgccctgctgccccagagcagctatgacaatgaggccgcctacccccagagcttctatgaccaccacgtggcctggcaggactacccctgcagcagcagccacttccgccgcagcggccagcacccccgctacagcagccgcatccaggccagcaccaaggaggaccaggccctgagcaaggaggaggagatggagacagaaagtgatgctgaggtggagtgtgacctgagcaacatggagatcacagaggagctgcggcagtactttgctgagacagagcggcaccgggaggagcggcggcggcagcagcagctggatgctgagcggctggacagctatgtgaatgctgaccatgactag

SEQ ID NO: 19114 - DNA, 1503 bp, synthetic construct
  source 1..1503: mol_type = other DNA; note = Synthetic coding sequence
atggtgggccgcagctgtggggtggccacccagaggcagggcggcggccagaggcccaccaacctggccctgaccctgagcagcagccctgcccacagcacagccctgccctggctgccccccaggagcctgcagctgctgagcggccacagcgtgcctgcccagcccaccccccacctgcccagcgcctgtggcggccccaccagggtgaccctgggggaggagcgggcctggaggagccacggcagcaatgccggcggccacacctgcctgcccaggagaacagctggggccggcagcctgaccccaggaggagagcggggcggcaacaatgccggccacacagtggtggtggatggcaaggagtatgacttccacctgctgcccagcggcatcatcaacaccaaggctgtgtccttcatcggaaatggagtggtgatccacctgcccggcctgtttgaggaggccgagaagaatgagaagaagggcctgaaggactgggagaagaggctcatcatcagtgaccgggcccacctggtgtttgacttccaccaggccgtggatggcctgcaggaggtgcagaggcaggcccaggagggcaagaacatcggcaccaccaagaagggcatcggccccacctacagcagcaaggccgccaggacaggcctgcgcatctgtgacctgctgagtgactttgatgagttcagcagccgcttcaagaacctggcccaccagcaccagagcatgttccccaccctggagattgatattgagggccagctgaagaggctgaagggctttgctgagcgcatccggcccatggtgagagatggagtgtacttcatgtatgaggccctgcacggcccccccaagaagatcctggtggagggcgccaatgctgccctgctggacatcgactttggcacctacccctttgtgaccagcagcaactgcaccgtgggcggcgtgtgcaccggcctgggcatccccccccagaacattggagatgtgtatggagtggtgaaggcctacaccaccagggtgggcatcggggccttccccacagagcagatcaatgaaattggaggcctgctgcagacccggggccacgagtggggcgtgaccaccggcaggaagaggcgctgtggctggctggacctgatgatcctgcgctatgcccacatggtgaatggcttcaccgccctggccctgaccaagctggacatcctggatgtgctgggggaggtgaaggtgggcgtgtcctacaagctgaatggcaagaggatcccctacttccctgccaaccaggagatgctgcagaaggtggaggtggagtatgagaccctgcccggctggaaggctgacaccactggagcccggcgctgggaggacctgcccccccaggcccagaactacatccgctttgtggagaaccacgtgggcgtggccgtgaagtgggtgggcgtgggcaagagccgggagagcatgatccagctgttctag

SEQ ID NO: 19115 - DNA, 468 bp, synthetic construct
  source 1..468: mol_type = other DNA; note = Synthetic coding sequence
atggtgaacagctgctgcggctctgtgtgcagcgaccagggctgcggccaggacctgtgccaggagacctgctgctgccccagctgctgccagaccacctgctgcaggaccacctgctaccggcccagctacagcgtgtcctgctgctgccggccccagtgctgccagagcgtgtgctgccagcccacctgctgccggcccagctgctgcgtgcccacctgctgccaccccagctgctgcatcagcagctgctgccggcccagctgctgcgtgagcagctgctgcaagccccagtgctgccagagcgtgtgctgccagcccaactgctgccggcccagctgctgccggccctgctgctgcctgcggcctgtgtgtggccgggtgtcctgccacaccacctgctacagacctgcctgtgtgatcagcacctgccccaggcctgtgtgctgtgccagcagctgctgctag

SEQ ID NO: 19116 - DNA, 2124 bp, synthetic construct
  source 1..2124: mol_type = other DNA; note = Synthetic coding sequence
atggctgctgaggccctggccgctgaggccgtggccagccggctggagcggcaggaggaggacatccgctggctgtggagcgaggtggagcggctgagagatgagcagctgaatgccccctacagctgccaggccgagggcccctgcctgacccgggaggtggcccagctgcgggcagagaactgtgacctgcggcaccggctgtgcagcctgcggctgtgcctggccgaggagaggagccggcaggccaccctggagagcgctgagctggaggccgcccaggaggccggggcccagcccccacccagccagagccaggacaaggacatgaagaagaagaagatgaaggagagcgaggccgacagcgaggtgaagcaccagcccatcttcatcaaggagcggctgaagctgtttgagatcctgaagaaggaccaccagctgctgctggccatctacggcaagaagggggacaccagcaacatcatcaccgtgcgggtggctgatggccagacagtgcagggcgaggtgtggaagaccaccccctaccaggtggccgctgagatcagccaggagctggccgagagcaccgtcatcgccaaggtgaatggagagctgtgggacctggaccggcccctggagggggacagcagcctggagctgctgacctttgacaatgagaaggtgaacacagccaccaccaccgtgtaccgctgtggccccctgattgacctgtgcaagggcccccacgtgcgccacacaggcaagatcaagaccatcaagatcttcaagaacagcagcacctactgggagggcaaccctgagatggagaccctgcagaggatctacggcatctccttcccagacaacaagatgatgagggactgggagaagttccaggaggaggccaagaacagagaccacaggaagattggcaaggagcaggagctgttcttcttccatgacctgagccctggcagctgcttcttcctgcccaggggggccttcatctacaacaccctgacagacttcatccgggaggagtaccacaagagggacttcacagaggtgctgagccccaacatgtacaacagcaagctgtgggaggccagcggccactggcagcactacagcgagaacatgttcacctttgaaattgagaaggacacctttgccctgaagcccatgaactgccccggccactgcctgatgtttgcccaccggcccaggtcctggagggagatgcccatccgctttgctgactttggagtgctgcacagaaatgagctgagcggcaccctgagcggcctgaccagggtgcggcgcttccagcaggatgatgcccacatcttctgcaccgtggagcagatcgaggaggagatcaagggctgcctgcagttcctgcagagcgtgtacagcaccttcggcttctccttccagctgaacctgagcaccaggcctgagaacttcctgggggagattgagatgtggaatgaagctgagaagcagctgcagaacagcctgatggactttggagagccctggaagatgaaccctggagatggagccttctacggccccaagattgacatcaagatcaaggatgccatcggccgctaccaccagtgtgccaccatccagctggacttccagctgcccatccgcttcaacctgacctacgtgtccaaggatggagatgacaagaagaggcctgtgatcatccaccgggccatcctgggctctgtggagaggatgattgccatcctgtctgagaactacggcggcaagtggcccttctggctgagcccccggcaggtgatggtgattcctgtgggccccacctgtgagaagtatgccctgcaggtgtcctctgagttctttgaggagggcttcatggctgatgtggacctggaccacagctgcaccctgaacaagaagatcagaaatgcccagctggcccagtacaacttcatcctggtggtgggggagaaggagaagattgacaatgctgtgaatgtgaggacccgggacaacaagatccacggggagatcctggtgaccagcgccatcgacaagctgaagaacctgaggaagaccaggaccctgaatgctgaggaggccttctag

SEQ ID NO: 19117 - DNA, 816 bp, synthetic construct
  source 1..816: mol_type = other DNA; note = Synthetic coding sequence
atggccggcctggaggtgctgtttgccagcgctgccccagccatcacctgccggcaggatgccctggtgtgcttcctgcactgggaggtggtgacccacggctacttcggcctgggcgtgggggaccagcccggccccaatgacaagaagtctgagctgctgcctgctggctggaacaacaacaaggacctgtatgtgctgcgctatgagtacaaggatggcagcaggaagctgctggtgaaggccatcaccgtggagagctccatgatcctgaatgtgctggagtatggcagccagcaggtggccgacctgaccctgaacctggatgactacattgatgctgagcacctgggggacttccacaggacctacaagaacagcgaggagctgcggagccgcatcgtgtctggcatcatcacccccatccacgagcagtgggagaaggccaacgtgagcagcccccaccgggagttccccccagccacagcccgggaggtggaccccctgcgcatccccccccaccacccccacaccagccggcagcccccctggtgtgaccccctgggcccctttgtggtgggcggggaggacctggaccccttcggcccccggcggggcggcatgattgtggaccccctgcggagcggcttcccccgggccctgattgaccccagcagcggcctgcccaaccggctgcccccaggagctgtgcccccaggggccaggtttgaccccttcggccccatcggcaccagccccccaggccccaacccagaccacctgcccccacctggctatgatgacatgtacctgtag

SEQ ID NO: 19118 - DNA, 474 bp, synthetic construct
  source 1..474: mol_type = other DNA; note = Synthetic coding sequence
atggccaccccacccaagagaagagctgtggaggccactggagagaaggtgctgcgctatgagaccttcatcagtgatgtgctgcagagggacctgaggaaggtgctggaccaccgggacaaggtgtatgagcagctggccaagtacctgcagctgagaaatgtcatcgagcggctgcaggaggccaagcacagcgagctgtacatgcaggtggacctgggctgcaacttctttgtggacacagtggtgcctgacaccagccgcatctacgtggccctgggctacggcttcttcctggagctgaccctggccgaggccctgaagttcatcgacaggaagagcagcctgctgacagagctgagcaacagcctgaccaaggacagcatgaacatcaaggcccacatccacatgctgctggagggcctgcgggagctgcagggcctgcagaacttccctgagaagccccaccactag

SEQ ID NO: 19119 - DNA, 543 bp, synthetic construct
  source 1..543: mol_type = other DNA; note = Synthetic coding sequence
atgcaggccgagggccggggcaccggcggcagcactggagatgctgatggccctgggggccctggcatcccagatggccctggaggaaatgccggcggccctggagaggccggggccaccggcggccggggccccaggggggccggggccgcccgggccagcggccctgggggcggggccccccggggcccccatggaggagctgccagcggcctgaatggctgctgccgctgtggggcccggggccctgagagccggctgctggagttctacctggccatgccctttgccacccccatggaggccgagctggcccggcgcagcctggcccaggatgccccacccctgcctgtgcctggggtgctgctgaaggagttcaccgtgtctggcaacatcctgaccatccggctgacagctgctgaccaccggcagctgcagctgagcatcagcagctgcctgcagcagctgagcctgctgatgtggatcacccagtgcttcctgcccgtcttcctggcccagccccccagcggccagaggaggtag

SEQ ID NO: 19120 - DNA, 621 bp, synthetic construct
  source 1..621: mol_type = other DNA; note = Synthetic coding sequence
atgacagcctctgtgctgcggagcatcagcctggccctgcggcccaccagcggcctgctgggcacctggcagacccagctgcgggagacccaccagagggccagcctgctgtccttctgggagctgatccccatgaggtctgagcccctgaggaagaagaagaaggtggaccccaagaaggaccaggaggccaaggagcggctgaagaggaagatcaggaagctggagaaggccacccaggagctgatccccatcgaggacttcatcacccccctgaagttcctggacaaggcccgggagcggccccaggtggagctgacctttgaggagacagaaagaagagccctgctgctgaagaagtggagcctgtacaagcagcaggagaggaagatggagcgggacaccatccgggccatgctggaggcccagcaggaggccctggaggagctgcagctggagagccccaagctgcatgctgaggccatcaagagggaccccaacctcttcccctttgagaaggagggcccccactacaccccacccatccccaactaccagcccccagagggccgctacaatgacatcaccaaggtgtacacccaggtggagttcaagaggtag

SEQ ID NO: 19121 - DNA, 6963 bp, synthetic construct
  source 1..6963: mol_type = other DNA; note = Synthetic coding sequence
atggccgagcccagcagcgcccggcggcctgtgcccctcatcgagagcgagctgtacttcctgattgcccgctacctgtctgctggcccctgccggcgggccgcccaggtgctggtgcaggagctggagcagtaccagctgctgcccaagaggctggactgggagggcaatgagcacaacagaagctatgaggagctggtgctgagcaacaagcacgtggccccagaccacctgctgcagatctgccagagaattggccccatgctggacaaggagatcccccccagcatcagccgggtgaccagcctgctgggcgccggccggcagagcctgctgaggacagccaaggactgccgccacacagtgtggaagggcagcgcctttgctgccctgcaccggggccggcccccagagatgcctgtgaactacggcagcccccccaacctggtggagatccaccggggcaagcagctgaccggctgcagcaccttcagcacagccttccctggcaccatgtaccagcacatcaagatgcaccggcgcatcctgggccacctgtctgctgtgtactgtgtggcctttgacagaacaggccaccgcatcttcaccggcagtgatgactgcctggtgaagatctggagcacccacaacggccgcctgctgagcaccctgcggggccacagcgctgagatcagtgacatggctgtgaactatgagaacaccatgattgctgctggcagctgtgacaagatcatccgggtgtggtgcctgcggacctgtgcccctgtggccgtgctgcagggccacacaggcagcatcaccagcctgcagttcagccccatggccaagggcagccagcgctacatggtgtccactggagcagatggcaccgtgtgcttctggcagtgggacctggagagcctgaagttcagcccccggcccctgaagttcacagagaagcccaggcctggggtgcagatgctgtgcagcagcttctctgtgggcggcatgttcctggccaccggcagcacagaccacgtgatccgcatgtacttcctgggctttgaggcccctgagaagattgctgagctggagagccacacagacaaggtggacagcatccagttctgcaacaatggagaccgcttcctgagcggcagcagagatggaacagcccgcatctggaggtttgagcagctggagtggaggagcatcctgctggacatggccacccgcatcagcggggacctgagcagcgaggaggagcgcttcatgaagcccaaggtgaccatgattgcctggaaccagaatgacagcatcgtggtgacagctgtgaatgaccacgtgctgaaggtgtggaacagctacacaggccagctgctgcacaacctgatgggccacgcagatgaggtgtttgtgctggagacccacccctttgacagccgcatcatgctgtctgctggccatgatggcagcatcttcatctgggacatcaccaagggcaccaagatgaagcactacttcaacatgattgagggccagggccacggggctgtgtttgactgcaagttcagccaggacggccagcactttgcctgcacagacagccacggccacctgctgatctttggatttggctgcagcaagccctatgagaagatcccagaccagatgttcttccacacagactaccggcccctcatccgggacagcaacaactacgtgctggatgagcagacccagcaggccccccacctgatgcccccacccttcctggtggatgtggatggcaacccccaccccaccaagtaccagaggctggtgcccggccgggagaacagcgcagatgagcacctgatcccccagctgggctacgtggccaccagtgatggagaggtgattgagcagatcatcagcctgcagaccaatgacaatgatgagaggagccctgagagcagcatcctggatggcatgatccggcagctgcagcagcagcaggaccagaggatgggcgctgaccaggacaccatcccccggggcctgagcaatggagaggagaccccaagaagaggcttccggcggctgagcctggacatccagagcccccccaacatcggcctgcggcgcagcggccaggtggagggcgtgcggcagatgcaccagaatgcccccaggagccagatcgccacagagcgggacctgcaggcctggaagagaagagtggtggtgcctgaggtgcccctgggcatcttcaggaagctggaggacttccggctggagaagggggaggaggagaggaacctgtacatcattggaaggaagaggaagaccctgcagctgagccacaagagtgacagcgtggtgctggtgtcccagagccggcagaggacctgcaggaggaagtaccccaactatggaagaagaaacagatcctggagggagctgagcagtggaaatgaaagcagcagctctgtgagacatgagaccagctgtgaccagagcgagggcagcggcagcagcgaggaggatgagtggaggagtgacaggaagtctgagagctacagcgagagcagcagtgacagcagcagccgctacagcgactggacagcagatgctggcatcaacctgcagccccccctgcggaccagctgcagaagacgcatcacccgcttctgcagcagcagtgaagatgagatcagcacagagaacctgagcccccccaagagaagaaggaagaggaagaaggagaacaagcccaagaaggagaacctgcggaggatgaccccagctgagctggccaacatggagcacctgtatgagttccacccccctgtgtggatcacagacaccaccctgaggaagagcccctttgtgccccagatgggagatgaagtcatctacttccggcagggccacgaggcctacatcgaggccgtgagaagaaacaacatctatgagctgaaccccaacaaggagccctggaggaagatggacctgcgggaccaggagctggtgaagatcgtgggcatccgctatgaggtgggcccccccaccctgtgctgcctgaagctggccttcattgatcctgccaccgggaagctgatggacaagagcttcagcatccgctaccatgacatgccagatgtgattgacttcctggtgctgcggcagttctatgatgaggcccggcagaggaactggcagagctgtgaccgcttccgcagcatcattgatgatgcctggtggtttggaacagtgctgagccaggagccctaccagccccagtacccagacagccacttccagtgctacatcgtgcgctgggacaacacagaaattgagaagctgagcccctgggacatggagcccatcccagacaacgtggaccccccagaggagctgggcgccagcatctctgtgaccacagatgagctggagaagctgctgtacaagccccaggccggggagtggggccagaagagcagagatgaagaatgtgaccgcatcatctctggaattgaccagctgctgaacctggacattgctgctgcctttgctggccctgtggacctgtgcacctaccccaagtactgcaccgtggtggcctaccccacagacctgtacaccatccgcatgaggctggtgaaccgcttctaccgccgcctgagcgccctggtgtgggaggtgcgctacatcgagcacaatgcccggaccttcaatgaacctgagagcgtcatcgcccggagcgccaagaagatcacagaccagctgctgaagttcatcaagaaccagcactgcaccaacatcagcgagctgagcaacaccagtgaaaatgatgagcagaatgctgaggacctggatgacagcgacctgcccaagaccagcagcggcagaagaagagtgcatgatggcaagaagagcatccgggccaccaactacgtggagagcaactggaagaagcagtgcaaggagctggtgaacctgatcttccagtgtgaagattctgagcccttccggcagcctgtggacctggtggagtacccagactacagagacatcatcgacacccccatggactttggcaccgtgcgggagaccctggatgctggcaactatgacagccccctggagttctgcaaggacatccgcctcatcttcagcaatgccaaggcctacacccccaacaagaggagcaagatctacagcatgaccctgcggctgagcgccctgtttgaggagaagatgaagaagatcagcagtgacttcaagattggccagaagttcaatgagaagctgcggcgcagccagcgcttcaagcagaggcagaactgcaagggggacagccagcccaacaagagcatccggaacctgaagcccaagaggctgaagagccagaccaagatcatccctgagctggtgggcagccccacccagagcaccagcagcaggacagcctacctgggcacccacaagaccagcgctggcatcagcagcggcgtgaccagcggggacagcagtgacagcgctgagagcagcgagaggaggaagaggaaccggcccatcaccaacggcagcaccctgtctgagagcgaggtggaggacagcctggccaccagcctgagcagcagcgccagcagcagcagcgaggagagcaaggagagcagccgggcccgggagagcagcagccgcagcggcctgagccgcagcagcaacctgcgggtgaccaggaccagggctgcccagaggaagacaggccctgtgtccctggccaacggctgcggcaggaaggccaccaggaagagggtgtacctgagtgacagcgacaacaacagcctggagaccggggagatcctgaaggcccgggccggcaacaacaggaaggtgctgaggaaatgtgccgctgtggccgccaacaagatcaagctgatgtctgatgtggaggagaacagcagcagcgagagcgtgtgcagcggcaggaagctgccccacagaaatgccagcgctgtggccaggaagaagctgctgcacaacagtgaagatgagcagagcctgaagtcagaaattgaggaggaggagctgaaggatgagaaccagctgctgcctgtgagcagcagccacacagcccagagcaatgtggatgaaagtgagaacagagacagcgagagcgagagtgacctgcgggtggccaggaagaactggcacgccaacggctacaagagccacaccccagcccccagcaagaccaagttcctgaagattgagagcagcgaggaggacagcaagagccatgacagcgaccacgcctgcaacagaacagctggccccagcacctctgtgcagaagctgaaggccgagagcatcagcgaggaggccgacagcgagcccggccgcagcggcggcaggaagtacaacaccttccacaagaatgccagcttcttcaagaagaccaagatcctgagtgacagtgaagattctgagagcgaggagcaggacagagaagatggcaagtgccacaagatggagatgaaccccatcagcggcaacctgaactgtgaccccatcgccatgagccagtgcagcagtgaccacggctgtgaaacagacctggacagtgatgatgacaagattgagaagcccaacaacttcatgaaggacagcgccagccaggacaatggcctgagcaggaagatcagcaggaagagggtgtgcagcagtgacagcgacagcagcctgcaggtggtgaagaagagcagcaaggccaggacaggcctgctgcgcatcacccggcgctgtgccgccacagctgccaacaagatcaagctgatgtctgatgtggaggatgtgtccctggagaatgtgcacaccaggagcaagaatggaaggaagaagcccctgcacctggcctgcaccacagccaagaagaagctgagtgactgtgagggctctgtgcactgtgaggtgcccagcgagcagtatgcctgtgagggcaagcccccagaccctgattctgagggcagcaccaaggtgctgagccaggccctgaatggagacagcgacagcgaggacatgctgaacagcgagcacaagcaccgccacaccaacatccacaagattgatgcccccagcaagaggaagagcagctctgtgaccagcagcggggaggacagcaagagccacatccctggcagcgagacagacaggaccttcagcagcgagagcaccctggcccagaaggccacagctgagaacaactttgaggtggagctgaactacggcctgcggcgctggaatggaagaaggctgcggacctacggcaaggcccccttcagcaagaccaaggtgattcatgacagccaggagacagctgagaaggaggtgaagaggaagaggagccaccctgagctggagaatgtgaagatcagcgagaccaccggcaacagcaagttccggccagacaccagcagcaagagcagtgacctgggctctgtgacagaaagtgacatcgactgcacagacaacaccaagaccaagaggaggaagaccaagggcaaggccaaggtggtgaggaaggagtttgtgccccgggaccgggagcccaacaccaaggtgaggacctgcatgcacaaccagaaggatgctgtgcagatgcccagcgagaccctgaaggccaagatggtgcctgagaaggtgccccggcgctgtgccaccgtggccgccaacaagatcaagatcatgagcaacctgaaggagaccatcagcggcccagaaaatgtgtggatcaggaagagcagcaggaagctgccccacagaaatgccagcgctgctgccaagaagaagctgctgaatgtgtacaaggaggatgacaccaccatcaacagcgagagcgagaaggagctggaggacatcaacaggaagatgctgttcctgcggggcttccgctcctggaaggaaaatgcccagtag

SEQ ID NO: 19122 - DNA, 2961 bp, synthetic construct
  source 1..2961: mol_type = other DNA; note = Synthetic coding sequence
atggccgagagcttcttcagtgactttggcctgctgtggtacctgaaggagctgaggaaggaggagttctggaagttcaaggagctgctgaagcagcccctggagaagtttgagctgaagcccatcccctgggccgagctgaagaaggccagcaaagaagatgtggccaagctgctggacaagcactacccaggcaagcaggcctgggaggtgaccctgaacctcttcctgcagatcaacaggaaggacctgtggaccaaggcccaggaggagatgaggaacaagctgaacccctacaggaagcacatgaaggagaccttccagctgatctgggagaaggagacctgcctgcacgtgcctgagcacttctacaaggagaccatgaagaatgagtacaaggagctgaatgatgcctacacagctgctgcccggcggcacacagtggtgctggagggcccagatggcatcggcaagaccaccctgctgaggaaggtgatgctggactgggccgagggcaacctgtggaaggaccgcttcacctttgtgttcttcctgaatgtgtgtgagatgaatggaattgctgagaccagcctgctggagctgctgagccgggactggccagagagcagcgagaagattgaggacatcttcagccagcctgagcgcatcctcttcatcatggatggctttgagcagctgaagttcaacctgcagctgaaggctgacctgagtgatgactggaggcagaggcagcccatgcccatcatcctgagcagcctgctgcagaagaagatgctgcctgagagcagcctgctgattgccctgggcaagctggccatgcagaagcactacttcatgctgcggcaccccaagctgatcaagctgctgggcttcagcgagagcgagaagaagagctacttctcctacttctttggagagaagagcaaggccctgaaggtgttcaactttgtgcgggacaatggccccctcttcatcctgtgccacaaccccttcacctgctggctggtgtgcacctgtgtgaagcagaggctggagagaggagaggacctggagatcaacagccagaacaccacctacctgtatgccagcttcctgaccaccgtcttcaaggccggcagccagagcttcccccccaaggtgaacagagcccggctgaagagcctgtgtgccctggccgctgagggcatctggacctacacctttgtgttcagccacggggacctgcggagaaatggcctgtctgagagcgagggcgtgatgtgggtgggcatgaggctgctgcagaggagaggagactgctttgccttcatgcacctgtgcatccaggagttctgtgccgccatgttctacctgctgaagaggcccaaggatgaccccaacccagccatcggcagcatcacccagctggtgcgggcctctgtggtgcagccccagaccctgctgacccaggtgggcatcttcatgtttggcatcagcacagaggagatcgtgtccatgctggagaccagctttggcttccccctgagcaaggacctgaagcaggagatcacccagtgcctggagagcctgagccagtgtgaggccgaccgggaggccatcgccttccaggagctgttcatcggcctgtttgagacccaggagaaggagtttgtgaccaaggtgatgaacttctttgaggaggtgttcatctacatcggcaacatcgagcacctggtgattgccagcttctgcctgaagcactgccagcacctgaccaccctgaggatgtgtgtggagaacatcttcccagatgacagcggctgcatcagtgactacaatgagaagctggtgtactggagggagctgtgcagcatgttcatcaccaacaagaacttccagatcctggacatggagaacaccagcctggatgaccccagcctggccatcctgtgcaaggccctggcccagcctgtgtgcaagctgaggaagctgatcttcacctctgtgtactttggacatgattctgagctgttcaaggctgtgctgcacaacccccacctgaagctgctgagcctgtatggcaccagcctgagccagagcgacatccgccacctgtgtgagaccctgaagcaccccatgtgcaagattgaggagctgatcctgggcaaatgtgacatcagcagcgaggtgtgtgaggacatcgcctctgtgctggcctgcaacagcaagctgaagcacctgagcctggtggagaaccccctgagagatgagggcatgaccctgctgtgtgaggccctgaagcacagccactgtgccctggagcggctgatgctgatgtactgctgcctgacctctgtgtcctgtgacagcatcagcgaggtgctgctgtgcagcaagagcctgagcctgctggacctgggcagcaatgccctggaggacaacggggtggccagcctgtgtgccgccctgaagcaccctggctgcagcatccgggagctgtggctgatgggctgcttcctgaccagtgacagctgcaaggacattgctgctgtgctgatctgcaatggcaagctgaagaccctgaagctgggccacaatgagatcggggacacaggagtgcggcagctgtgtgccgccctgcagcacccccactgcaagctggagtgcctgggcctgcagacctgccccatcacccgggcctgctgtgatgacattgctgctgccctgattgcctgcaagaccctgcggagcctgaacctggactggatcgccctggatgctgatgctgtggtggtgctgtgtgaggccctgagccacccagactgtgccctgcagatgctgggcaactgccagaagagcctgggggacacagtggcccctggagagaaccactgcagcatcaagcacctgctgctgaccctgcccatcaacatgcagaggcagctgcggctgcagaagtag

SEQ ID NO: 19123 - DNA, 3039 bp, synthetic construct
  source 1..3039: mol_type = other DNA; note = Synthetic coding sequence
atggatgccctggatgccagcaagctgctggatgaggagctgtacagccggcagctgtatgtgctgggcagccctgccatgcagaggatccagggcgcccgggtgctggtgtctggcctgcagggcctgggcgctgaggtggccaagaacctggtgctgatgggcgtgggcagcctgaccctgcatgacccccaccccacctgctggagcgacctggccgcccagttcctgctgtctgagcaggacctggagaggagcagagctgaggccagccaggagctgctggcccagctgaacagagctgtgcaggtggtggtgcacactggagacatcacagaggacctgctgctggacttccaggtggtggtgctgacagctgccaagctggaggagcagctgaaggtgggcaccctgtgccacaagcacggcgtgtgcttcctggccgctgacacccggggcctggtgggccagctgttctgtgactttggagaggacttcaccgtgcaggaccccacagaggccgagcccctgacagctgccatccagcacatcagccagggcagccctggcatcctgaccctgaggaagggggccaacacccactacttcagagatggagacctggtgaccttcagcggcatcgagggcatggtggagctgaatgactgtgaccccaggagcatccacgtgcgggaggatggcagcctggagatcggggacaccaccaccttcagccgctacctgcggggcggggccatcacagaggtgaagaggcccaagacagtgcgccacaagagcctggacacagccctgctgcagccccacgtggtggcccagagcagccaggaggtgcaccacgcccactgcctgcaccaggccttctgtgccctgcacaagttccagcacctgcacggccggcccccccagccctgggaccctgtggatgctgagaccgtggtgggcctggcccgggacctggagcccctgaagaggacagaggaggagcccctggaggagcccctggatgaggccctggtgaggacagtggccctgagcagcgctggggtgctgagccccatggtggccatgctgggcgctgtggccgcccaggaggtgctgaaggccatcagcaggaagttcatgcccctggaccagtggctgtactttgatgccctggactgcctgcctgaagatggagagctgctgcccagccctgaggactgtgccctgcggggcagccgctatgatggccagattgctgtgtttggagctggcttccaggagaagctgcggcggcagcactacctgctggtgggcgctggggccatcggctgtgagctgctgaaggtgtttgccctggtgggcctgggcgccggcaacagcggcggcctgactgtggtggacatggaccacatcgagaggagcaacctgagccggcagttcctgttccgcagccaggatgtgggccggcccaaggccgaggtggccgctgctgctgcccggggcctgaacccagacctgcaggtgatccccctgacctaccccctggaccccaccacagagcacatctacggggacaacttcttcagccgggtggatggagtggccgccgccctggacagcttccaggccaggagatatgtggccgcccgctgcacccactacctgaagcccctgctggaggccggcaccagcggcacctggggcagcgccaccgtcttcatgcctcatgtgacagaggcctaccgggccccagccagcgctgctgcctctgaagatgccccctaccctgtgtgcaccgtgcgctacttccccagcacagctgagcacaccctgcagtgggcccggcatgaatttgaggagctgttccggctgtctgctgagaccatcaaccaccaccagcaggcccacaccagcctggccgacatggatgagccccagaccctgaccctgctgaagcctgtgctgggcgtgctgcgggtgcggccccagaactggcaggactgtgtggcctgggccctgggccactggaagctgtgcttccactacggcatcaagcagctgctgcggcacttcccccccaacaaggtgctggaggatggcacccccttctggagcggccccaagcagtgcccccagcccctggagtttgacaccaaccaggacacccacctgctgtatgtgctggccgccgccaacctgtatgcccagatgcacggcctgcccggcagccaggactggacagccctgcgggagctgctgaagctgctgccccagcctgacccccagcagatggcccccatctttgccagcaacctggagctggccagcgccagcgctgagtttggacctgagcagcagaaggagctgaacaaggccctggaggtgtggagcgtgggcccccccctgaagcccctgatgtttgagaaggatgatgacagcaacttccacgtggactttgtggtggccgccgccagcctgcgctgccagaactacggcatcccccctgtgaacagagcccagagcaagagaattgtgggccagatcatcccagccatcgccaccaccacagctgctgtggccggcctgctgggcctggagctgtacaaggtggtgtctggcccccggcccaggtctgccttccgccacagctacctgcacctggccgagaactacctgatccgctacatgccctttgccccagccatccagaccttccaccacctgaagtggacctcctgggaccggctgaaggtgcctgctggccagcctgagaggaccctggagagcctgctggcccacctgcaggagcagcacggcctgcgggtgcgcatcctgctgcacggcagcgccctgctgtatgctgctggctggagccctgagaagcaggcccagcacctgcccctgcgggtgacagagctggtgcagcagctgaccggccaggccccagcccctggccagagggtgctggtgctggagctgagctgtgaaggagatgatgaggacacagccttcccccccctgcactatgagctgtag

SEQ ID NO: 19124 - DNA, 360 bp, synthetic construct
  source 1..360: mol_type = other DNA; note = Synthetic coding sequence
atggtgaggaccaagacctggaccctgaagaagcactttgtgggctaccccaccaacagcgactttgagctgaagacagctgagctgccccccctgaagaatggagaggtgctgctggaggccctcttcctgactgtggacccctacatgagggtggtggagagcaagaatgtggccctgcccaagggcaccatcgtgctggccagccctggctggaccacccacagcatcagtgatggcaaggacctggagaagctgctgacagagtggccagacaccatccccctgagcctggccctgggcaccgtgggcatgcctggcctgacagcctacttcggcctgctggagatctgtggctag

SEQ ID NO: 19125 - DNA, 1797 bp, synthetic construct
  source 1..1797: mol_type = other DNA; note = Synthetic coding sequence
atgggcggctgcttcagcaagcccaagcctgtggagctgaagattgaggtggtgctgcctgagaaggagcggggcaaggaggagctgagcgccagcggcaagggcagcccccgggcctaccagggcaatggaacagcccggcacttccacacagaggagcggctgagcaccccccacccctaccccagcccccaggactgtgtggaggccgctgtgtgccacgtgaaggacctggagaatggccagatgagggaggtggagctgggctggggcaaggtgctgctggtgaaggacaatggagagttccacgccctgggccacaagtgcccccactacggggcccccctggtgaagggcgtgctgagccggggccgggtgcgctgcccctggcatggagcctgcttcaacatcagcactggagacctggaggacttccctggcctggacagcctgcacaagttccaggtgaagattgagaaggagaaggtgtatgtgcgggccagcaagcaggccctgcagctgcagaggaggaccaaggtgatggccaagtgcatcagccccagcgctggctacagcagcagcaccaacgtgctgattgtgggcgctggagctgctggcctggtgtgtgccgagaccctgcggcaggagggcttcagtgaccgcatcgtgctgtgcaccctggacagacacctgccctatgaccggcccaagctgagcaagagcctggacacccagcctgagcagctggccctgcggcccaaggagttcttccgggcctacggcatcgaggtgctgacagaggcccaggtggtgacagtggatgtgaggaccaagaaggtggtgttcaaggatggcttcaagctggagtacagcaagctgctgctggcccctggcagcagccccaagaccctgagctgcaagggcaaggaggtggagaatgtgttcaccatccgcaccccagaagatgccaacagagtggtgcggctggcccggggcagaaatgtggtggtggtgggcgccggcttcctgggcatggaggtggccgcctacctgacagagaaggcccacagcgtgtctgtggtggagctggaggagacccccttccgccgcttcctgggggagcgggtgggccgggccctgatgaagatgtttgagaacaacagagtgaagttctacatgcagacagaggtgtctgagctgcggggccaggagggcaagctgaaggaggtggtgctgaagagcagcaaggtggtgcgggcagatgtgtgtgtggtgggcattggagctgtgcctgccaccggcttcctgcggcagagcggcatcggcctggacagccggggcttcatccctgtgaacaagatgatgcagaccaacgtgcctggggtgtttgctgctggagatgctgtgaccttccccctggcctggaggaacaacaggaaggtgaacatcccccactggcagatggcccacgcccagggccgggtggccgcccagaacatgctggcccaggaggccgagatgagcacagtgccctacctgtggacagccatgtttgggaagagcctgcgctatgccggctatggagagggctttgatgatgtgatcatccagggcgacctggaggagctgaagtttgtggccttctacaccaagggagatgaggtgattgctgtggcctccatgaactatgaccccatcgtgtccaaggtggccgaggtgctggccagcggccgggccatcaggaagcgggaggtggagactggagacatgtcctggctgaccgggaagggcagctag

SEQ ID NO: 19126 - DNA, 1854 bp, synthetic construct
  source 1..1854: mol_type = other DNA; note = Synthetic coding sequence
atgggcagctacctgtctgtgcctgcctacttcaccagccgggacctcttccgctgcagcgagtgccaggacagcctgaccaactggtactatgagaaggatggcaagctgtactgccccaaggactactggggcaagtttggagagttctgccacggctgcagcctgctgatgacaggccccttcatggtggccggggagttcaagtaccacccagaatgttttgcctgcatgagctgcaaggtgatcattgaagatggagatgcctatgccctggtgcagcacgccaccctgtactgtgggaagtgccacaatgaggtggtgctggcccccatgtttgagcggctgagcacagagagcgtgcaggagcagctgccctacagcgtgaccctcatctccatgcctgccaccacagagggcagaagaggcttctctgtgtctgtggagagcgcctgcagcaactatgccaccaccgtgcaggtgaaggaggtgaacaggatgcacatcagccccaacaacagaaatgccatccaccctggggaccgcatcctggagatcaatggcacccctgtgaggaccctgcgggtggaggaggtggaggatgccatcagccagaccagccagaccctgcagctgctgattgaacatgaccctgtgtcccagaggctggaccagctgcggctggaggcccggctggccccccacatgcagaatgccggccacccccacgccctgagcaccctggacaccaaggagaacctggagggcaccctgcggcggcgcagcctgcggcgcagcaacagcatcagcaagagccctggccccagcagccccaaggagcccctgctcttcagccgggacatcagccgctctgagagcctgcgctgcagcagcagctacagccagcagatcttccggccctgtgacctgatccacggggaggtgctgggcaagggcttcttcggccaggccatcaaggtgacccacaaggccaccgggaaggtgatggtgatgaaggagctgatccgctgtgatgaggagacccagaagaccttcctgacagaggtgaaggtgatgaggagcctggaccaccccaacgtgctgaagttcatcggcgtgctgtacaaggacaagaagctgaacctgctgacagagtacattgaaggaggcaccctgaaggacttcctgcgctccatggaccccttcccctggcagcagaaggtgcgctttgccaagggcatcgccagcggcatggcctacctgcacagcatgtgcatcatccaccgggacctgaacagccacaactgcctgatcaagctggacaagacagtggtggtggccgactttggcctgagccggctgattgtggaggagaggaagagggcccccatggagaaggccaccaccaagaagaggaccctgaggaagaatgacaggaagaagcgctacacagtggtgggcaacccctactggatggcccctgagatgctgaatggcaagagctatgatgaaacagtggacatcttctcctttggaattgtgctgtgtgagatcatcggccaggtgtatgctgaccctgactgcctgcccaggaccctggactttggcctgaatgtgaagctgttctgggagaagtttgtgcccacagactgccccccagccttcttccccctggccgccatctgctgccgcctggagcctgagagcaggcctgccttcagcaagctggaggacagctttgaggccctgagcctgtacctgggggagctgggcatccccctgcctgctgagctggaggagctggaccacacagtgtccatgcagtatggcctgacccgggacagccccccatag

SEQ ID NO: 19127 - DNA, 1338 bp, synthetic construct
  source 1..1338: mol_type = other DNA; note = Synthetic coding sequence
atgagggagatcgtgcacatccaggccggccagtgtggcaaccagatcggggccaagttctgggaggtgatcagtgatgagcacggcatcgaccccaccggcagctaccatggagacagcgacctgcagctggagcgcatcaacgtgtactacaatgaggccgccggcaacaagtatgtgccccgggccatcctggtggacctggagcccggcaccatggattctgtgcgcagcggccccttcggccagatcttccggccagacaactttgtgtttggccagagcggggccggcaacaactgggccaagggccactacacagaaggagctgagctggtggacagcgtgctggatgtggtgaggaaggagagcgagagctgtgactgcctgcagggcttccagctgacccacagcctgggcggcggcactggaagtggcatgggcaccctgctgatcagcaagatccgggaggagtacccagaccgcatcatgaacaccttctctgtgatgcccagccccaaggtgtctgacacagtggtggagccctacaatgccaccctgtctgtgcaccagctggtggagaacacagatgagacctacagcattgacaatgaggccctgtatgacatctgcttccgcaccctgaagctgaccacccccacctacggggacctgaaccacctggtgtctgccaccatgtctggagtgaccacctgcctgcgcttccctggccagctgaatgctgacctgaggaagctggccgtgaacatggtgcccttcccccggctgcacttcttcatgcctggctttgcccccctgaccagccggggcagccagcagtaccgggccctgactgtgcctgagctgacccagcagatgtttgacagcaagaacatgatggccgcctgtgaccccaggcatggccgctacctgactgtggccgccatcttccggggccgcatgtccatgaaggaggtggatgagcagatgctgaatgtgcagaacaagaacagcagctactttgtggagtggatccccaacaacgtgaagacagctgtgtgtgacatccccccccggggcctgaagatgtctgccaccttcatcggcaacagcacagccatccaggagctgttcaagaggatcagcgagcagttcaccgccatgttccggaggaaggccttcctgcactggtacacaggagagggcatggatgagatggagttcacagaagctgagagcaacatgaatgacctggtgtctgagtaccagcagtaccaggatgccacagcagatgagcagggcgagtttgaggaggaggagggggaggatgaggcctag

SEQ ID NO: 19128 - DNA, 2028 bp, synthetic construct
  source 1..2028: mol_type = other DNA; note = Synthetic coding sequence
atggccaagcacggggctgatgagcccagcagccgcagcggcagcccagaccgggagggccgggccagcgaggacaggagcctgctgcaccagaggctggccgtgcgggagctgattgacacagaggtgtcctacctgcacatgctgcagctgtgtgccagtgacatccgcagccggctgcagcagctgccccagggcgacctggatgtgctcttcagcaacattgatgacatcatcaaggtgaacagccgcttcctgcatgacctgcaggagacagccagcaaggaggaggagcaggtgcagctggtgggcaacatcttcctggagttccaggaggagctggagcaggtgtacaaggtgtactgtgccagctatgaccaggccctgctgctggtggacacctacaggaaggagcctgagctgcagaggcacatccagggcatcgtggaggccgtggtgccccaggccggcagcagcggcctgtccttcctgctggtgatccccctgcagaggatcacccgctaccccctgctgctgcagaagatcctggagaacacagtgcctgatgccagcgcctaccctgtgctgcagagagctgtgtctgccctgcaggatgtgaacaccaacatcaatgagtacaagatgaggaaggaggtggccagcaagtacaccaaggtggagcagctgaccctgcgggagcggctggcccgcatcaacacccacaccctgagcaagaagaccacccggctgagccagctgctgaagcaggaggccggcctcatccccaggacagaggacaaggagtttgatgacctggaggagcgcttccagtgggtgtccctgtgtgtgacagagctgaagaacaacgtggccgcctacctggacaacctgcaggccttcctgtacttccggccccatgagtacaacctggacatccctgagggccctgctgtgcagtactgcaacctggcccgggacctgcacctggaggccttcctgaagttcaagcagaggctggagggcctggtgtggcagcccctgtgcagcctggccaaggccctgctgggcccccagaacctgatcaagaagaggctggacaagctgctggactttgagcgggtggaggagaagctgctggaggtgggctctgtgacctaccaggaggaggccgcccggcacacctaccaggccctgaacagcctgctggtggccgagctgccccagttcaaccagctggtgatgcagtggctgggccagatcatgtgcacctttgtgaccctgcagagggacctggccaagcaggtgctgcagagagctgagggctccatggcccagctgccccaccaccacgtgcctgagcccgccttcaggaagctggtggaggatgccctgggccgcaccagcaaccagctgcgctccttccaggagacctttgagaaggtgcagcccccacccaccacccagcccctgctgcccggcagcgagcggcaggtgcaggccctgctgagccgctatggccctgggaagctgtaccaggtgaccagcaacatcagcggcaccggcaccctggacctgaccctgccccggggccagatcgtggccatcctgcagaacaaggacaccaagggcaacagcggccgctggctggtggacaccggcggccaccggggctacgtgcctgctgggaagctgcagctgtaccacgtggtgcccagcgctgaggagctgcggcggcaggccggcctgaacaaggacccccgctgcctgaccccagagcccagccctgccctggtgcccagcatccccaccatgaaccaggtgattgctgcctacccctttgtggcccggagcagccatgaggtgtccctgcaggccggccagcctgtgaccatcctggaggcccaggacaagaagggcaaccctgagtggagcctggtggaggtgaatggccagaggggctacgtgcccagcggcttcctggcccgggcccggagccctgtgctgtggggctggagcctgcccagctag

SEQ ID NO: 19129 - DNA, 3399 bp, synthetic construct
  source 1..3399: mol_type = other DNA; note = Synthetic coding sequence
atggccagtgatggagccagcgccctgcccggccctgacatgtccatgaagcccagcgctgcccccagccccagccctgccctgcccttcctgccccccaccagtgaccccccagaccaccccccccgggagcccccaccccagcccatcatgcccagcgtcttctccccagacaaccccctgatgctgagcgccttccccagcagcctgctggtgactggagatggcggcccctgcctgtctggagctggagctgggaaggtgattgtgaaggtgaagacagagggcggcagcgctgagcccagccagacccagaacttcatcctgacccagacagccctgaacagcacagcccctggcaccccctgtggcggcctggagggccctgcccccccatttgtgacagccagcaatgtgaagaccatcctgcccagcaaggctgtgggcgtgtcccaggagggccccccaggcctgcccccccagcccccacctcctgtggcccagctggtgcccatcgtgcccctggagaaggcctggccaggcccccacggcaccaccggggagggcggccctgtggccaccctgagcaagcccagcctgggggacaggagcaagatcagcaaggatgtgtatgagaacttccggcagtggcagcgctacaaggccctggcccggcggcacctgagccagagcccagacacagaggccctgagctgcttcctgatccctgtgctgcggagcctggcccggctgaagcccaccatgaccctggaggagggcctgcccctggccgtgcaggagtgggagcacaccagcaactttgacaggatgatcttctatgagatggccgagcgcttcatggagtttgaagctgaggagatgcagatccagaacacccagctgatgaatggcagccagggcctgagccctgccacccccctgaagctggaccccctgggccccctggccagcgaggtgtgccagcagcctgtgtacatccccaagaaggccgccagcaagacccgggccccccggcggcggcagaggaaggcccagaggcccccagcccctgaggcccccaaggagatccccccagaggccgtgaaggagtatgtggacatcatggagtggctggtgggcacccacctggccactggagagagtgatggcaagcaggaggaggagggccagcagcaggaggaggagggcatgtacccagaccccggcctgctgagctacatcaatgagctgtgcagccagaaggtgtttgtgtccaaggtggaggccgtcatccacccccagttcctggccgacctgctgagccctgagaagcagagggaccccctggccctgattgaggagctggagcaggaggagggcctgaccctggcccagctggtgcagaagaggctgatggccctggaggaggaggaggatgctgaggcccctccttccttcagcggggcccagctggacagcagccccagcggctctgtggaggatgaagatggagatggccgcctgcggcccagccctggcctgcagggcgccggcggggccgcctgcctgggcaaggtgagcagcagcggcaagagggcccgggaggtgcatggaggccaggagcaggccctggacagcccccggggcatgcacagagatggcaacaccctgcccagccccagctcctgggacctgcagcctgagctggccgccccccagggcaccccaggccccctgggcgtggagcggcggggcagcggcaaggtgatcaaccaggtgtccctgcaccaggacggccacctgggcggggccggccccccaggccactgcctggtggccgacaggaccagcgaggccctgcccctgtgctggcagggcggcttccagcctgagagcacccccagcctggatgctggcctggccgagctggcccccctgcagggccagggcctggagaagcaggtgctgggcctgcagaagggccagcagacaggaggccggggcgtgctgccccagggcaaggagcccctggccgtgccctgggagggcagcagcggggccatgtggggagatgaccggggcacccccatggcccagagctatgaccagaaccccagccccagggctgctggggagagagatgatgtgtgcctgagccctggggtgtggctgagcagcgagatggatgctgtgggcctggagctgcctgtgcagatcgaggaggtgattgagagcttccaggtggagaagtgtgtgacagagtaccaggagggctgccagggcctgggcagccggggcaacatcagcctgggccctggagagaccctggtgcctggggacacagagagcagcgtcatcccctgtggcggcaccgtggccgctgctgccctggagaagaggaactactgcagcctgcccggccccctgcgggccaacagcccccccctgcggagcaaggagaaccaggagcagagctgtgagaccgtgggccaccccagcgacctgtgggccgagggctgcttccccctgctggagagcggggacagcaccctgggcagcagcaaggagaccctgccccccacctgccagggcaacctgctgatcatgggcacagaagatgccagcagcctgcctgaggccagccaggaggccggcagccggggcaacagcttcagccccctgctggagaccatcgagcctgtgaacatcctggatgtgaaggatgactgtggcctgcagctgcgggtgtctgaggacacctgccccctgaatgtgcacagctatgacccccagggcgagggccgggtggaccctgacctgagcaagcccaagaacctggcccccctgcaggagagccaggagagctacaccaccggcacccccaaggccaccagcagccaccagggcctgggcagcaccctgccccggcggggcaccagaaatgccatcgtgccccgggagacctctgtgtccaagacccacaggtctgctgaccgggccaagggcaaggagaagaagaagaaggaggccgaggaggaggatgaggagctgagcaactttgcctacctgctggccagcaagctgagcctgagcccccgggagcaccccctgagcccccaccacgccagcggcggccagggcagccagagggccagccacctgctgcctgctggggccaagggccccagcaagctgccctaccctgtggccaagagcggcaagagggccctggccggcggccctgcccccacagagaagaccccccacagcggggcccagctgggcgtgccccgggagaagcccctggccctgggcgtggtgcggcccagccagcccaggaagagaagatgtgacagctttgtgacaggccgcaggaagaagagaagaagaagccagtag

SEQ ID NO: 19130 - DNA, 522 bp, synthetic construct
  source 1..522: mol_type = other DNA; note = Synthetic coding sequence
atggctgtggccgtgggcgtgcgggccgcccctgtgctgggcctggcccgggccctggtgctgggcctgcggggcagccaggccgcccgctggaggggctggggcacagctgcccctggcagcctgtgggccctgtgtgaatgtcctgctggctgccgggagctgtggttccggggccgggccgcctgggccgcccggtctgagcggctgctgcacccagcccaggacagtgatggagagcgggaggacagcgctgctgagcgggcccggcagcagctggaggccctgctgaacaagaccatgaggatccgcatgacagatggccgcaccctggtgggctgcttcctgtgcacagaccgggactgcaacgtcatcctgggcagcgcccaggagttcctgaagcccagcgacagcttctctgctggggagccccgggtgctgggcctggccatggtgcccggccaccacatcgtgtccattgaggtgcagcgggagagcctgaccggccccccctacctgtag

SEQ ID NO: 19131 - DNA, 558 bp, synthetic construct
  source 1..558: mol_type = other DNA; note = Synthetic coding sequence
atggtgaacagctgctgcggctctgtgtgcagcgaccagggctgcggccaggacctgtgccaggagacctgctgctgccccagctgctgccagaccacctgctgcaggaccacctgctaccggcccagctacagcgtgtcctgctgctgccggccccagtgctgccagagcgtgtgctgccagcccacctgctgccggcccagctgctgcgtgagcagctgctgcaagccccagtgctgccagagcgtgtgctgccagcccacctgctgccaccccagctgctgcatcagcagctgctgccggcccagctgctgcgtgagcagctgctgcaagccccagtgctgccagagcgtgtgctgccagcccaactgctgccggcccagctgcagcatcagcagctgctgccggcccagctgctgtgagagcagctgctgccggccctgctgctgcctgcggcctgtgtgtggccgggtgtcctgccacaccacctgctacagacctgcctgtgtgatcagcacctgccccaggcctgtgtgctgtgccagcagctgctgctag

SEQ ID NO: 19132 - DNA, 252 bp, synthetic construct
  source 1..252: mol_type = other DNA; note = Synthetic coding sequence
atgtgctgcaactactacagaaactgctgcggcggctgcggctacggcagcggctggagcagcggctgcggctacggctgcggctacggctgcggctacggcagcggctgccgctatggcagcggctatggaacaggctgcggctacggctgcggctacggcagcggctgcggctacggctgcggctacagcagcagctgctgcggctaccggcccctgtgctaccgccgctgctacagcagctgctactag

SEQ ID NO: 19133 - DNA, 993 bp, synthetic construct
  source 1..993: mol_type = other DNA; note = Synthetic coding sequence
atgggcagcaggaagaaggagatcgccctgcaggtgaacatcagcacccaggagctgtgggaggagatgctgagcagcaagggcctgactgtggtggatgtgtaccagggctggtgtggcccctgcaagcctgtggtgtccctcttccagaagatgagaattgaggtgggcctggacctgctgcactttgccctggccgaggccgaccggctggatgtgctggagaagtaccggggcaaatgtgagcccaccttcctgttctacgccggcggggagctggtggccgtggtgcggggggccaatgcccccctgctgcagaagaccatcctggaccagctggaggccgagaagaaggtgctggccgagggccgggagaggaaggtgatcaaggatgaggccctgagtgatgaagatgaatgtgtgagccacggcaagaacaatggagaagatgaggacatggtgagcagcgagaggacctgcaccctggccatcatcaagccagatgctgtggcccacggcaagacagatgagatcatcatgaagatccaggaggccggctttgagatcctgaccaatgaggagaggaccatgacagaggccgaggtgcggctcttctaccagcacaaggccggggaggaggcctttgagaagctggtgcaccacatgtgcagcggccccagccacctgctgatcctgaccaggacagagggctttgaagatgtggtgaccacctggaggacagtgatgggcccccgggaccccaacgtggcccggcgggagcagcctgagagcctgcgggcccagtatggaacagagatgcccttcaatgctgtgcacggcagccgggacagagaagatgctgaccgggagctggccctgctcttccccagcctgaagttcagtgacaaggacacagaggccccccagggcggggaggccgaggccacagctggccccacagaggccctgtgcttcccagaagatgtggactag

SEQ ID NO: 19134 - DNA, 606 bp, synthetic construct
  source 1..606: mol_type = other DNA; note = Synthetic coding sequence
atggtgagcagctgctgcggctctgtgtgcagcgaccagggctgcggccaggacctgtgccaggagacctgctgccggcccagctgctgtgagaccacctgctgcaggaccacctgctgccggcccagctgctgcgtgagcagctgctgccggccccagtgctgccagagcgtgtgctgccagcccacctgcagccggcccagctgctgccagaccacctgctgcaggaccacctgctaccggcccagctgctgcgtgagcagctgctgccggccccagtgctgccagcctgcctgctgccagcccacctgctgcaggcctccccgctgctgcatcagcagctgctgccggcccagctgctgcgtgagcagctgctgcaagccccagtgctgccagagcgtgtgctgccagcccaactgctgccggcccagctgcagcatcagcagctgctgccggcccagctgctgtgagagcagctgctgccggccctgctgctgcgtgcggcctgtgtgtggccgggtgtcctgccacaccacctgctaccggcccacctgtgtgatcagcagctgcccccggcccctgtgctgtgccagcagctgctgctag

SEQ ID NO: 19135 - DNA, 792 bp, synthetic construct
  source 1..792: mol_type = other DNA; note = Synthetic coding sequence
atgggagacatcccagctgtgggcctgagctcctggaaggccagccctgggaaggtgacagaggccgtgaaggaggccattgatgctggctaccgccactttgactgtgcctacttctaccacaatgaaagagaggtgggcgccggcatccgctgcaagatcaaggagggcgctgtgcggcgggaggacctcttcatcgccaccaagctgtggtgcacctgccacaagaagagcctggtggagacagcctgcaggaagagcctgaaggccctgaagctgaactacctggacctgtacctgatccactggcccatgggcttcaagccaccccaccctgagtggatcatgagctgcagcgagctgtccttctgcctgagccacccccgggtgcaggacctgcccctggatgagagcaacatggtgatccccagcgacacagacttcctggacacctgggaggccatggaggacctggtgatcaccggcctggtgaagaacattggagtgagcaacttcaaccacgagcagctggagcggctgctgaacaagccaggcctgcgcttcaagcccctgaccaaccagatcctgatccgcttccagatccagagaaatgtcatcgtcatccctggcagcatcacccccagccacatcaaggagaacatccaggtgtttgattttgagctgacccagcacgacatggacaacatcctgagcctgaacagaaacctgcggctggccatgttccccatcaccaagaaccacaaggactaccccttccacatcgagtactag

SEQ ID NO: 19136 - DNA, 177 bp, synthetic construct
  source 1..177: mol_type = other DNA; note = Synthetic coding sequence
atgagatactacggcagctactaccggggcctgggctacggctgcggcggctttggaggcctgggctacggctgcggctgcggcggctaccgctatggcagcggctacggcggctaccgctatggctgctgccggcccagctgccgggagggctacggcttcagcggcttctactag

SEQ ID NO: 19137 - DNA, 159 bp, synthetic construct
  source 1..159: mol_type = other DNA; note = Synthetic coding sequence
atgtgctacggctacggctgcggctgcggcagcttctgccgcctgggctacggctgcggctatgagggctgccgctatggctgcggccaccggggctgtggagatggctgctgctgccccagctgctaccgccgctaccgcttcaccggcttctactag

SEQ ID NO: 19138 - DNA, 255 bp, synthetic construct
  source 1..255: mol_type = other DNA; note = Synthetic coding sequence
atgagctactacggcagctactaccggggcctgggctacggctgcggcggctttggaggcctgggctacggctacggctgcggctgcggcagcttccggcggctgggctacggctgcggctttggaggaaatggctacggctactgccggcccagctgctacggcggctacggcttcagcatcctgctgaagagctacccagaggacaccatcagcgaggtgatccgccgctccttcaacctgaccaagtactag

SEQ ID NO: 19139 - DNA, 246 bp, synthetic construct
  source 1..246: mol_type = other DNA; note = Synthetic coding sequence
atgagctactacggcagctactacggcggcctgggctacggctgcggcggctttggaggcctgggctacggctacggctgcggctgcggcagcttccggcggctgggcagcggctgcggctatggaggctacggctacggcagcggctttggaggctacggctacggcagcggctttggaggctacggctacggctgctaccggcccagctactacggcggctacggcttcagcggcttctactag

SEQ ID NO: 19140 - DNA, 414 bp, synthetic construct
  source 1..414: mol_type = other DNA; note = Synthetic coding sequence
atgagctacaactgcagcagcggcaacttcagcagctgctgcttcggcagctacctgcgctaccctgtgtccacctacaacctcttctaccccagcaatgccatctacagccccaacacctgccagctgggcagcagcctgtacaacggctgccaggagacctactgtgagcccaccagctgccagaccagctgcaccctggcccggagctaccagaccagctgctactgccccaagaacagcatcttctgcagcccccggcagaccaactacatccgcagcctgggctgcggcaacacaggcctgggcagcctgggctgcggcagcacaggcttccagagcctggactgtggcagcagcttctaccaccccaccaccttcagcagcaggaacttccaggccacctgctactag

SEQ ID NO: 19141 - DNA, 483 bp, synthetic construct
  source 1..483: mol_type = other DNA; note = Synthetic coding sequence
atgagctacaactgctgcagcaggaacttcagcagccgcagctttggaggctacctgtactacccaggcagctaccccagcagcctggtgtacagcacagccctgtgcagccccagcacctgccagctgcggagcagcctgtacagagactgccagaagacctgctgggagcccgccagctgccagaagagctgctaccggcccaggaccagcatcctgtgctgcccctgccagaccacctgcagcggcagcctgggcttccgcagcagcagctgccgcagccagggctacggcagccgctgctgctacagcctgggcaatggcagcagcggcttccgcttcctgaagtatggaggctgcggcttccccagcctgtcctatggcagccgcttctgctaccccaactacctggccagcggggcctggcagagcagctgctaccggcccatctgtggcagccgcttctaccagttcacctgctag

SEQ ID NO: 19142 - DNA, 684 bp, synthetic construct
  source 1..684: mol_type = other DNA; note = Synthetic coding sequence
atgctgaacccagatggagtgtacctgggcaactaccgctgcagcctgatgggctttgacctgaacagacactggctggaccccagcccctgggtgcaccccaccctgcatggagtgaagcagctgattgtgcagatgtacaatgaccccaagaccagcctggagttctacatcgacatccacgcccacagcaccatgatgaatggcttcatgtatggcaacatctttgaagatgaggagcgcttccagaggcaggccatcttccccaagctgctgtgccagaatgctgaggacttctcctacagcagcaccagcttcaacagagatgctgtgaaggccggcactggaagacgcttcctgggcggcctgctggaccacaccagctactgctacaccctggaggtgtccttctacagctacatcatcagcggcaccacagctgctgtgccctacacagaggaggcctacatgaagctgggcagaaatgtggcccggaccttcctggactactaccgcctgaaccctgtggtggagaaggtggccatccccatgccccggctgaggaaggagaagagccccccctacaagcaccccctgctgcggggccctgccagcaactaccccaacagcaaaggagacaagaagagctctgtgaaccacaaggaccccagcacccccttctag

SEQ ID NO: 19143 - DNA, 465 bp, synthetic construct
  source 1..465: mol_type = other DNA; note = Synthetic coding sequence
atgacccactgctgcagcccctgctgccagcccacctgctgcaggaccacctgctgcaggaccacctgctggaagcccaccaccgtgaccacctgcagcagcaccccctgctgccagcccagctgctgcgtgagcagctgctgccagccctgctgccggcccacctgctgccagaacacctgctgccagcccacctgtgtgaccagctgctgccagcccagctgctgcagcaccccctgctgccagcccacctgctgcggcagcagctgtgaccagagcagcagctgtgcccctgtgtactgcaggaggacctgctactaccccaccaccgtgtgcctgcccggctgcctgaaccagagctgtggcagcaactgctgccagccctgctgcaggcctgcctgctgtgagaccacctgcttccagcccacctgtgtgagcagctgctgccagcccttctgctgctag

SEQ ID NO: 19144 - DNA, 7062 bp, synthetic construct
  source 1..7062: mol_type = other DNA; note = Synthetic coding sequence
atgaagcagaggaagggccagggcagcggcggcagccggggcaggaagaagaggggcctgagtgacatcagccccagcaccagcctgccccccctggtggagggccagctgcgctgcttcctgaagctgactgtgaacagagtcatctggaagatcgccaagccacccacctgtgtgctggtgcgggtgcgctggtggggcgagaccagtgatggcaccctcttctgccccagagatgccctgcagacagagcccaaggctgtgaggaccaccaccaggtatgccatccgctgtggccccaagcagttcaccagctacctgacagacatggctgtgctggtgctggaggtgatcaccaagctggatggcctgcccatcggccgggtgcagatcaatggcctggcccagctgagccccacccaccagatcaatggcttcttcaccatcgtgagcagcaccagcaagaagctgggggagctgcaggtgtccctggccctggagcccctgtctgagacctatgacagctaccaccccctgcccaccacagacatgacagaaaatgtgctgctgagcaagcagggcttcagagaaaatacagagcccagcagcacccagttccaggtgcccagccggccccgggacatccacaccatcaagattgatggcaaggagctggccgccaacagcagccgcagcaccaccccccggggcaaggaccacgtgtgctttgctgaaaatccagacaccatcaaggacagcagctttggcctgcagcacagcctgaacagcggccagagcctggagagcgtgaccctgaagggccgggcccccaggaagcagatgagcctgctgaacagcagcgagttccagccccagatcagaacagtggccaagagccacagcgacagctgcatcctgagcagcaacaacctgcccaccaaggacctgctgagcgccctgctggagcagggcaacaagctgagaaatgccatggtgatcagcgccatgaagagcagccctgagacctccatgctgctggaccaggtgcacccccccatcaatgaagacagcctgcgggccagcacccagatccgggccttcagcaggaaccgcttcaaggaccacatcgaggaccacctgctgcccagcacagagaacaccttctggaggcatgacaccaaggctgacacccgggccatccagctgctgctgggcagcgctgagctgagccagggcaacttctgggatggcctgggcagccccccagacagccccagccctggcagtgatgtgtactgcatcagcgagctgaatgacccccagtatgaccagagcctgctggagaacctcttctacacagcccccaagagtgacaccagcatcagtgacttcctgtctgaggaggatgacatcgtgcccagcaagaagatcagccagagcacagccctggcccggagcagcaaggtgctggagagcagtgaccacaagctgaagaagaggtctgctgggaagaggaacagaaacctggtggagcagcagatgctgtctgagaccccagaagatgcccagaccatgaccctgtctgtggaccggctggccctgctgggccgcacccacagcgtgcgcatcatcatcgagaccatgggcgtgcccccagacagcccccagatgaccccaggcaagaagagctatgccggccccccacccaaggtgaccacagccaagaagaggaccttctttgtggagtaccacttccctgtgggcttcagcgagagcggcctgggcaagacagccctgatcacagaggtggtgcggctggccagcagcaagatcacagatggcaaggtgaagttccagcagagatttgtgtttcctgtgcagtttggaggccccatgattgagcactggtggaacagcaacctgaccttccagatctacgtgaagaagaccccccagaagaagccagaggtgattggctctgtgtccctgagcctgcgggctgtgatccagagcgagctgctgtccttcagtgaccagctgcctgtgcagcaggagaatggccagagccccttcggccccctgaaggtgaccatggagctgatcacagacaacaaggacttcaccggcatcaacaccaagctgagcggcaacacccactacacccccctgtgtgcccccaccagccccaacaaggccctgcctgagctgaaccaggacatgacctgcaccaagaacccccagaacctgaaccagatccacgaggagacagccaagaaggcccagaacctggtgctgcccaacaggaagagccccagccctgtggccccccaccccagcacctttgtggccaccccagccagccacaacctggtgaaccagaccaacggcaccaccaaggagagcgccctgctgctgcacgtgctgctgatggtgcctgatggcaaggacttcatctctggagagagcgagaagcagagcccctgcaatgtgtacctgaactgcaagctgttcagcacagaggaggtgaccaggtctgtgattgcctggggcaccacccagcccgtcttcaacttcagccaggtgattcctgtgtccctgagcagcaagtacctggagcggctgaagaacaacgtgatggtgattgagacctggaacaaggtgcgcagccctggccaggacaagctgctgggcctggtgaagctgcccctgcaccagttctacatgtccttcaaggatgccaagatcagccggctgctgctggatgcccagtaccctgtggtggccgtggacagctacatgcctgtgattgatgtgttcagcggccaccagaatggcagcctgcgggtcttcctggccatgggcagcagcaaccagatcatggccctgcagaggctgaagaatgaggagggcaccctgccccccttcagccccaggcctgcccacttcctggaccagcccacagctgcctctgtggccatggctgaagatagaggaaatggcctgatggagcactgctttgagatccacatcgagatggtgaagggcctggcccccctgcaggccaccgtgtggggcgaggccgactgctacgtgcagtactacttccctgtgcagcacagccagagctctgtgctgaagggccctgagttcctggagaatggcatcaccctgaagcccttcagaacagccaccaccctgtgtgtgcctgaccccatcttcaacagcgagcaccaccacagcctgctgctgcctgctgaggtgcctgtgcagaggctgctgctgagcgccttcagcgcccagggcctggtgcctgggggcggcgtgcagtttgagatctggtgccgctactactaccccaacgtgcgggaccagaaggtggccaagggcaccctgcccctgagccgcatctgtgccatggtgaccacccagcaccgggaggatgtgggcatccagaccttcaacctgcccctgaccccaagaattgagaacaggaaggagctgaggaaccagagcagcggcctgctggatgtgggcctgcgctaccgccgcagccccaggacagctgagggcgtgctggccgccaggacagtgtccatctctgtgcagatcatccgggcctgtggcctgcaggccgccgccaaggccctggccgagcgggagcccgccctgcagttcagcgccaccgtgggcgtgaatgcctctgtgaccacccacctgtccttcctgccccagggcgagcagaggaggacccaccctgtggcctgcagcttctgcccagagttcagccaccacgtggagttcacctgcaacctggtgacccagcactgcagcggggaggcctgcttcctggccgagctgctggagtttgctgaggtgatctttgctgtgtaccacgagaacaccaagagcgccagtgacatcatcagcattgagagctgcaaggagtacctgctgggcgtggtgaaggtgcccaccaaggagctgctgatcaagaggagcggcatcaccggctggtaccccatcatcctgcctgaagatggcggcctgccccacggcctggagctgatgcagaagatcgtgggcggcctggagctgagcatctccttcacccacagaggagaccgggagcgggtgctggaggccgctgagcacctgggctggagctttgagaacagcctgaaggactttgtgaggatggatgaaggagagcccgccaccgtgaccatcagcaccccccggctgtggctgcccatccactgtgtgctgctggccggccacaaccacatccacaagaacacctactgctacctgcgctacaagttctatgaccacgaggccttctggacccccctgaagaagcccaaggagagcgtgaacaagaagcagatcatggtgaccttcaaggccagcaagagagctgaggtgacccggggccccagcctgctgtggtacttccgggaggagcggctggagatccaggtgtggagggcctatggaaatgacagcgtggagcggccccaccagacagacagctggattggcagcgcctacgtggacctggcccggctgggggagaggtctgcccggaccctgactgtgtctggagtgtaccccctgtttggaagaaatgccagcaacctgagcggggccgccctgcgggtgcacgtggtgctgagcagcctgagcagccacctggagcccacccatgagctggacagcatggactgcagcagccacagcgagagcgagcagctgcccaggagaaatgatgaggtgcagctgagccccccagaggtgatcagctgccaccagaagagccctgccagcacccaggtgccctgcagcagcaccacagctgaggtgcggctgacccaggagggccctgctgacctggatggcacctttgctgtgtccatcctggtggagcgggccatgcacctgagcctgaagggcagccccctgacagagaggaaggtgtccatccccagctgctgcgtgtcctttgccacagcagatgagagcagccctgtgtacacccaggtggtggagaacacagacagccccatctggaacttccagcagcagagccggctgagcaaggagctgctgctggacccccagcagaccctggtgttcaaggtgtggcacaagggagatgaggagagggtcatcggctttgcctctgtggacctgagccccctgctgagcggcttccagtttgtgtgtggctggtacaacatcacagacttctctggagagtgccagggccagatcaaggtggccgtgagccccctggagagcctcatccacttcaaggaggagcggcaggcccggcggggcgtggagaccagcaagagcctcatccccatctacagccccttctccttccctgccagtgacacctatgctgccttcagcagccacatggcccggcagaccctggaccagctggcccacgccagcagcaaggagctggacttcagcagccctggccgcagtgacaccaccaggagccaggccagcagacatgaggagcacgtgcagaacatccgccgcttccacgagagcctgcacctgcagggcgaggcccccctgccctgtgatgacaagctgaccaccagccccctgagcagccagaccagcatcctgaccagcctgaggaagaacctgtctgagctggaccagatccagcgctacttccggcagaagctgaccaagcccttcctgcccctgagcccccagacccagacagccatcagccagcaccaggagagctgccgggaccacctgggccctggggccagcagcctggaccccggcagccagtgcatcctggagaagagcagcaacctggtgctgcaggtgagcagcctcatcacagacctgcagaccatcacccgggacagccaggccgccctgagcagccaccgggcccggagccgcagcaacaaggccaccaccctgcctgatgcccaggacacagaggccctgcaggagcgctgcaccatgccagatgagcccctggtgcgggccccagacaagggcacagacagccccagccccccacccctggaggagaccagcaatggaggccgcatgctgcacgagagcctgcggcatgctgtgcccatcaccaggatgcagagcagcgaggacacagaagctggccctgcctacagtgatgaggactatgaggaggacatcatcgagcccaggaccctgaatgagatcaccaccgtgacagacaagaccagcccctggagcagcgtcatcagtgacaccagcgaggtgatcagcccccagccagatgaggtgcagcgggagggccccagctgccccagccctggccccttctgccgggaggagctgatggtgaagagcagcttcctgagcagccctgagagagctgtgaacccccacctgccccggcagggcagccccagccagagcctggtggcctgtgaatgtgaggccagcaaggcccgggtgggcggggagagcgccagcgccaacccccagcccatcccctgccccaccctgagcggggcccagcagagcagcacctttgtgggctggagcagcccccagacagaccagaacaaggagcccaagtctgaggccccagcagaaaatgaagctgccaccagcgagctgggggacagcgctgacagcttcaagaagctgcccctgaacctggccagccagagcagaagagagaaccacaagggcccccccatcgacagcagtgacatccggcagaggcaggtgaccaccggcagcgagaccagcaccaagcagagcctgctgctgcccggccccatcgtggtgcccaacttcttcctgcccccccagcagctggaggccagcctgaggatgctgagcctgagcgccaccctgcccccagctgccaccacagaccaggacaagtctgaggccaccaggggggccctgagccagaggccctgccggccccggcccaacagcctgcccctgaacctgcctgaggaggagaccctgagaattgcccgcatcttcagcagccagtacagccagaaggactag

SEQ ID NO: 19145 - DNA, 219 bp, synthetic construct
  source 1..219: mol_type = other DNA; note = Synthetic coding sequence
atgaactactacggcaactactacggcggcctgggctacggctatggaggctttgatgacctgggctacggctacggctgcggctgcggcagcttccggcggctgggctatggaggcggctatggaggctacggctacggcagcggctttggaggctacggctaccgcagctgccggcccagctgctatggaggctacggcttcagcggcttctactag

SEQ ID NO: 19146 - DNA, 198 bp, synthetic construct
  source 1..198: mol_type = other DNA; note = Synthetic coding sequence
atgagctacaactgctgctgcggcaacttcagcagccacagctgtgagggctacctgtgctacagcggctacagcagaggaggcagcagctaccccagcaacctggtgtacagcacagagcccctcatcagccagcacctgcctgctggcttcctgagcctgcagggcctgagcggggacctgctgggcaacccctag

SEQ ID NO: 19147 - DNA, 384 bp, synthetic construct
  source 1..384: mol_type = other DNA; note = Synthetic coding sequence
atggtgaacagctgctgcggctctgtgtgcagcgaccagggctgtgaccagggcctgtgccaggagacctgctgccggcccagctgctgccagaccacctgctgctgccccagctgtgtggtgagcagctgctgccggcccagctgcagccagaccacctgctgccagaccacctgctgccggcccagctgctgccaccctgtgtgctgccagaccacctgccggcccagctgtggggtgagcagctgctgccggcccctgtgctgccagaccacctgccggcccagctgtggggtgagcagctgctgccggcccctgtgctgccagaccacctgctgccgggccacctgctgccggcccagctgctgcggcagcagctgctag

SEQ ID NO: 19148 - DNA, 318 bp, synthetic construct
  source 1..318: mol_type = other DNA; note = Synthetic coding sequence
atgggctgctgccctggggactgcttcacctgctgcacccaggagcagaactgctgtgaggagtgctgctgccagcccggctgctgcggctgctgcggcagctgctgcggctgcggcggcagcggctgcggcggcagcggctgcggcggcagctgctgcggcagcagctgctgcggcagcggctgcggcggctgcggcggctgcggcggctgcggcggcggctgctgcggcagcagctgctgcggcagcagctgctgcggcagcggctgctgcggccctgtgtgctgccagcccacccccatctgtgacaccaagtag

SEQ ID NO: 19149 - DNA, 3915 bp, synthetic construct
  source 1..3915: mol_type = other DNA; note = Synthetic coding sequence
atggaggagatccctgtgaaggtggccgtgcgcatccggcccctgctgtgcaaggaggccctgcacaaccaccaggtgtgtgtgcgggtcatccccaacagccagcaggtgatcatcggccgggacagagtcttcacctttgattttgtgtttgggaagaacagcacccaggatgaggtgtacaacacctgcatcaagcccctggtgctgagcctgattgagggctacaatgccaccgtgtttgcctacggccagacaggcagcggcaagacctacaccatcggcggcggccacatcgcctctgtggtggagggccagaagggcatcatcccccgggccatccaggagatcttccagagcatcagcgagcaccccagcattgacttcaacgtgaaggtgtcctacatcgaggtgtacaaggaggacctgcgggacctgctggagctggagacctccatgaaggacctgcacatccgggaggatgagaagggcaacacagtcatcgtgggcgccaaggaatgtcatgtggagagcgctggggaggtgatgagcctgctggagatgggaaatgctgcccggcacacaggcaccacccagatgaatgagcacagcagccgcagccacgccatcttcaccatcagcatctgccaggtgcacaagaacatggaggccgcagaagatggctcctggtacagccccaggcacatcgtgtccaagttccactttgtggacctggccggcagcgagcgggtgaccaagacaggcaacacaggagagcgcttcaaggagagcatccagatcaacagcggcctgctggccctgggcaatgtcatcagcgccctgggggaccccaggaggaagagcagccacatcccctacagagatgccaagatcacccggctgctgaaggacagcctgggcggcagcgccaagacagtgatgatcacctgtgtgagccccagcagcagcaactttgatgagagcctgaacagcctgaagtatgccaacagagccaggaacatccggaacaagcccaccgtgaacttcagccctgagagtgacagaattgatgagatggagtttgagatcaagctgctgcgggaggccctgcagagccagcaggccggcgtgtcccagaccacccagatcaaccgggagggcagcccagacaccaaccgcatccacagcctggaggagcaggtggcccagctgcagggagaatgtctgggctaccagtgctgcgtggaggaggccttcaccttcctggtggacctgaaggacacagtgcggctgaatgagaagcagcagcacaagctgcaggagtggttcaacatgatccaggaggtgaggaaggctgtgctgaccagcttccggggcatcggcggcacagccagcctggaggagggcccccagcacgtgacagtgctgcagctgaagcgggagctgaagaagtgccagtgtgtgctggccgcagatgaggtggtgttcaaccagaaggagctggaggtgaaggagctgaagaaccaggtgcagatgatggtgcaggagaacaagggccatgctgtgtccctgaaggaggcccagaaggtgaaccggctgcagaatgagaagatcatcgagcagcagctgctggtggaccagctgtctgaggagctgaccaagctgaacctgtctgtgaccagcagcgccaaggagaactgtggagatggcccagatgcccgcatccctgagcggcggccctacacagtgccctttgacacccacctgggccactacatctacatccccagccggcaggacagcaggaaggtgcacaccagcccccccatgtacagcctggaccgcatctttgctggcttccgcaccaggagccagatgctgctgggccacatcgaggagcaggacaaggtgctgcactgccagttcagtgacaacagtgatgatgaggagagcgagggccaggagaagagcggcacccgctgccgcagccgctcctggatccagaagccagacagcgtgtgcagcctggtggagctgagtgacacccaggatgagacccagaagagtgacctggagaatgaagacctgaagattgactgcctgcaggagagccaggagctgaacctgcagaagctgaagaacagcgagcgcatcctgacagaggccaagcagaagatgagggagctgaccatcaacatcaagatgaaggaggacctgatcaaggagctgatcaagacaggaaatgatgccaagtctgtgtccaagcagtacagcctgaaggtgaccaagctggagcatgatgctgagcaggccaaggtggagctgattgagacccagaagcagctgcaggagctggagaacaaggacctgagtgatgtggccatgaaggtgaagctgcagaaggagttcaggaagaagatggatgctgccaagctgcgggtgcaggtgctgcagaagaagcagcaggacagcaagaagctggccagcctgagcatccagaatgagaagagggccaatgagctggagcagagcgtggaccacatgaagtaccagaagatccagctgcagaggaagctgcgggaggagaatgagaagaggaagcagctggatgctgtgatcaagagggaccagcagaagatcaaggccctgaacacagacagcctgaagatcagcacccggctgaacctgctggagcaggagctgtctgagaagaatgtgcagctgcagaccagcacagctgaggagaagaccaagatcagcgagcaggtggaggtgctgcagaaggagaaggaccagctgcagaagaggaggcacaacgtggatgagaagctgaagaatggccgggtgctgagccctgaggaggagcacgtgctcttccagctggaggagggcatcgaggccctggaggccgccatcgagtacagaaatgaaagcatccagaaccggcagaagagcctgcgggccagcttccacaacctgagcagaggagaggccaacgtgctggagaagctggcctgcctgagccctgtggagatccgcaccatcctcttccgctacttcaacaaggtggtgaacctgcgggaggccgagaggaagcagcagctgtacaatgaggagatgaagatgaaggtgctggagcgggacaacatggtgcgggagctggagagcgccctggaccacctgaagctgcagtgtgaccggcggctgaccctgcagcagaaggagcacgagcagaagatgcagctgctgctgcaccacttcaaggagcaggatggagagggcatcatggagaccttcaagacctatgaggacaagatccagcagctggagaaggacctgtacttctacaagaagaccagccgggaccacaagaagaagctgaaggagctggtgggggaggccatccggcggcagctggcccccagcgagtaccaggaggccggagatggagtgctgaagccagagggcggcggcatgctgtctgaggagctgaagtgggccagcaggcctgagagcatgaagctgagcggccgggagcgggagatggacagcagcgccagcagcctgcggacccagcccaacccccagaagctgtgggaggacatccctgagctgccccccatccacagcagcctggccccacccagcggccacatgctgggcaatgaaaacaagacagaaacagatgacaaccagttcaccaagagccacagccggctgagcagccagatccaggtggtgggcaatgtgggccgcctgcacggcgtgacccctgtgaagctgtgcaggaaggagctgcggcagatcagcgccctggagctgagcctgcggcgcagcagcctgggcgtgggcatcggctccatggctgctgacagcattgaggtgtccaggaagccccgggacctgaagacctag

SEQ ID NO: 19150 - DNA, 903 bp, synthetic construct
  source 1..903: mol_type = other DNA; note = Synthetic coding sequence
atggaggaggaggccagcagccctggcctgggctgcagcaagccccacctggagaagctgaccctgggcatcacccgcatcctggagagcagccctggggtgacagaggtgaccatcatcgagaagcccccagctgagcggcacatgatcagctcctgggagcagaagaacaactgtgtgatgccagaagatgtgaagaacttctacctgatgaccaacggcttccacatgacctggagcgtgaagctggatgagcacatcatccccctgggctccatggccatcaacagcatcagcaagctgacccagctgacccagagctccatgtacagcctgcccaatgcccccaccctggccgacctggaggatgacacccatgaggccagtgatgaccagcctgagaagccccactttgacagccgcagcgtcatctttgagctggacagctgcaatggaagtggcaaggtgtgcctggtgtacaagagcggcaagccagccctggccgaggacacagagatctggttcctggaccgggccctgtactggcacttcctgacagacaccttcaccgcctactaccgcctgctgatcacccacctgggcctgccccagtggcagtatgccttcaccagctatggcatcagcccccaggccaagcagtggttctccatgtacaagcccatcacctacaacaccaacctgctgacagaggagacagacagctttgtgaacaagctggaccccagcaaggtgttcaagagcaagaacaagatcgtcatccccaagaagaagggccctgtgcagcctgctgggggccagaagggccccagcggccccagcggccccagcaccagcagcaccagcaagagcagcagcggcagcggcaaccccaccaggaagtag

SEQ ID NO: 19151 - DNA, 390 bp, synthetic construct
  source 1..390: mol_type = other DNA; note = Synthetic coding sequence
atgatgacagacctgaagcagagccacagcgtgcggctgaatgatggccccttcatgcctgtgctgggcttcggcacctacgccccagaccacacccccaagagccaggccgctgaggccaccaaggtggccattgatgtgggcttccgccacatcgacagcgcctacctgtaccagaatgaggaggaggtgggccaggccatctgggagaagattgctgatggcaccgtgaagcgggaggagatcttctacaccatcaagctgtgggccaccttcttccgggcagagctggtgcacccagccctggagaggagcctgaagaagctgggccctgactatgtggacctcttcatcatccacgtgccctttgccatgaagggcagcagctag

SEQ ID NO: 19152 - DNA, 1257 bp, synthetic construct
  source 1..1257: mol_type = other DNA; note = Synthetic coding sequence
atgcaccctgagcccagcgagcccgccaccggcggcgctgctgagctggactgtgcccaggagcccggggtggaggagagcgctggggaccacggcagcgctggccggggcggctgcaaggaggagatcaatgaccccaaggagatctgtgtgggcagcagtgacaccagctaccacagccagcagaagcagagcggggacaatggcagcggcggccactttgcccaccccagagaagatcgggaggaccggggccccaggatgaccaagagcagcctgcagaagctgtgcaagcagcacaagctgtacatcaccccagccctgaatgacaccctgtacctgcacttcaagggctttgacagaattgagaacctggaggagtacacaggcctgcgctgcctgtggctgcagagcaatggcatccagaagattgagaacctggaggcccagacagagctgcgctgcctcttcctgcagatgaacctgctgaggaagattgagaacctggagcccctgcagaagctggatgccctgaacctgagcaacaactacatcaagaccatcgagaacctgagctgcctgcctgtgctgaacaccctgcagatggcccacaaccacctggagaccgtggaggacatccagcacctgcaggagtgcctgcggctgtgtgtgctggacctgagccacaacaagctgagtgaccctgagatcctgagcatcctggagagcatgccagacctgcgggtgctgaacctgatgggcaaccctgtgatccggcagatccccaactacagaagaacagtgacagtgcggctgaagcacctgacctacctggatgacaggcctgtgttccccaaggaccgggcctgtgccgaggcctgggcccggggcggctacgccgctgagaaggaggagcggcagcagtgggagagccgggagaggaagaagatcacagacagcattgaggccctggccatgatcaagcagagagctgaggagaggaagaggcagcgggagagccaggagcggggggagatgaccagcagtgatgatggagaaaatgtgcctgccagcgctgagggcaaggaggagcccccaggggaccgggagacccggcagaagatggagctgtttgtgaaggagagctttgaggccaaggatgagctgtgcccagagaagcccagcggggaggagccccctgtggaggccaagcgggaggatggagaccctgccaccgtgacagcctgtgagggctag

SEQ ID NO: 19153 - DNA, 2472 bp, synthetic construct
  source 1..2472: mol_type = other DNA; note = Synthetic coding sequence
atgggcaagaagaggaccaagggcaagacagtgcccattgatgacagcagcgagaccctggagcctgtgtgccgccacatcaggaagggcctggagcagggcaacctgaagaaggccctggtgaatgtggagtggaacatctgccaggactgcaagacagacaacaaggtgaaggacaaggccgaggaggagacagaggagaagcccagcgtgtggctgtgcctgaagtgtggccaccagggctgcggcaggaacagccaggagcagcacgccctgaagcactacctgacccccaggtctgagccccactgcctggtgctgagcctggacaactggagcgtgtggtgctacgtgtgtgacaatgaggtgcagtactgcagcagcaaccagctgggccaggtggtggactatgtgaggaagcaggccagcatcaccacccccaagccagctgagaaggacaatggaaatattgagctggagaacaagaagctggagaaggagagcaagaatgagcaggagcgggagaagaaggagaacatggccaaggaaaatccacccatgaacagcccctgccagatcaccgtgaagggcctgagcaacctgggcaacacctgcttcttcaatgctgtgatgcagaacctgagccagacccctgtgctgcgggagctgctgaaggaggtgaagatgagcggcaccatcgtgaagattgagcccccagacctggccctgacagagcccctggagatcaacctggagcccccaggccccctgaccctggccatgagccagttcctgaatgagatgcaggagaccaagaagggcgtggtgacccccaaggagctgttcagccaggtgtgcaagaaggctgtgcgcttcaagggctaccagcagcaggacagccaggagctgctgcgctacctgctggatggcatgagagctgaggagcaccagagggtgtccaagggcatcctgaaggcctttggaaacagcacagagaagctggatgaggagctgaagaacaaggtgaaggactatgagaagaagaagtccatgcccagctttgtggaccgcatctttggaggagagctgacctccatgatcatgtgtgaccagtgcaggacagtgtccctggtgcatgagagcttcctggacctgagcctgcctgtgctggatgaccagagcggcaagaagtctgtgaatgacaagaacctgaagaagacagtggaggatgaggaccaggacagcgaggaggagaaggacaatgacagctacatcaaggagaggagtgacatccccagcggcaccagcaagcacctgcagaagaaggccaagaagcaggccaagaagcaggccaagaaccagaggcggcagcagaagatccagggcaaggtgctgcacctgaatgacatctgcaccatcgaccacccagaagattctgaatatgaagctgagatgagcctgcagggcgaggtgaacatcaagagcaaccacatcagccaggagggcgtgatgcacaaggagtactgtgtgaaccagaaggacctgaatggccaggccaagatgattgagagcgtgacagacaaccagaagagcacagaggaggtggacatgaagaacatcaacatggacaatgacctggaggtgctgaccagcagccccaccaggaacctgaatggagcctacctgacagagggcagcaatggagaggtggacatcagcaatggcttcaagaacctgaacctgaatgctgccctgcacccagatgagatcaacatcgagatcctgaatgacagccacaccccaggcaccaaggtgtatgaggtggtgaatgaagatcctgagacagccttctgcaccctggccaaccgggaggtgttcaacacagatgagtgcagcatccagcactgcctgtaccagttcaccagaaatgagaagctgagagatgccaacaagctgctgtgtgaggtgtgcacccggcggcagtgcaatggccccaaggccaacatcaagggggagaggaagcacgtgtacaccaatgccaagaagcagatgctgatcagcctggcccctcctgtgctgaccctgcacctgaagcgcttccagcaggccggcttcaacctgaggaaggtgaacaagcacatcaagtttcctgagatcctggacctggcccccttctgcaccctgaagtgcaagaatgtggccgaggagaacaccagggtgctgtacagcctgtatggagtggtggagcacagcggcaccatgaggagcggccactacacagcctatgccaaggccaggacagccaacagccacctgagcaacctggtgctgcacggggacatcccccaggactttgagatggagagcaagggccagtggttccacatcagtgacacccacgtgcaggccgtgcccaccaccaaggtgctgaacagccaggcctacctgctcttctatgagcgcatcctgtag

SEQ ID NO: 19154 - DNA, 3204 bp, synthetic construct
  source 1..3204: mol_type = other DNA; note = Synthetic coding sequence
atgaacagcatggacagacacatccagcagaccaatgaccggctgcagtgcatcaagcagcacctgcagaacccagccaacttccacaatgctgccacagagctgctggactggtgtggggacccccgggccttccagaggccctttgagcagagcctgatgggctgcctgactgtggtgtcccgggtggccgcccagcagggctttgacctggacctgggctaccgcctgctggccgtgtgtgccgccaacagagacaagttcacccccaagtctgctgccctgctgagctcctggtgtgaggagctgggccgcctgctgctgctgcggcaccagaagagccggcagagcgaccccccaggcaagctgcccatgcagccccccctgagctccatgagctccatgaagcccaccctgagccacagtgatggcagcttcccctatgacagcgtgccctggcagcagaacaccaaccagcccccaggcagcctgtctgtggtgaccaccgtgtggggcgtgaccaacaccagccagagccaggtgctgggcaaccccatggccaatgccaacaaccccatgaaccctgggggcaaccccatggccagcggcatgaccaccagcaaccctggcctgaacagcccccagtttgctggccagcagcagcagttcagcgccaaggccggccctgcccagccctacatccagcagagcatgtatggccggcccaactacccaggcagcggcggctttggagccagctacccaggcggccccaatgccccagctggcatgggcatccccccccacacccggcccccagctgacttcacccagcctgctgctgctgctgctgctgctgctgtggccgctgctgctgccacagccacagccacagccacagccaccgtggccgccctgcaggagacccagaacaaggacatcaaccagtatggccccatgggccccacccaggcctacaacagccagttcatgaaccagcccggcccccggggccctgcctccatgggcggctccatgaacccagcctccatggctgctggcatgacccccagcggcatgagcggcccccccatgggcatgaaccagccccggcccccaggcatcagccccttcggcacccacggccagaggatgccccagcagacctacccaggcccccggccccagagcctgcccatccagaacatcaagaggccctacccaggagagcccaactacggcaaccagcagtatggccccaacagccagttccccacccagcccggccagtacccagcccccaaccccccccggcccctgaccagccccaactacccaggccagaggatgcccagccagcccagcagcggccagtaccccccacccaccgtgaacatgggccagtactacaagccagagcagttcaacggccagaacaacaccttcagcggcagcagctacagcaactacagccagggcaatgtgaaccggccccccaggcctgtgcctgtggccaactacccccacagccctgtgcccggcaaccccaccccacccatgaccccaggcagcagcatccccccctacctgagccccagccaggatgtgaagccacccttccccccagacatcaagcccaacatgtctgccctgcccccacctccagccaaccacaatgatgagctgcggctgaccttccctgtgagagatggagtggtgctggagcccttccggctggagcacaacctggccgtgagcaaccacgtgttccacctgcggcccaccgtgcaccagaccctgatgtggaggagtgacctggagctgcagttcaagtgctaccaccacgaggaccggcagatgaacaccaactggccagcctctgtgcaggtgtctgtgaatgccacccccctgaccatcgagcggggggacaacaagaccagccacaagcccctgcacctgaagcacgtgtgccagcctggaagaaacaccatccagatcaccgtgacagcctgctgctgcagccacctgtttgtgctgcagctggtgcaccggcccagcgtgcgctctgtgctgcagggcctgctgaagaagaggctgctgcctgctgagcactgcatcaccaagatcaagaggaacttcagctctgtggccgccagcagcggcaacaccaccctgaatggagaagatggagtggagcagacagccatcaaggtgtccctgaagtgccccatcaccttccgccgcatccagctgcctgcccggggccatgactgcaagcacgtgcagtgctttgacctggagagctacctgcagctgaactgtgagcggggcacctggcgctgccctgtgtgcaacaagacagccctgctggagggcctggaggtggaccagtacatgtggggcatcctgaatgccatccagcacagcgagtttgaggaggtgaccatcgaccccacctgctcctggaggcctgtgcccatcaagagtgacctgcacatcaaggatgatcctgatggcatccccagcaagcgcttcaagaccatgagccccagccagatgatcatgcccaacgtgatggagatgattgctgccctgggccctggccccagcccctaccccctgcccccacctcctgggggcaccaacagcaatgactacagcagccagggcaacaactaccagggccacggcaactttgacttcccccacggcaaccctgggggcacctccatgaatgacttcatgcacggccccccccagctgagccaccccccagacatgcccaacaacatggccgccctggagaagcccctgagccaccccatgcaggagaccatgcctcatgctggcagcagtgaccagccccaccccagcatccagcagggcctgcacgtgccccaccccagcagccagagcggcccccccctgcaccacagcggggcccctcctcctccacccagccagcccccccggcagcccccccaggccgcccccagcagccacccccacagcgacctgaccttcaaccccagcagcgccctggagggccaggccggggcccagggcgccagtgacatgcctgagcccagcctggacctgctgcctgagctgaccaacccagatgagctgctgagctacctggaccccccagacctgcccagcaacagcaatgatgacctgctgagcctgtttgagaacaactag

SEQ ID NO: 19155 - DNA, 1038 bp, synthetic construct
  source 1..1038: mol_type = other DNA; note = Synthetic coding sequence
atggatggagaggacatcccagacttcagcagcctgaaggaggagacagcctactggaaggagctgagcctgaagtacaagcagagcttccaggaggccagagatgagctggtggagttccaggagggcagccgggagctggaggccgagctggaggcccagctggtgcaggccgagcagaggaacagagacctgcaggccgacaaccagaggctgaagtatgaggtggaggccctgaaggagaagctggagcaccagtatgcccagagctacaagcaggtgtctgtgctggaggatgacctgagccagacccgggccatcaaggagcagctgcacaagtatgtgcgggagctggagcaggccaatgatgacctggagcgggccaagagggccaccatcgtgtccctggaggactttgagcagaggctgaaccaggccattgaaagaaatgccttcctggagagcgagctggatgagaaggagagcctgctggtgtctgtgcagaggctgaaggatgaggcccgggacctgcggcaggagctggccgtgcgggagcggcagcaggaggtgaccaggaagagcgcccccagcagccccaccctggactgtgagaagatggacagcgctgtgcaggccagcctgagcctgcctgccacccctgtgggcaaaggaacagagaacaccttccccagccccaaggccatccccaatggatttggcaccagccccctgaccccatctgcccgcatcagcgccctgaacatcgtgggggacctgctgaggaaggtgggcgccctggagagcaagctggccgcctgcaggaactttgccaaggaccaggccagcaggaagagctacatctctggaaatgtgaactgtggggtgctgaatggaaatggcaccaagttcagccgcagcggccacaccagcttctttgacaagggagctgtgaatggatttgatcctgcccctcctcctcctggcctgggcagcagccggcccagcagcgcccctggcatgctgcccctgtctgtgtag

SEQ ID NO: 19156 - DNA, 588 bp, synthetic construct
  source 1..588: mol_type = other DNA; note = Synthetic coding sequence
atgggcagccgggccagcaccctgctgagagatgaggagctggaggagatcaagaaggagaccggcttcagccacagccagatcacccggctgtacagccgcttcaccagcctggacaagggggagaatggcaccctgagccgggaggacttccagagaattcctgagctggccatcaaccccctgggggaccgcatcatcaatgccttcttcccagaaggagaggaccaggtgaacttccggggcttcatgaggaccctggcccacttccggcccatcgaggacaatgagaagagcaaggatgtgaatggacctgagcccctgaacagccgcagcaacaagctgcactttgccttccggctgtatgacctggacaaggatgagaagatcagcagagatgagctgctgcaggtgctgaggatgatggtgggcgtgaacatcagtgatgagcagctgggcagcattgctgacaggaccatccaggaggccgaccaggatggagacagcgccatctccttcacagaatttgtgaaggtgctggagaaggtggatgtggagcagaagatgagcatccgcttcctgcactag

SEQ ID NO: 19157 - DNA, 780 bp, synthetic construct
  source 1..780: mol_type = other DNA; note = Synthetic coding sequence
atggctgatgcctgctgcaccaggacctacgtgattgctgccagcaccatgtctgtgtgcagcagtgatgtgggccacgtgtcccgggtgagcagccccagcacctgcaccggcagctcctggcaggtggacaactgccaggagagctgctgtgagcccaggagctgtgccagcagctgctgcacccccagctgctgtgccccagccccctgcctggccctggtgtgtgcccctgtgtcctgtgagcccagcccctgccagagcggctgcacagacagctgcacccccagctgctgccagcagagcagctgccagcctgcctgctgcaccagcagcccctgccagcaggcctgctgcgtgcctgtgtgctgcaagagcaactgctgcaagcctgtgtgctgcgtgtccatctgcagcggggccagcagcccctgctgccagcagagcagctgccagagcgcctgctgcaccttcagcccctgccagcaggcctgctgcgtgcccatctgctgcaagcccatctgctgcgtgcctgtgtgcagcggggccagcagcctgtgctgccagaagagcagctgccagcctgcctgctgcaccaccagctgctgccggcccagcagctctgtgtccctgctgtgcaggcctgtgtgcaggcctgcctgctgcgtgcctgtgcccagctgctgcgtgcctgccagcagctgccagcccagctgctgccacccagccagctgcctgtccttcctgtgcaggcctgcctgcagccggctggcctgctag

SEQ ID NO: 19158 - DNA, 171 bp, synthetic construct
  source 1..171: mol_type = other DNA; note = Synthetic coding sequence
atgatctactacagcaactactacggcggctacggctatggaggcctgggctgcggctacggctgcggctaccggggctacggctgcggctatggaggctacggcggctatggaaatggctactactgccccagctgctacggccgctactggagctatggcttctactag

SEQ ID NO: 19159 - DNA, 897 bp, synthetic construct
  source 1..897: mol_type = other DNA; note = Synthetic coding sequence
atggccgccagcaccatgtctgtgtgcagcagcgcctacagcgacagctggcaggtggatgactgcccagagagctgctgtgagcccccctgcagcgcccccagctgctgtgccccagcccccagcctgagcctggtgtgcacccctgtgtcctgtgtgagcagcccctgctgccaggccgcctgtgagcccagcgcctgccagagcggctgcaccagcagctgcacccccagctgctgccagcagagcagctgccagcctgcctgctgcaccagcagcccctgccagcaggcctgctgcgtgcctgtgtgctgcaagacagtgtgctgcaagcctgtgtgctgcgtgcctgtgtgctgcggggccgccagcagctgctgccggcagagcagctgccagcctgcctgctgtgccagcagcagctgccagcctgcctgctgcgtgcctgtgtgctgcaagcctgtgtgctgcgtgtccacctgcagcgaggacagcagcagctgctgccagcagagcagctgccagcctgcctgctgcaccagcagcagctaccagcaggcctgctgcgtgcctgtgtgctgcaagacagtgtactgcaagcccatctgctgcgtgcctgtgtgcagccgggccagcagcagccgctgccagcagcccagctgccagcctgcctgctgcaccaccagctgctgccggcccagcagctctgtgtccctgctgtgccaccctgtgtgccgcagcacctgctgcgtgcctgtgagcagctgctgtgcccccaccagcagctgccagagcagctgctgcaggcctgccagctgtgtgtccctgctgtgcaggcctgccagcagccggctggcctgctacagcctgtgcagcggcaagaagagcagctgctag

SEQ ID NO: 19160 - DNA, 567 bp, synthetic construct
  source 1..567: mol_type = other DNA; note = Synthetic coding sequence
atgacagcccccagctgtgccttccctgtgcagttccggcagcccagcgtgtctggcctgagccagatcaccaagagcctgtacatcagcaatggagtggccgccaacaacaagctgatgctgagcagcaaccagatcaccatggtgatcaacgtgtctgtggaggtggtgaacaccctgtatgaggacatccagtacatgcaggtgcctgtggccgacagccccaacagccggctgtgtgacttctttgaccccatcgctgaccacatccacagcgtggagatgaagcagggccgcaccctgctgcactgtgccgccggcgtgagccgctctgctgccctgtgcctggcctacctgatgaagtaccacgccatgagcctgctggatgcccacacctggaccaagagctgccggcccatcatccggcccaacagcggcttctgggagcagctgatccactatgagttccagctgtttgggaagaacacagtgcacatggtgagcagccctgtgggcatgatcccagacatctatgagaaggaggtgcggctgatgatccccctgtag

SEQ ID NO: 19161 - DNA, 147 bp, synthetic construct
  source 1..147: mol_type = other DNA; note = Synthetic coding sequence
atgagctttgacaacaactaccacggcggccagggctacgccaagggcggcctgggctgcagctatggctgcggcctgagcggctacggctacgcctgctactgcccctggtgctatgaaagatcctggttcagcggctgcttctag

SEQ ID NO: 19162 - DNA, 192 bp, synthetic construct
  source 1..192: mol_type = other DNA; note = Synthetic coding sequence
atgagctacagcggcagctactacggcggcctgggctacggctgcggcggctttggaggcctgggctacggctacagctgtggctgcggcagcttccggcggctgggctacggctgcggctatggaggctaccgctacagctgctgccaccccagctgctacggcggctactggagcagcggcttctactag

SEQ ID NO: 19163 - DNA, 189 bp, synthetic construct
  source 1..189: mol_type = other DNA; note = Synthetic coding sequence
atgtgtggcagctactacggcaactactacggggaccacggctacggctgctgcggctatgagggcctgggctacggctacggcagcctgcgctgtggctacagcagctgctgcggctacggccacggctacggcagccgcttcttctgtggctgcggctacggctgcggcagcggctactactactag

SEQ ID NO: 19164 - DNA, 4227 bp, synthetic construct
  source 1..4227: mol_type = other DNA; note = Synthetic coding sequence
atgtggagcctgacagccagcgagggggagagcaccacagcccacttcttcctgggcgctggagatgagggcctgggcacccggggcatcggcatgaggcctgaggagagtgacagcgagctgctggaggatgaggaggatgaggtgcccccagagccccagatcatcgtgggcatctgtgccatgaccaagaagagcaagagcaagcccatgacccagatcctggagcggctgtgccgctttgactacctgactgtggtgatcctgggagaagatgtgatcctgaatgaacctgtggagaactggcccagctgccactgcctgatctccttccacagcaagggcttccccctggacaaggctgtggcctacagcaagctgaggaaccccttcctgatcaatgacctggccatgcagtactacatccaggacagaagagaggtgtaccgcatcctgcaggaggagggcatcgacctgcccaggtatgctgtgctgaacagagatcctgcccggcctgaggagtgcaacctgattgaaggagaggaccaggtggaggtgaatggagctgtgttccccaagccctttgtggagaagcctgtgtctgctgaggaccacaacgtgtacatctactaccccagcagcgctgggggcggcagccagaggctcttcaggaagattggcagccgcagctctgtgtacagccctgagagctctgtgaggaagacaggcagctacatctatgaggagttcatgcccacagatggaacagatgtgaaggtgtacacagtgggccctgactatgcccacgccgaggccaggaagagccctgccctggatggcaaggtggagcgggacagcgagggcaaggagatccgctaccctgtgatgctgacagccatggagaagctggtggccaggaaggtgtgtgtggccttcaagcagacagtgtgtggctttgacctgctgcgggccaacggccacagctttgtgtgtgatgtgaatggcttctcctttgtgaagaacagcatgaagtactatgatgactgtgccaagatcctgggcaacaccatcatgagggagctggccccccagttccagatcccctggagcatccccacagaagctgaggacatccccatcgtgcccaccaccagcggcaccatgatggagctgcgctgtgtgattgccatcatccgccacggggacaggacccccaagcagaagatgaagatggaggtgaagcacccccgcttctttgccctgtttgagaagcatggaggctacaagacaggcaagctgaagctgaagaggcctgagcagctgcaggaggtgctggacatcacccggctgctgctggccgagctggagaaggagcctggaggagaaattgaggagaagacaggcaagctggagcagctgaagtctgtgctggagatgtatggccacttcagcggcatcaacaggaaggtgcagctgacctactacccccatggagtgaaggccagcaatgaaggccaggacccccagcgggagaccctggcccccagcctgctgctggtgctgaagtggggcggggagctgaccccagctggccgggtgcaggccgaggagctgggccgggccttccgctgcatgtacccaggcggccagggcgactatgccggcttccctggctgcggcctgctgcggctgcacagcaccttcagacatgacctgaagatctatgccagtgatgagggccgggtgcagatgacagctgctgcctttgccaagggcctgctggccctggagggggagctgacccccatcctggtgcagatggtgaagagcgccaacatgaatggcctgctggacagtgatggagacagcctgagcagctgccagcaccgggtgaaggcccggctgcaccacatcctgcagcaggatgccccctttggacctgaggactatgaccagctggcccccaccaggagcaccagcctgctgaacagcatgaccatcatccagaaccctgtgaaggtgtgtgaccaggtgtttgccctgattgagaacctgacccaccagatccgggagaggatgcaggaccccaggtctgtggacctgcagctgtaccacagcgagaccctggagctgatgctgcagcgctggagcaagctggagcgggacttccggcagaagagcggccgctatgacatcagcaagatcccagacatctatgactgtgtgaagtatgatgtgcagcacaacggcagcctgggcctgcagggcacagctgagctgctgcggctgagcaaggccctggctgatgtggtgatcccccaggagtatggcatcagccgggaggagaagctggagattgctgtgggcttctgcctgcccctgctgaggaagatcctgctggacctgcagaggacccatgaagatgagagcgtgaacaagctgcaccccctgtacagcagaggagtgctgagccctggccgccacgtgaggacccggctgtacttcaccagcgagagccacgtgcacagcctgctgagcgtcttccgctatggaggcctgctggatgagacccaggatgcccagtggcagagggccctggactacctgagcgccatcagcgagctgaactacatgacccagatcgtcatcatgctgtatgaggacaacacccaggaccccctgtctgaggagcgcttccacgtggagctgcacttcagccctggggtgaagggcgtggaggaggagggcagcgccccagctggctgcggcttccggcctgccagcagtgaaaatgaggagatgaagaccaaccagggctccatggagaacctgtgccctgggaaggccagtgatgagccagaccgggccctgcagaccagcccccagcccccagagggccctggcctgcccaggaggagccccctcatccggaacaggaaggccggctccatggaggtgctgtctgagaccagcagcagcaggcctgggggctaccgcctcttcagcagcagccggcccccaacagagatgaagcagagcggcctgggcagccagtgcaccggcctcttcagcaccaccgtgctgggcggcagcagcagcgcccccaacctgcaggactatgcccggagccacggcaagaagctgcccccagccagcctgaagcacagagatggctttgagggctgcagcatggtgcccaccatctaccccctggagaccctgcacaatgccctgagcctgcggcaggtgtctgagttcctgagccgggtgtgccagaggcacacagatgcccaggcccaggccagcgctgccctgtttgacagcatgcacagcagccaggccagtgacaaccccttcagcccccccaggaccctgcacagcccccccctgcagctgcagcagaggtctgagaagccaccctggtacagcagcggccccagcagcacagtgagcagcgctggccccagcagccccaccaccgtggatggcaacagccagtttggcttcagtgaccagcccagcctgaacagccacgtggccgaggagcaccagggcctgggcctgctgcaggagaccccaggcagcggggcccaggagctgagcattgaaggagagcaggagctgtttgagcccaaccagagcccccaggtgccccccatggagaccagccagccctatgaggaggtgtcccagccctgccaggaggtgcctgacatcagccagccctgccaggacatcagcgaggccctgagccagccctgccagaaggtgcctgacatcagccagcagtgccaggagaaccacgacaatggaaaccacacctgccaggaggtgccccacatcagccagccctgccagaagagcagccagctgtgccagaaggtgtctgaggaggtgtgccagctgtgcctggagaacagcgaggaggtgtcccagccctgccagggcgtgtctgtggaggtgggcaagctggtgcacaagttccacgtgggcgtgggcagcctggtgcaggagaccctggtggaggtgggcagccctgctgaggagatccctgaggaggtgatccagccctaccaggagttctctgtggaggtgggccgcctggcccaggagaccagcgccatcaacctgctgagccagggcatccctgagattgacaagcccagccaggagttccctgaggagattgacctgcaggcccaggaggtgcctgaggagatcaactag

SEQ ID NO: 19165 - DNA, 705 bp, synthetic construct
  source 1..705: mol_type = other DNA; note = Synthetic coding sequence
atggagggcgccagcaggaacctggccagcaccccccgggtgcacgccaaggtgatgatgtacaggaaggagcagtacctggatgtgctgcacgccctgaaggtggtgcgctttgtgtctgatgccaccccccaggccgaggtgtacctgaggatgtaccagctggagagcggcaagctgcccaggagccccagcttccccctggagccagatgatgaggtgttcctggccatcgccaaggccatggaggagatggtggaggacagcgtggactgctactggatcaccaggagatttgtgaaccagctgaacaccaagtacagagacagcctgccccagctgcccaaggcctttgagcagtacctgaacctggaggatggccgcctgctgacccacctgaggatgtgcagcgctgcccccaagctgccctatgacctgtggttcaagcgctgctttgctggctgcctgcctgagagcagcctgcagagggtgtgggacaaggtggtgtctggcagctgcaagatcctggtgtttgtggccgtggagatcctgctgaccttcaagatcaaggtgatggccctgaacagcgctgagaagatcaccaagttcctggagaacatcccccaggacagcagtgatgccatcgtgtccaaggccatcgacctgtggcacaagcactgcggcacccctgtgcacagcagctag

SEQ ID NO: 19166 - DNA, 537 bp, synthetic construct
  source 1..537: mol_type = other DNA; note = Synthetic coding sequence
atgaccaccctgcgggccttcacctgtgatgacctcttccgcttcaacaacatcaacctggaccccctgacagagacctacggcatccccttctacctgcagtacctggcccactggccagagtacttcatcgtggccgaggcccctggaggagagctgatgggctacatcatgggcaaggccgagggctctgtggcccgggaggagtggcacggccacgtgacagccctgtctgtggcccctgagttccggcggctgggcctggccgccaagctgatggagctgctggaggagatcagcgagaggaaaggaggcttctttgtggacctgtttgtgcgggtgagcaaccaggtggccgtgaacatgtacaagcagctgggctacagcgtgtacagaacagtgattgagtactacagcgccagcaatggagagccagatgaagatgcctatgacatgaggaaggccctgagccgggacacagagaagaagagcatcatccccctgccccaccctgtgcggccagaagatattgaatag

SEQ ID NO: 19167 - DNA, 2373 bp, synthetic construct; identical to SEQ ID NO: 18522
  source 1..2373: mol_type = other DNA; note = Synthetic coding sequence

SEQ ID NO: 19168 - DNA, 3588 bp, synthetic construct
  source 1..3588: mol_type = other DNA; note = Synthetic coding sequence
atgtggagcctgacagccagcgagggggagagcaccacagcccacttcttcctgggcgctggagatgagggcctgggcacccggggcatcggcatgaggcctgaggagagtgacagcgagctgctggaggatgaggaggatgaggtgcccccagagccccagatcatcgtgggcatctgtgccatgaccaagaagagcaagagcaagcccatgacccagatcctggagcggctgtgccgctttgactacctgactgtggtgatcctgggagaagatgtgatcctgaatgaacctgtggagaactggcccagctgccactgcctgatctccttccacagcaagggcttccccctggacaaggctgtggcctacagcaagctgaggaaccccttcctgatcaatgacctggccatgcagtactacatccagggcgaccggcgggaggtgtaccgcatcctgcaggaggagggcatcgacctgcccaggtatgctgtgctgaacagagatcctgcccggcctgaggagtgcaacctgattgaaggagaggaccaggtggaggtgaatggagctgtgttccccaagccctttgtggagaagcctgtgtctgctgaggaccacaacgtgtacatctactaccccagcagcgctgggggcggcagccagaggctcttcaggaagattggcagccgcagctctgtgtacagccctgagagctctgtgaggaagacaggcagctacatctatgaggagttcatgcccacagatggaacagatgtgaaggtgtacacagtgggccctgactatgcccatgctgaggccaggaagagccctgccctggatggcaaggtggagcgggacagcgagggcaaggagatccgctaccctgtgatgctgacagccatggagaagctggtggccaggaaggtgtgtgtggccttcaagcagacagtgtgtggctttgacctgctgcgggccaacggccacagctttgtgtgtgatgtgaatggcttctcctttgtgaagaacagcatgaagtactatgatgactgtgccaagatcctgggcaacaccatcatgagggagctggccccccagttccagatcccctggagcatccccacagaagctgaggacatccccatcgtgcccaccaccagcggcaccatgatggagctgcgctgcgtcatcgccatcatcagacatggagacaggacccccaagcagaagatgaagatggaggtgaagcacccccgcttctttgccctgtttgagaagcacggcggctacaagacaggcaagctgaagctgaagaggcctgagcagctgcaggaggtgctggacatcacccggctgctgctggccgagctggagaaggagcccggcggggagattgaggagaagacaggcaagctggagcagctgaagtctgtgctggagatgtatggccacttcagcggcatcaacaggaaggtgcagctgacctactacccccacggcgtgaaggccagcaatgaaggccaggacccccagcgggagaccctggcccccagcctgctgctggtgctgaagtggggcggggagctgaccccagctggccgggtgcaggccgaggagctgggccgggccttccgctgcatgtacccaggcggccagggcgactatgccggcttccctggctgcggcctgctgcggctgcacagcaccttcagacatgacctgaagatctatgccagtgatgagggccgggtgcagatgacagctgctgcctttgccaagggcctgctggccctggagggggagctgacccccatcctggtgcagatggtgaagagcgccaacatgaatggcctgctggacagtgatggagacagcctgagcagctgccagcaccgggtgaaggcccggctgcaccacatcctgcagcaggatgcccccttcggcccagaagattatgaccagctggcccccaccaggagcaccagcctgctgaacagcatgaccatcatccagaaccctgtgaaggtgtgtgaccaggtgtttgccctgattgagaacctgacccaccagatccgggagaggatgcaggaccccaggtctgtggacctgcagctgtaccacagcgagaccctggagctgatgctgcagcgctggagcaagctggagcgggacttccggcagaagagcggccgctatgacatcagcaagatcccagacatctatgactgtgtgaagtatgatgtgcagcacaacggcagcctgggcctgcagggcacagctgagctgctgcggctgagcaaggccctggctgatgtggtgatcccccaggagtatggcatcagccgggaggagaagctggagattgctgtgggcttctgcctgcccctgctgaggaagatcctgctggacctgcagaggacccatgaagatgagtacagccggggcgtgctgagccctggaagacatgtgaggacccggctgtacttcaccagcgagagccacgtgcacagcctgctgtctgtgttccgctatggaggcctgctggatgagacccaggatgctgaccgggccctgcagaccagcccccagcccccagagggccctggcctgcccaggaggagccccctcatccggaacaggaaggccggctccatggaggtgctgtctgagaccagcagcagcaggcctgggggctaccgcctcttcagcagcagccggcccccaacagagatgaagcagagcggcctgggcagccagtgcaccggcctcttcagcaccaccgtgctgggcggcagcagcagcgcccccaacctgcaggactatgcccggagccacggcaagaagctgcccccagccagcctgaagcacagagatgagctgctgtttgtgcctgctgtgaagcgcttctctgtgtcctttgccaagcaccccaccaacggctttgagggctgcagcatggtgcccaccatctaccccctggagaccctgcacaatgccctgagcctgcggcaggtgccccccatggagaccagccagccctatgaggaggtgtcccagccctgccaggaggtgcctgacatcagccagccctgccaggacatcagcgaggccctgagccagccctgccagaaggtgcctgacatcagccagcagtgccaggagaaccacgacaatggaaaccacacctgccaggaggtgccccacatcagccagccctgccagaagagcagccagctgtgccagaaggtgtctgaggaggtgtgccagctgtgcctggagaacagcgaggaggtgtcccagccctgccagggcgtgtctgtggaggtgggcaagctggtgcacaagttccacgtgggcgtgggcagcctggtgcaggagaccctggtggaggtgggcagccctgctgaggagatccctgaggaggtgatccagccctaccaggagttctctgtggaggtgggccgcctggcccaggagaccagcgccatcaacctgctgagccagggcatccctgagattgacaagcccagccaggagttccctgaggagattgacctgcaggcccaggaggtgcctgaggagatcaactag

SEQ ID NO: 19169 - DNA, 240 bp, synthetic construct
  source 1..240: mol_type = other DNA; note = Synthetic coding sequence
atgtgctgcaactactacggcaacagctgtggctacggcagcggctgcggctgcggctacggcagcggcagcggctgcggctgcggctacggcaccggctacggctgcggctacggctgcggcttcggcagccactacggctgcggctacggcaccggctacggctgcggctacggcagcggcagcggctactgcggctaccggcccttctgcttccgccgctgctacagcagctgctag

SEQ ID NO: 19170 - DNA, 1767 bp, synthetic construct
  source 1..1767: mol_type = other DNA; note = Synthetic coding sequence
atgaagctggagttcacagagaagaactacaacagctttgtgctgcagaacctgaaccggcagaggaagaggaaggagtactgggacatggccctgtctgtggacaaccacgtgttctttgcccacagaaatgtgctggccgctgtgagccccctggtgcgcagcctcatcagcagcaatgacatgaagacagcagatgagctgttcatcaccatcgacaccagctacctgagccctgtgacagtggaccagctgctggactacttctacagcggcaaggtggtgatcagcgagcagaatgtggaggagctgctgcggggggcccagtacttcaacaccccccggctgcgggtgcactgcaatgacttcctgatcaagagcatctgccgggccaactgcctgcgctacctgttcctggccgagctgtttgagctgaaggaggtgtctgatgtggcctacagcggcatccgggacaacttccactactgggccagccctgagggctccatgcacttcatgcgctgcccccctgtgatcttcggccgcctgctgagagatgagaacctgcacgtgctgaatgaagaccaggccctgagcgccctgatcaactgggtgtacttcaggaaggaggaccgggagaagtacttcaagaagttcttcaactacatcaacctgaatgctgtgagcaacaagaccctggtgtttgccagcaacaagctggtgggcatggagaacaccagcagccacaccaccctgattgaatctgtgctgatggacaggaagcaggagcggccctgcagcctgctggtgtaccagaggaagggggccctgctggacagcgtggtgatcctgggcggccagaaggcccacggccagttcaatgatggagtgtttgcctacatcatccaggagaacctgtggatgaagctgagtgacatgccctacagagctgctgccctgagcgccaccagcgctggccgctacatctacatcagcggcggcaccacagagcagatcagcggcctgaagacagcctggaggtatgacatggatgacaacagctggaccaagctgcctgacctgcccatcggcctggtgttccacaccatggtgacctgtggcggcaccgtgtacagcgtgggcggcagcatcgcccccaggagatatgtgagcaacatctaccgctatgatgagaggaaggaggtgtggtgcctggccggcaagatgagcatccccatggatggaacagctgtgatcaccaagggggacagacacctgtacatcgtgacaggccgctgcctggtgaagggctacatcagccgggtgggcgtggtggactgctttgacaccagcactggagatgtggtgcagtgcatcaccttccccatcgagttcaaccaccggcccctgctgtccttccagcaggacaacatcctgtgtgtgcacagccaccggcagagcgtggagatcaacctgcagaaggtgaaggccagcaagaccaccacctctgtgcctgtgctgcccaacagctgccccctggatgtgtcccatgccatctgcagcatcggggacagcaaggtgtttgtgtgtggcggcgtgaccacagccagtgatgtgcagaccaaggactacaccatcaaccccaatgccttcctgctggaccagaagacaggcaagtggaagaccctggcccctcctcctgaggccctggactgcccagcctgctgcctggccaagctgccctgcaagatcctgcagaggatctag

SEQ ID NO: 19171 - DNA, 2208 bp, synthetic construct
  source 1..2208: mol_type = other DNA; note = Synthetic coding sequence
atgatccccccccaggaggccagcgccaggagaagagaaattgaggacaagctgaagcaggaggaggagaccctgtccttcatccgggacagcctggagaagagtgaccagctgaccaagaacatggtgtccatcctgagcagctttgagagccggctgatgaagctggagaacagcatcatccctgtgcacaagcagacagagaacctgcagaggctgcaggagaatgtggagaagaccctgagctgcctggaccacgtgatctcctactaccacgtggccagtgacacagagaagatcatccgggagggccccaccggccgcctggaggagtacctgggctccatggccaagatccagaaggctgtggagtacttccaggacaacagcccagacagccctgagctgaacaaggtgaagctgctgtttgagcggggcaaggaggccctggagagcgagttccgcagcctgatgaccaggcacagcaaggtggtgtcccctgtgctgatcctggacctgatctctggagatgatgacctggaggcccaggaggatgtgaccctggagcacctgcctgagagcgtgctgcaggacgtcatccgcatcagccgctggctggtggagtatggaagaaaccaggacttcatgaatgtgtactaccagatccgcagcagccagctggacaggagcatcaagggcctgaaggagcacttccacaagagcagcagcagcagtggagtgccctacagccctgccatccccaacaagaggaaggacacccccaccaagaagcctgtgaagaggcctggcaccatcaggaaggcccagaacctgctgaagcagtacagccagcacggcctggatggcaagaagggcggcagcaacctgatccccctggagggcctgctgccctgcaccccccggggcggcctgcccggcccctggatcaatgctgcctgtgtgtgtgccgctgacatcagccctggccacgagcatgacttccgggtgaagcacctgtctgaggccctgaatgacaagcacggccccctggccggcagagatgacatgctggatgtggagacagatgcctacatccactgtgtgtctgcctttgtgaagctggcccagagcgagtaccagctgctggccgacatcatccctgagcaccaccagaagaagacctttgacagcctcatccaggatgccctggatggcctgatgctggagggagaaaatattgtgtctgctgccaggaaggccatcgtgagacatgacttcagcacagtgctgactgtgttccccatcctgcggcacctgaagcagaccaagccagagtttgaccaggtgctgcagggcacagctgccagcaccaagaacaagctgcccggcctcatcacctccatggagaccatcggggccaaggccctggaggactttgctgacaacatcaagaatgaccctgacaaggagtacaacatgcccaaggatggcaccgtgcatgagctgaccagcaatgccatcctcttcctgcagcagctgctggacttccaggagacagctggggccatgctggccagccaggagaccagcagcagcgccaccagctacagcagcgagttcagcaagaggctgctgagcacctacatctgcaaggtgctgggcaacctgcagctgaacctgctgagcaagagcaaggtgtatgaggaccctgccctgagcgccatcttcctgcacaacaactacaactacatcctgaagagcctggagaagtctgagctgatccagctggtggccgtgacccagaagacagctgagaggagctaccgggagcacatcgagcagcagatccagacctaccagaggtcctggctgaaggtgacagactacatcgccgagaagaacctgcccgtcttccagcccggggtgaagctgcgggacaaggagcggcagatcatcaaggagcgcttcaagggcttcaatgatggcctggaggagctgtgcaagatccagaaggcctgggccatcccagacacagagcagagggaccgcatccggcaggcccagaagaccatcgtgaaggagacctacggggccttcctgcagaagtttggatctgtgcccttcaccaagaaccctgagaagtacatcaagtatggagtggagcaggtgggggacatgattgaccggctgtttgacaccagcgcctag

SEQ ID NO: 19172 - DNA, 378 bp, synthetic construct
  source 1..378: mol_type = other DNA; note = Synthetic coding sequence
atggccggggccggccccaccatgctgctgcgggaggagaatggctgctgcagccggcggcagagcagcagcagcgctggggacagtgatggagagcgggaggacagcgctgctgagcgggcccggcagcagctggaggccctgctgaacaagaccatgaggatccgcatgacagatggccgcaccctggtgggctgcttcctgtgcacagaccgggactgcaacgtcatcctgggcagcgcccaggagttcctgaagcccagcgacagcttctctgctggggagccccgggtgctgggcctggccatggtgcccggccaccacatcgtgtccattgaggtgcagcgggagagcctgaccggccccccctacctgtag

SEQ ID NO: 19173 - DNA, 477 bp, synthetic construct
  source 1..477: mol_type = other DNA; note = Synthetic coding sequence
atgctgctgctggactgcaaccctgaggtggatggcctgaagcacctgctggagactggagcctctgtgaatgcccccccagacccctgcaagcagagccctgtgcacctggccgccggcagcggcctggcctgcttcctgctgtggcagctgcagacaggagctgacctgaaccagcaggatgtgctgggggaggcccccctgcacaaggccgccaaggtgggcagcctggagtgcctgagcctgctggtggccagtgatgcccagattgacctgtgcaacaagaatggccagacagctgaggacctggcctggagctgtggcttcccagactgtgccaagttcctgaccaccatcaagtgcatgcagaccatcaaggccagcgagcacccagacagaaatgactgtgtggccgtgctgcggcagaagaggagcctgggctctgtggagaacaccagcggcaagaggaaatgttag

SEQ ID NO: 19174 - DNA, 8712 bp, synthetic construct
  source 1..8712: mol_type = other DNA; note = Synthetic coding sequence
atgaggggccggcggggccggccccccaagcagcctgctgccccagctgctgagcgctgtgccccagcccctcctcctcctcctcctccacccaccagcggccccatcggcggcctgcggagccgccaccggggcagcagccggggccgctgggccgccgcccaggccgaggtggcccccaagacccggctgagcagcccccggggcggcagcagcagcaggaggaagcccccacctcctcctccagccccacccagcaccagcgcccctggccggggcggccggggcggcggcggcggccgcactggaggcggcggcggcggcggccacctggcccggaccacagctgcccggcgggctgtgaacaaggtggtgtatgatgaccatgaaagtgaggaggaggaggaggaggaggacatggtgtctgaggaggaggaggaggaggatggagatgctgaggagacccaggacagtgaagatgatgaagaagatgagatggaggaggatgatgatgacagcgactacccagaggagatggaggatgatgatgatgatgccagctactgcacagagagcagcttccgcagccacagcacctacagcagcaccccaggccgcaggaagccccgggtgcaccggcccaggagccccatcctggaggagaaggacatcccccccctggagttccccaagagcagcgaggacctgatggtgcccaatgagcacatcatgaatgtgattgccatctatgaggtgctgaggaactttggcaccgtgctgcggctgagccccttccgctttgaggacttctgtgccgccctggtgtcccaggagcagtgcaccctgatggccgagatgcacgtggtgctgctgaaggctgtgctgcgggaggaggacaccagcaacaccacctttggacctgctgacctgaaggacagcgtgaacagcaccctgtacttcattgatggcatgacctggccagaggtgctgcgggtgtactgtgagagtgacaaggagtaccaccacgtgctgccctaccaggaggccgaggactacccctacggccctgtggagaacaagatcaaggtgctgcagttcctggtggaccagttcctgaccaccaacatcgcccgggaggagctgatgtctgaaggagtcatccagtatgatgaccactgccgggtgtgccacaagctgggggacctgctgtgctgtgagacctgcagcgctgtgtaccacctggagtgtgtgaagccacccctggaggaggtgcctgaagatgagtggcagtgtgaggtgtgtgtggcccacaaggtgcctggggtgacagactgtgtggccgagatccagaagaacaagccctacatcagacatgagcccatcggctatgacaggagcaggaggaagtactggttcctgaacagaagactcatcatcgaggaggacacagaaaatgaaaatgagaagaagatctggtactacagcaccaaggtgcagctggccgagctgattgactgcctggacaaggactactgggaggccgagctgtgcaagatcctggaggagatgagggaggagatccaccgccacatggacatcacagaggacctgaccaacaaggcccggggcagcaacaagagcttcctggccgccgccaatgaggagatcctggagagcatccgggccaagaagggggacatcgacaacgtgaagagccctgaggagacagagaaggacaagaatgaaacagaaaatgacagcaaggatgctgagaagaaccgggaggagtttgaggaccagagcctggagaaggacagtgatgacaagaccccagatgatgatcctgagcagggcaagtctgaggagcccacagaggtgggggacaagggcaacagcgtgtctgccaacctgggggacaacaccaccaatgccaccagcgaggagaccagccccagcgagggccgcagccctgtgggctgcctgtctgagaccccagacagcagcaacatggccgagaagaaggtggccagcgagctgccccaggatgtgcctgaggagcccaacaagacctgtgagagcagcaacaccagcgccaccaccaccagcatccagcccaacctggagaacagcaacagcagcagcgagctgaacagcagccagagcgagagcgccaaggctgctgatgatcctgaaaatggagagcgggagagccacacccctgtgtccatccaggaggagatcgtgggggacttcaagtctgagaagagcaatggagagctgtctgagagccctggggccggcaagggggccagcggcagcacccgcatcatcacccggctgagaaatccagacagcaagctgagccagctgaagagccagcaggtggccgccgccgcccacgaggccaacaagctgttcaaggagggcaaggaggtgctggtggtgaacagccagggcgagatcagccggctgagcaccaagaaggaggtgatcatgaagggcaacatcaacaactacttcaagctgggccaggagggcaagtacagagtgtaccacaaccagtacagcaccaacagctttgccctgaacaagcaccagcacagagaagatcatgacaagaggaggcacctggcccacaagttctgcctgaccccagctggggagttcaagtggaatggatctgtgcacggcagcaaggtgctgaccatcagcaccctgcggctgaccatcacccagctggagaacaacatccccagcagcttcctgcaccccaactgggccagccaccgggccaactggatcaaggctgtgcagatgtgcagcaagccccgggagtttgccctggccctggccatcctggagtgtgctgtgaagcctgtggtgatgctgcccatctggagggagagcctgggccacacccggctgcacaggatgaccagcattgagcgggaggagaaggagaaggtgaagaagaaggagaagaagcaggaggaggaggagaccatgcagcaggccacctgggtgaagtacaccttccctgtgaagcaccaggtgtggaagcagaagggggaggagtacagagtgacaggctatggaggctggagctggatcagcaagacccacgtgtacagatttgtgcccaagctgcccggcaacaccaacgtgaactacaggaagagcctggagggcaccaagaacaacatggatgagaacatggatgaaagtgacaagaggaagtgcagccgcagccccaagaagatcaagattgaaccagattctgagaaggatgaggtgaagggcagtgatgctgccaagggagctgaccagaatgagatggacatcagcaagatcacagagaagaaggaccaggatgtgaaggagctgctggacagcgacagcgacaagccctgcaaggaggagcccatggaggtggatgatgacatgaagacagagagccacgtgaactgccaggagagcagccaggtggatgtggtgaatgtgtctgagggcttccacctgcggaccagctacaagaagaagaccaagagcagcaagctggatggcctgctggagcggcgcatcaagcagttcaccctggaggagaagcagaggctggagaagatcaagctggagggcggcatcaagggcatcggcaagaccagcaccaacagcagcaagaacctgtctgagagccctgtgatcaccaaggccaaggagggctgccagagcgacagcatgaggcaggagcagagccccaatgccaacaatgaccagcctgaggacctgatccagggctgcagcgagagtgacagctctgtgctgaggatgtctgaccccagccacaccaccaacaagctgtaccccaaggacagagtgctggatgatgtgtccatccgcagccctgagaccaagtgccccaagcagaacagcattgaaaatgacatcgaggagaaggtgtctgacctggccagccggggccaggagcccagcaagagcaagaccaagggaaatgacttcttcattgatgacagcaagctggccagcgcagatgacatcggcaccctcatctgcaagaacaagaagcccctcatccaggaggagagtgacaccatcgtgagcagcagcaagagcgccctgcacagctctgtgcccaagagcaccaatgacagagatgccacccccctgagccgggccatggactttgagggcaagctgggctgtgacagcgagagcaacagcaccctggagaacagcagtgacacagtgtccatccaggacagcagcgaggaggacatgattgtgcagaacagcaatgaaagcatcagcgagcagttccgcacccgggagcaggatgtggaggtgctggagcccctgaagtgtgagctggtgtctggagagagcacaggcaactgtgaggaccggctgcctgtgaagggcacagaggccaacgggaagaagcccagccagcagaagaagctggaggagaggcctgtgaacaagtgcagcgaccagatcaagctgaagaacaccacagacaagaagaacaatgaaaatcgggagagcgagaagaagggccagaggaccagcaccttccagatcaacgggaaggacaacaagcccaagatctacctgaagggagaatgtctgaaggagatcagcgagagccgggtggtgtctggaaatgtggagcccaaggtgaacaacatcaacaagatcatcccagaaaatgacatcaagagcctgactgtgaaggagagcgccatccggcccttcatcaatggagatgtgatcatggaggacttcaatgaaagaaacagcagcgagaccaagagccacctgctgagcagcagtgatgctgagggcaactacagagacagcctggagaccctgcccagcaccaaggagagtgacagcacccagaccaccaccccatctgccagctgcccagagagcaacagcgtgaaccaggtggaggacatggagattgagaccagcgaggtgaagaaggtgaccagcagccccatcaccagcgaggaggagagcaacctgagcaatgacttcattgatgaaaatggcctgcccatcaacaagaatgaaaatgtgaatggagagagcaagaggaagacagtcatcacagaggtgaccaccatgaccagcacagtggccacagagagcaagacagtcatcaaggtggagaagggggacaagcagacagtggtgagcagcacagagaactgtgccaagagcacagtgaccaccaccaccaccaccgtgaccaagctgagcacccccagcactggaggctctgtggacatcatctctgtgaaggagcagagcaagacagtggtgaccaccaccgtgacagacagcctgaccaccaccggcggcaccctggtgacctccatgacagtgtccaaggagtacagcacccgggacaaggtgaagctgatgaagttcagccggcccaagaagaccaggtctggaacagccctgcccagctacaggaagtttgtgaccaagagcagcaagaagagcatctttgtgctgcccaatgatgacctgaagaagctggccaggaagggcggcatccgggaggtgccctacttcaactacaatgccaagccagccctggacatctggccctaccccagcccccggcccaccttcggcatcacctggagataccgcctgcagacagtgaagagcctggccggcgtgtccctgatgctgcggctgctgtgggccagcctgcgctgggatgacatggccgccaaggcccctcctgggggcggcaccaccaggacagagaccagcgagacagagatcaccaccacagagatcatcaagagaagagatgtgggcccctacggcatccgctctgagtactgcatcaggaagatcatctgccccatcggcgtgcctgagacccccaaggagacccccaccccccagaggaagggcctgcggagcagcgccctgcggcccaagaggcctgagacccccaagcagacaggccctgtgatcatcgagacctgggtggccgaggaggagctggagctgtgggagatccgggcctttgctgagcgggtggagaaggagaaggcccaggccgtggagcagcaggccaagaagaggctggagcagcagaagcccaccgtcatcgccaccagcaccaccagccccaccagcagcaccaccagcaccatcagccctgcccagaaggtgatggtggcccccatcagcggctctgtgaccaccggcaccaagatggtgctgaccaccaaggtgggcagccctgccaccgtgaccttccagcagaacaagaacttccaccagacctttgccacctgggtgaagcagggccagagcaacagcggcgtggtgcaggtgcagcagaaggtgctgggcatcatccccagcagcacaggcaccagccagcagaccttcaccagcttccagcccaggacagccaccgtgaccatccggcccaacaccagcggcagcggcggcaccaccagcaacagccaggtgatcaccggcccccagatccggcccggcatgaccgtcatccgcacccccctgcagcagagcaccctgggcaaggccatcatccgcacccctgtgatggtgcagcccggggccccccagcaggtgatgacccagatcatccggggccagcctgtgtccacagctgtgtctgcccccaacacagtgagcagcaccccaggccagaagagcctgaccagcgccaccagcaccagcaacatccagagcagcgccagccagcccccccggccccagcagggccaggtgaagctgaccatggcccagctgacccagctgacccagggccatggaggcaaccagggcctgactgtggtgatccagggccagggccagaccaccggccagctgcagctgatcccccagggcgtgacagtgctgcccggccctggccagcagctgatgcaggccgccatgcccaatggaacagtgcagcgcttcctgttcacccccctggccaccacagccaccacagccagcaccaccaccaccaccgtgtccaccacagctgctggcactggagagcagaggcagagcaagctgagcccccagatgcaggtgcaccaggacaagaccctgcccccagcccagagcagctctgtgggccctgctgaggcccagccccagacagcccagcccagcgcccagccccagccccagacccagccccagagccctgcccagcctgaggtgcagacccagcctgaggtgcagacccagaccaccgtgagcagccacgtgcccagcgaggcccagcccacccacgcccagagcagcaagccccaggtggccgcccagagccagccccagagcaatgtgcagggccagagccctgtgcgggtgcagagccccagccagacccgcatccggcccagcacccccagccagctgagccctggccagcagagccaggtgcagaccaccaccagccagcccatccccatccagccccacaccagcctgcagatccccagccagggccagccccagagccagccccaggtggtgatgaagcacaatgctgtgattgagcacctgaagcagaagaagtccatgaccccagctgagcgggaggagaaccagaggatgattgtgtgcaaccaggtgatgaagtacatcctggacaagattgacaaggaggagaagcaggccgccaagaagaggaagcgggaggagagcgtggagcagaagaggagcaagcagaatgccaccaagctgagcgccctgctcttcaagcacaaggagcagctgcgggcagagatcctgaagaagagggccctgctggacaaggacctgcagatcgaggtgcaggaggagctgaagagggacctgaagatcaagaaggagaaggacctgatgcagctggcccaggccacagctgtggccgccccctgcccccctgtgaccccagcccccccagcccccccagcccccccacccagccccccacctcctcctgctgtgcagcacacaggcctgctgagcacccccaccctgcctgctgccagccagaagaggaagcgggaggaggagaaggacagcagcagcaagagcaagaagaagaagatgatcagcaccaccagcaaggagaccaagaaggacaccaagctgtactgcatctgcaagaccccctatgatgagagcaagttctacatcggctgtgaccgctgccagaactggtaccacggccgctgtgtgggcatcctgcagagcgaggccgagctgattgatgaatatgtgtgcccccagtgccagagcacagaagatgccatgacagtgctgacccccctgacagagaaggactatgagggcctgaagagggtgctgcggagcctgcaggcccacaagatggcctggcccttcctggagcctgtggaccccaatgatgccccagactactacggcgtcatcaaggagcccatggacctggccaccatggaggagcgggtgcagaggcgctactatgagaagctgacagaatttgtggccgacatgaccaagatctttgacaactgccgctactacaaccccagcgacagccccttctaccagtgtgccgaggtgctggagagcttctttgtgcagaagctgaagggcttcaaggccagccgcagccacaacaacaagctgcagagcacagccagctag

SEQ ID NO: 19175 - DNA, 2628 bp, synthetic construct
  source 1..2628: mol_type = other DNA; note = Synthetic coding sequence
atgaacttccaggccggcggcggccagagcccccagcagcagcagcagctggccggcggccccccccagcagtttgccctgagcaacagcgctgccatccgggcagagatccagagatttgagagcgtgcaccccaacatctatgccatctatgacctgattgaaagaattgaggacctggccctgcagaaccagatccgggagcacgtgatcagcattgaggacagctttgtgaacagccaggagtggaccctgagccgctctgtgcctgagctgaaggtgggcatcgtgggcaacctgagcagcggcaagagcgccctggtgcaccgctacctgaccggcacctacgtgcaggaggagagccctgagggcggccgcttcaagaaggagatcgtggtggatggccagagctacctgctgctgatcagagatgagggcggccccccagagctgcagtttgctgcctgggtggatgctgtggtgtttgtgttcagcctggaggatgagatctccttccagacagtgtacaactacttcctgcggctgtgcagcttcagaaatgccagcgaggtgcccatggtgctggtgggcacccaggatgccatctctgctgccaacccccgggtgattgatgacagccgggccaggaagctgagcacagacctgaagcgctgcacctactatgagacctgtgccacctacggcctgaatgtggagagggtcttccaggatgtggcccagaaggtggtggccctgaggaagaagcagcagctggccatcggcccctgcaagagcctgcccaacagccccagccacagcgctgtgtctgctgccagcatcccagctgtgcacatcaaccaggccaccaacggcggcggcagcgccttcagtgactacagcagctctgtgcccagcacccccagcatcagccagcgggagctgcgcatcgagaccatcgccgccagcagcacccccacccccatcaggaagcagagcaagaggaggagcaacatcttcaccagcaggaaaggagctgacctggaccgggagaagaaggctgctgagtgcaaggtggacagcatcggcagcggccgggccatccccatcaagcagggcatcctgctgaagaggtctgggaagagcctgaacaaggagtggaagaagaagtatgtgaccctgtgtgacaatggcctgctgacctaccaccccagcctgcatgactacatgcagaacatccacggcaaggagattgacctgctgcggaccaccgtgaaggtgcctgggaagaggctgccccgggccaccccagccacagcccctggcaccagcccccgggccaacggcctgtctgtggagaggagcaacacccagctgggcggcggcaccggggccccccacagcgccagcagcgccagcctgcacagcgagcggcccctgagcagcagcgcctgggccggccccaggcctgagggcctgcaccagaggagctgcagcgtgtcctctgctgaccagtggagcgaggccaccaccagcctgcccccaggcatgcagcacccagccagcggccctgctgaggtgctgagcagcagccccaagctggaccccccacccagcccccacagcaacaggaagaagcacaggaggaagaagagcacaggcacccccaggccagatggccccagcagcgccacagaggaggccgaggagagctttgaatttgtggtggtgtccctgaccggccagacctggcactttgaggccagcacagctgaggagcgggagctgtgggtgcagagcgtgcaggcccagatcctggccagcctgcagggctgccgcagcgccaaggacaagacccggctgggcaaccagaatgctgccctggccgtgcaggccgtgaggacagtgcggggcaacagcttctgcatcgactgtgatgcccccaacccagactgggccagcctgaacctgggcgccctgatgtgcattgaatgttctggcatccaccgccacctgggcgcccacctgagccgggtgcgcagcctggacctggatgactggcccccagagctgctggccgtgatgacagccatgggaaatgccctggccaacagcgtgtgggagggcgccctgggcggctacagcaagccaggcccagatgcctgccgggaggagaaggagcgctggatccgggccaagtatgagcagaagctgttcctggcccccctgcccagcagtgatgtgcccctgggccagcagctgctgcgggctgtggtggaggatgacctgcggctgctggtgatgctgctggcccacggcagcaaggaggaggtgaatgagacctatggagatggagatggccgcacagccctgcacctgagcagcgccatggccaacgtggtgttcacccagctgctgatctggtacggcgtggatgtgcgcagcagagatgcccggggcctgacccccctggcctatgccaggagagctggcagccaggagtgtgccgacatcctgatccagcacggctgccctggagagggctgcggcctggcccccacccccaaccgggagcccgccaacggcaccaaccccagcgctgagctgcacaggagccccagcctgctgtag

SEQ ID NO: 19176 - DNA, 1761 bp, synthetic construct
  source 1..1761: mol_type = other DNA; note = Synthetic coding sequence
atgggcggggccctgggcctgcggcagctgcccatctgtgccccagcctgccggcccagcagcggccacagcccctgggccgccgccagccccaaccccaaccagtggagcagccgcagccgctggtgctgcctgcggcgctctgaggcccggcgcagctgcaggcctgtgggccgggccgcccctggccccacccgggccatggcccggcctgccaccagcacccggcgcagcgcctgcccccccctgacccccaccccagccctgagaattgcctggaggctgctgagcgccaccagcaggaccagcaggatggcctctgtgctgagccggggccgggtgcgctgcccctggcatggagcctgcttcaacatcagcactggagacctggaggacttccctggcctggacagcctgcacaagttccaggtgaagattgagaaggagaaggtgtatgtgcgggccagcaagcaggccctgcagctgcagaggaggaccaaggtgatggccaagtgcatcagccccagcgctggctacagcagcagcaccaacgtgctgattgtgggcgctggagctgctggcctggtgtgtgccgagaccctgcggcaggagggcttcagtgaccgcatcgtgctgtgcaccctggacagacacctgccctatgaccggcccaagctgagcaagagcctggacacccagcctgagcagctggccctgcggcccaaggagttcttccgggcctacggcatcgaggtgctgacagaggcccaggtggtgacagtggatgtgaggaccaagaaggtggtgttcaaggatggcttcaagctggagtacagcaagctgctgctggcccctggcagcagccccaagaccctgagctgcaagggcaaggaggtggagaatgtgttcaccatccgcaccccagaagatgccaacagagtggtgcggctggcccggggcagaaatgtggtggtggtgggcgccggcttcctgggcatggaggtggccgcctacctgacagagaaggcccacagcgtgtctgtggtggagctggaggagacccccttccgccgcttcctgggggagcgggtgggccgggccctgatgaagatgtttgagaacaacagagtgaagttctacatgcagacagaggtgtctgagctgcggggccaggagggcaagctgaaggaggtggtgctgaagagcagcaaggtggtgcgggcagatgtgtgtgtggtgggcattggagctgtgcctgccaccggcttcctgcggcagagcggcatcggcctggacagccggggcttcatccctgtgaacaagatgatgcagaccaacgtgcctggggtgtttgctgctggagatgctgtgaccttccccctggcctggaggaacaacaggaaggtgaacatcccccactggcagatggcccacgcccagggccgggtggccgcccagaacatgctggcccaggaggccgagatgagcacagtgccctacctgtggacagccatgtttgggaagagcctgcgctatgccggctatggagagggctttgatgatgtgatcatccagggcgacctggaggagctgaagtttgtggccttctacaccaagggagatgaggtgattgctgtggcctccatgaactatgaccccatcgtgtccaaggtggccgaggtgctggccagcggccgggccatcaggaagcgggaggtggagactggagacatgtcctggctgaccgggaagggcagctag

SEQ ID NO: 19177 - DNA, 1521 bp, synthetic construct
  source 1..1521: mol_type = other DNA; note = Synthetic coding sequence
atgcctgtgcaggccgcccagtggacagagttcctgagctgccccatctgctacaatgaatttgatgaaaatgtgcacaagcccatcagcctgggctgcagccacacagtgtgcaagacctgcctgaacaagctgcacaggaaggcctgcccctttgaccagacagccatcaacacagacattgatgtgctgcctgtgaactttgccctgctgcagctggtgggcgcccaggtgcctgaccaccagagcatcaagctgagcaacctgggggagaacaagcactatgaggtggccaagaagtgtgtggaggacctggccctgtacctgaagcccctgagcggcggcaagggcgtggccagcctgaaccagagcgccctgagccggcccatgcagaggaagctggtgaccctggtgaactgccagctggtggaggaggagggccgggtgcgggccatgagagctgcccggagcctgggggagaggacagtgacagagctgatcctgcagcaccagaacccccagcagctgagcgccaacctgtgggccgctgtgcgggcccggggctgccagttcctgggccctgccatgcaggaggaggccctgaagctggtgctgctggccctggaggatggcagcgccctgagcaggaaggtgctggtgctgtttgtggtgcagaggctggagccccgcttcccccaggccagcaagaccagcattggacatgtggtgcagctgctgtaccgggccagctgcttcaaggtgaccaagagagatgaggacagcagcctgatgcagctgaaggaggagttccgctcctatgaggccctgcggcgggagcatgatgcccagatcgtgcacatcgccatggaggccggcctgcgcatcagccctgagcagtggagcagcctgctgtatggagacctggcccacaagagccacatgcagagcatcatcgacaagctgcagagccctgagagctttgccaagtctgtgcaggagctgaccatcgtgctgcagaggactggagaccctgccaacctgaaccggctgcggccccacctggagctgctggccaacatcgaccccaacccagatgctgtgagccccacctgggagcagctggagaatgccatggtggccgtgaagacagtggtgcacggcctggtggacttcatccagaactacagcaggaagggccacgagaccccccagccccagcccaacagcaagtacaagacctccatgtgccgggacctgcggcagcagggcggctgcccccggggcaccaactgcacctttgcccacagccaggaggagctggagaagtgcaacccccggggcctgtacctgcactgctgcctgctgagctctgtggccagcctgggcaccgtgcacaatgagctgtacaagcagcagcactgtgaccgggagaagatctctgtgtgtgctgtgaagagagctgagacctgcttcagcagccagttcttcagccccctggaggtgccccgggaggaggactag

SEQ ID NO: 19178 - DNA, 783 bp, synthetic construct
  source 1..783: mol_type = other DNA; note = Synthetic coding sequence
atgccccgggcccggagcggccgccgcagcagaggagctgggggccgggaggagaccttcctgcgggtgcgggccaaccggcagacccggctgaatgccagaattggcaagatgaagaggaggaagcaggatgagggccaggtgtgccccctgtgcaaccggcccctggccggcagcgagcaggagatgagccgccacgtggagcactgcctgagcaagcgggagggcagctgcatggctgaagatgatgctgtggacattgaacatgagaacaacaacagatttgaggagtatgagtggtgtggccagaagaggatccgggccaccaccctgctggagggcggcttccggggcagcggcttcatcatgtgcagcggcaaggagaacccagacagtgatgctgacctggatgtggatggagatgacaccctggagtatggcaagccccagtacacagaagcagatgtgatcccctgcaccggggaggagcccggggaggccaaggagcgggaggccctgcggggagctgtgctgaatggaggcccccccagcacccgcatcaccccagagttcagcaagtgggccagtgatgagatgcccagcaccagcaatggagagagcagcaagcaggaggccatgcagaagacctgcaagaacagcgacatcgagaagatcacagaagattctgctgtgaccacctttgaggccctgaaggcccgggtgcgggagctggagcggcagctgagcagaggagaccgctacaagtgcctgatctgcatgtag

SEQ ID NO: 19179 - DNA, 1461 bp, synthetic construct
  source 1..1461: mol_type = other DNA; note = Synthetic coding sequence
atggctgctgtgaagaccctgaaccccaaggccgaggtggcccgggcccaggccgccctggccgtgaacatctctgctgcccggggcctgcaggatgtgctgcggaccaacctgggccccaagggcaccatgaagatgctggtgtctggagctggggacatcaagctgaccaaggatggaaatgtgctgctgcacgagatgggcctgcacccccgcatcatcacagagggctttgaggccgccaaggagaaggccctgcagttcctggaggaggtgaaggtgtcccgggagatggaccgggagaccctgattgatgtggcccggaccagcctgcggaccaaggtgcatgctgagctggctgatgtgctgacagaggccgtggtggacagcatcctggccatcaagaagcaggatgagcccatcgacctcttcatgattgagatcatggagatgaagcacaagtcagaaacagacaccagcctcatccggggcctggtgctggaccatggagcccggcacccagacatgaagaagagggtggaggatgcctacatcctgacctgcaatgtgtccctggagtatgagaagacagaggtgaacagcggcttcttctacaagtctgctgaggagcgggagaagctggtgaaggccgagaggaagttcattgaagatagagtgaagaagatcatcgagctgaagaggaaggtgtgtggggacagcgacaagggctttgtggtgatcaaccagaagggcatcgaccccttcagcctggatgccctgagcaaggagggcatcgtggccctgcggcgggccaagagaagaaacatggagcggctgaccctggcctgtggcggcgtggccctgaacagctttgatgacctgagcccagactgcctgggccacgccggcctggtgtatgagtacaccctgggggaggagaagttcaccttcatcgagaagtgcaacaaccccaggtctgtgaccctgctgatcaagggccccaacaagcacaccctgacccagatcaaggatgctgtgagagatggcctgcgggctgtgaagaatgccattgatgatggctgtgtggtgcctggggccggggctgtggaggtggccatggccgaggccctgatcaagcacaagcccagcgtgaagggccgggcccagctgggcgtgcaggcctttgctgatgccctgctgatcatccccaaggtgctggcccagaacagcggctttgacctgcaggagaccctggtgaagatccaggccgagcacagcgagagcggccagctggtgggcgtggacctgaacacaggagagcccatggtggccgctgaggtgggcgtgtgggacaactactgtgtgaagaagcagctgctgcacagctgcaccgtcatcgccaccaacatcctgctggtggatgagatcatgagagctggcatgagcagcctgaagggctag

SEQ ID NO: 19180 - DNA, 1407 bp, synthetic construct
  source 1..1407: mol_type = other DNA; note = Synthetic coding sequence
atgtccttccggctgagcggcggcagccgccgcatctgcagcaggacaggcagcggccgcctgagcggcggcggcaccggctttgtggccggaaatgtgtgtgtgggcagcggggcccggagcagcttcagctgcaccctggagggcatcagcagcggcggcagcttctgcaacagcggcggcggcctgggcagcggggcctgtgccggcttcctgggcaatgagcacagcctgctgtctggaaatgagaaggtgaccatgcagaacctgaatgaccggctggccagctacctggaccacgtgcacgccctggaggaggccaatgctgacctggagcagaagatcaagggctggtatgaaaaatgtgagcccggcagcagccgggagcatgaccatgactacagccgctacttctctgtgattgaggacctgaagaggcagatcatcagcgccaccatctgcaatgccagcatcgtgctgcagaatgacaatgcccggctgacagcagatgacttccggctgaagtatgaaaatgagctggccctgcaccacagcgtggaggccgacaccagcggcctgcggcgggtgctggatgagctgaccctgtgcaccacagacctggagatccagtgtgagaccctgtctgaggagctgacctacctgaagaagagccatgaggaggagatggaggtgctgcagtacacagctggaggaaatgtgaatgtggagatgaatgccaccccaggagtggacctgactgtgctgctgaacaacatgagagcagaatatgaggacctggccgagcagaacaggaaggatgctgaggcctggttcaatgaaagaagtgccaccctgcagcagcagatcagtgaccacgagggcgccgccacagctgccagaaatgagctgacagagctgaagaggaacctgcagaccctggagattgagctgcagagcctgatggctgtgaagcacagctatgagtgcagcctggccgagacagagggcaactactgcaaccagctgcagcagatccaggaccagattggagtgatggaggagcagctgcagcagatcagaacagaaacagagggccagaagctggagtatgagcagctgctggatgtgaagatcttcctggagaaggagattgacatctactgcaacctgctggatggagaggagaggaagagcaagagcacctgctacaagagcaagggctacagacctgtgaacagcggcaaccaggccaaggacagcacagaggagaccatcgtgaagacagtggtggaggagctggaccagatcggcaacctgctgagcctgcgggtgcacagcgtggaggagaagagcagcaagatcagcaacatcaccgtggagcagagggtgcccagcaaggccccctag

SEQ ID NO: 19181 - DNA, 816 bp, synthetic construct; identical to SEQ ID NO: 19117
  source 1..816: mol_type = other DNA; note = Synthetic coding sequence

SEQ ID NO: 19182 - DNA, 753 bp, synthetic construct
  source 1..753: mol_type = other DNA; note = Synthetic coding sequence
atgtctgaaaatgctgccccagacttctactacgtggccatggactttggaggccacggcctgagcagccactacagccctggggtgccctactacctgcagacctttgtgtctgagatcagaagagtggtggccggcggcgtggtgggcggcatgttcttctgcaccttccctgagatggtggacaagctgatcctgctggacacccccctcttcctgctggagagtgatgagatggagaacctgctgacctacaagagaagagccatcgagcacgtgctgcaggtggaggccagccaggagcccagccacgtgttcagcctgaagcagctgctgcagaggctgctgaagagcaacagccacctgtctgaagaatgtggggagctgctgctgcagaggggcaccaccaaggtggccaccggcctggtgctgaacagagaccagaggctggcctgggccgagaacagcattgacttcatcagccgggagctgtgtgcccacagcatcaggaagctgcaggcccacgtgctgctgatcaaggctgtgcacggctactttgacagccggcagaactacagcgagaaggagagcctgtccttcatgattgacaccatgaagagcaccctgaaggagcagttccagtttgtggaggtgcccggcaaccactgtgtgcacatgtctgagccccagcacgtggccagcatcatcagcagcttcctgcagtgcacccacatgctgcctgcccagctgtag

SEQ ID NO: 19183 - DNA, 510 bp, synthetic construct
  source 1..510: mol_type = other DNA; note = Synthetic coding sequence
atggtgttccccctgcccaccccccaggagcccatcatggccaccccacccaagagaagagctgtggaggccactggagagaaggtgctgcgctatgagaccttcatcagtgatgtgctgcagagggacctgaggaaggtgctggaccaccgggacaaggtgtatgagcagctggccaagtacctgcagctgagaaatgtcatcgagcggctgcaggaggccaagcacagcgagctgtacatgcaggtggacctgggctgcaacttctttgtggacacagtggtgcctgacaccagccgcatctacgtggccctgggctacggcttcttcctggagctgaccctggccgaggccctgaagttcatcgacaggaagagcagcctgctgacagagctgagcaacagcctgaccaaggacagcatgaacatcaaggcccacatccacatgctgctggagggcctgcgggagctgcagggcctgcagaacttccctgagaagccccaccactag

SEQ ID NO: 19184 - DNA, 3177 bp, synthetic construct
  source 1..3177: mol_type = other DNA; note = Synthetic coding sequence
atgaccaccgtggtggtgcacgtggacagcaaggccgagctgaccaccctgctggagcagtgggagaaggagcacggcagcggccaggacatggtgcccatcctgaccaggatgagccagctgattgagaaggagacagaggagtacagaaaaggagaccctgacccctttgatgacagacaccctggccgggctgaccctgagtgcatgctgggccacctgctgcgcatcctcttcaagaatgatgacttcatgaatgccctggtgaatgcctacgtgatgaccagccgggagccccccctgaacacagctgcctgccgcctgctgctggacatcatgcctggcctggagacagctgtggtgttccaggagaaggagggcatcgtggagaacctcttcaagtgggcccgggaggccgaccagcccctgcggacctacagcacaggcctgctgggcggggccatggagaaccaggacattgctgccaactacagagatgagaacagccagctggtggccatcgtgctgcggcggctgcgggagctgcagctgcaggaggtggccctgcggcaggagaacaagaggcccagccccaggaagctgagcagcgagcccctgctgcccctggatgaggaggccgtggacatggactatggagacatggctgtggatgatgctgagatccagaagagcgccctgcagatcatcatcaactgtgtgtgtggccctgacaaccgcatcagcagcatcggcaagttcatcagcggcacccccaggaggaagctgccccagaaccccaagagcagcgagcacaccctggccaagatgtggaatgtggtgcagagcaacaacggcatcaaggtgctgctgagcctgctgagcatcaagatgcccatcacagatgctgaccagatccgggccctggcctgcaaggccctggtgggcctgagccgcagcagcacagtgcggcagatcatcagcaagctgcccctcttcagcagctgccagatccagcagctgatgaaggagcctgtgctgcaggacaagagaagtgaccacgtgaagttctgcaagtatgctgctgagctgattgaaagagtgtctgggaagcccctgctgattggaacagatgtgtccctggcccggctgcagaaggcagatgtggtggcccagagccgcatctccttccctgagaaggagctgctgctgctgatccggaaccacctgatcagcaagggcctgggggagacagccaccgtgctgaccaaggaggccgacctgcccatgacagctgccagccacagcagcgccttcacccctgtgacagctgctgccagccctgtgtccctgcccaggaccccccgcatcgccaacggcatcgccacccggctgggcagccacgccgctgtgggcgccagcgcccccagcgcccccacagcccacccccagccccggcccccccagggccccctggccctgcccggccccagctatgccggcaacagccccctgattggccgcatctccttcatccgggagcggcccagcccctgcaatggaaggaagatccgggtgctgcggcagaagagtgaccacggggcctacagccagagccctgccatcaagaagcagctggacagacacctgcccagcccccccaccctggacagcatcatcacagagtacctgcgggagcagcacgcccgctgcaagaaccctgtggccacctgcccccccttcagcctcttcaccccccaccagtgcccagagcccaagcagaggcggcaggcccccatcaacttcaccagccggctgaacagaagagccagcttccccaagtatggaggagtggatggcggctgctttgacagacacctgatcttcagccgcttccggcccatctctgtgttccgggaggccaatgaagatgaaagtggcttcacctgctgtgccttcagcgcccgggagcgcttcctgatgctgggcacctgcaccggccagctgaagctgtacaacgtgttttctggccaggaggaggccagctacaactgccacaacagcgccatcacccacctggagcccagcagagatggcagcctgctgctgaccagcgccacctggagccagcccctgagcgccctgtggggcatgaagtctgtgtttgacatgaagcacagcttcacagaggaccactacgtggagttcagcaagcacagccaggacagagtcatcggcaccaagggggacatcgcccacatctatgacatccagacaggcaacaagctgctgaccctcttcaacccagacctggccaacaactacaagaggaactgtgccaccttcaaccccacagatgacctggtgctgaatgatggagtgctgtgggatgtgcgcagcgcccaggccatccacaagtttgacaagttcaacatgaacatcagcggggtcttccaccccaacggcctggaggtgatcatcaacacagagatctgggacctgcggaccttccacctgctgcacacagtgcctgccctggaccagtgccgggtggtgttcaaccacactggaacagtgatgtacggggccatgctgcaggctgatgatgaagatgacctgatggaggagaggatgaagagccccttcggcagcagcttccgcaccttcaatgccacagactacaagcccatcgccaccattgatgtgaagaggaacatctttgacctgtgcacagacaccaaggactgctacctggccgtgattgagaaccagggctccatggatgccctgaacatggacacagtgtgccgcctgtatgaggtgggccggcagaggctggctgaagatgaagatgaggaggaggaccaggaggaggaggagcaggaggaggaggatgatgatgaagatgatgatgacacagatgacctggatgagctggacacagaccagctgctggaggccgagctggaggaggatgacaacaatgaaaatgctggagaagatggagacaatgacttcagccccagtgatgaggagctggccaacctgctggaggagggggaggatggagaagatgaagattctgatgctgatgaggaggtggagctgatcctgggggacacagacagcagtgacaacagcgacctggaggatgacatcatcctgagcctgaatgaatag

SEQ ID NO: 19185 - DNA, 2409 bp, synthetic construct
  source 1..2409: mol_type = other DNA; note = Synthetic coding sequence
atggctgctgaggccctggccgctgaggccgtggccagccggctggagcggcaggaggaggacatccgctggctgtggagcgaggtggagcggctgagagatgagcagctgaatgccccctacagctgccaggccgagggcccctgcctgacccgggaggtggcccagctgcgggcagagaactgtgacctgcggcaccggctgtgcagcctgcggctgtgcctggccgaggagaggagccggcaggccaccctggagagcgctgagctggaggccgcccaggaggccggggcccagcccccacccagccagagccaggacaaggacatgaagaagaagaagatgaaggagagcgaggccgacagcgaggtgaagcaccagcccatcttcatcaaggagcggctgaagctgtttgagatcctgaagaaggaccaccagctgctgctggccatctacggcaagaagggggacaccagcaacatcatcaccgtgcgggtggctgatggccagacagtgcagggcgaggtgtggaagaccaccccctaccaggtggccgctgagatcagccaggagctggccgagagcaccgtcatcgccaaggtgaatggagagctgtgggacctggaccggcccctggagggggacagcagcctggagctgctgacctttgacaatgaggaggcccaggccgtgtactggcacagcagcgcccacatcctgggggaggccatggagctgtactacggcggccacctgtgctacggcccccccattgaaaatggcttctactatgacatgtttattgaagatagagctgtgagcagcacagagctgagcgccctggagaacatctgcaaggccatcatcaaggagaagcagccctttgagcggctggaggtgtccaaggagatcctgctggagatgttcaagtacaacaagttcaagtgccgcatcctgaatgagaaggtgaacacagccaccaccaccgtgtaccgctgtggccccctgattgacctgtgcaagggcccccacgtgcgccacacaggcaagatcaagaccatcaagatcttcaagaacagcagcacctactgggagggcaaccctgagatggagaccctgcagaggatctacggcatctccttcccagacaacaagatgatgagggactgggagaagttccaggaggaggccaagaacagagaccacaggaagattggcaaggagcaggagctgttcttcttccatgacctgagccctggcagctgcttcttcctgcccaggggggccttcatctacaacaccctgacagacttcatccgggaggagtaccacaagagggacttcacagaggtgctgagccccaacatgtacaacagcaagctgtgggaggccagcggccactggcagcactacagcgagaacatgttcacctttgaaattgagaaggacacctttgccctgaagcccatgaactgccccggccactgcctgatgtttgcccaccggcccaggtcctggagggagatgcccatccgctttgctgactttggagtgctgcacagaaatgagctgagcggcaccctgagcggcctgaccagggtgcggcgcttccagcaggatgatgcccacatcttctgcaccgtggagcagatcgaggaggagatcaagggctgcctgcagttcctgcagagcgtgtacagcaccttcggcttctccttccagctgaacctgagcaccaggcctgagaacttcctgggggagattgagatgtggaatgaggccgagaagcagctgcagaacagcctgatggactttggagagccctggaagatgaaccctggagatggagccttctacggccccaagattgacatcaagatcaaggatgccatcggccgctaccaccagtgtgccaccatccagctggacttccagctgcccatccgcttcaacctgacctacgtgtccaaggatggagatgacaagaagaggcctgtgatcatccaccgggccatcctgggctctgtggagaggatgattgccatcctgtctgaaaattatggaggcaagtggcccttctggctgagcccccggcaggtgatggtgattcctgtgggccccacctgtgagaagtatgccctgcaggtgagcagcgagttctttgaggagggcttcatggctgatgtggacctggaccacagctgcaccctgaacaagaagatcagaaatgcccagctggcccagtacaacttcatcctggtggtgggggagaaggagaagattgacaatgctgtgaatgtgaggacccgggacaacaagatccatggagagatcctggtgaccagcgccatcgacaagctgaagaacctgaggaagaccaggaccctgaatgctgaggaggccttctag

SEQ ID NO: 19186 - DNA, 1149 bp, synthetic construct
  source 1..1149: mol_type = other DNA; note = Synthetic coding sequence
atgttcaagatccagctggagcccctgaagctgcgggcctggaccctgaatggatttgtgaagttcaggaacaaggagaccagcgctggccctgtggccgtgatgggcaaggactactacaagatcctgggcatccccagcggggccaatgaagatgagatcaagaaggcctacaggaagatggccctgaagtaccacccagacaagaacaaggagcccaatgctgaggagaagttcaaggagattgctgaggcctatgatgtgctgagtgaccccaagaagaggggcctgtatgaccagtatggagaggagggcctgaagacaggaggcggcaccagcggcggcagcagcggcagcttccactacaccttccatggagacccccacgccacctttgccagcttcttcggcggcagcaacccctttgacatcttctttgccagcagccgcagcacccggcccttcagcggctttgatcctgatgacatggatgtggatgaagatgaggacccctttggagccttcggccgcttcggcttcaacggcctgagccggggcccccggcgggcccctgagcccctgtaccccaggaggaaggtgcaggacccccctgtggtgcatgagctgcgggtgtccctggaggagatctaccacggcagcaccaagaggatgaagatcacccggcggcggctgaacccagatggccgcacagtgaggacagaggacaagatcctgcacatcgtcatcaagaggggctggaaggagggcaccaagatcaccttccccaaggagggagatgccaccccagacaacatcccagctgacatcgtgtttgtgctgaaggacaagccccacgcccacttcagaagagatggcaccaacgtgctgtacagcgccctgatcagcctgaaggaggccctgtgtggctgcaccgtgaacatccccaccattgatggccgggtcatccccctgccctgcaatgatgtgatcaagccaggcaccgtgaagaggctgcggggggagggcctgcccttccccaaggtgcccacccagagaggagacctgattgtggagttcaaggtgcgcttcccagaccggctgaccccccagacccggcagatcctgaagcagcacctgccctgcagctag

SEQ ID NO: 19187 - DNA, 1356 bp, synthetic construct
  source 1..1356: mol_type = other DNA; note = Synthetic coding sequence
atgagggagtgcatcagcatccacgtgggccaggccggcgtgcagattggaaatgcctgctgggagctgtactgcctggagcacggcatccagccagatggccagatgcccagcgacaagaccatcggcggcggagatgacagcttcaacaccttcttcagcgagaccggggccggcaagcacgtgcccagggctgtgtttgtggacctggagcccaccgtgattgatgaggtgaggacaggcacctaccggcagctgttccaccctgagcagctgatcaccgggaaggaggatgctgccaacaactatgcccggggccactacaccatcggcaaggagatcatcgacctggtgctggaccgcatcaggaagctggccgaccagtgcaccggcctgcagggcttcctggtgttccacagctttggaggcggcactggaagtggcttcaccagcctgctgatggagcggctgtctgtggactatggcaagaagagcaagctggagttcagcatctacccagccccccaggtgtccacagctgtggtggagccctacaacagcatcctgaccacccacaccaccctggagcacagcgactgtgccttcatggtggacaatgaggccatctatgacatctgcagaagaaacctggacatcgagcggcccacctacaccaacctgaacagactcatcagccagatcgtgagcagcatcacagccagcctgcgctttgatggagccctgaatgtggacctgacagagttccagaccaacctggtgccctacccccgcatccacttccccctggccacctacgcccctgtgatctctgctgagaaggcctaccacgagcagctgtctgtggccgagatcaccaatgcctgctttgagcccgccaaccagatggtgaagtgtgaccccaggcatggcaagtacatggcctgctgcctgctgtacagaggagatgtggtgcccaaggatgtgaatgctgccatcgccaccatcaagaccaagaggagcatccagtttgtggactggtgccccaccggcttcaaggtgggcatcaactaccagcccccaacagtggtgcctggaggagacctggccaaggtgcagagagctgtgtgcatgctgagcaacaccacagccatcgccgaggcctgggcccggctggaccacaagtttgacctgatgtatgccaagagggcctttgtgcactggtacgtgggggagggcatggaggagggggagttcagcgaggcccgggaggacatggccgccctggagaaggactatgaggaggtgggcgtggacagcgtggagggggagggggaggaggagggggaggagtactag

SEQ ID NO: 19188 - DNA, 444 bp, synthetic construct
  source 1..444: mol_type = other DNA; note = Synthetic coding sequence
tgaacagcccggggccctgagcctgagcagatgggcctggccccctgctgcacccaggccctgtgtggcctggccctgcggcaccacagccacctgcagcagatccggctggagttccaccggctgtctgaggagaacaccctgctgaagaatgacctgggccgggtgcggcaggagctggaggccgctgagagcacccatgatgcccagaggaaggagattgaggtgctgaagaaggacaaggagaaggcctgcagcgagatggaggtgctgaaccggcagaaccagaactacaaggaccagctgagccagctgaatgtgcgggtgctgcagctgggccaggaggccagcacccaccaggcccagaatgaggagcaccgggtgaccatccagatgctgacccagagcctggaggaggtggtgcgcagcggccagcagcagtag

SEQ ID NO: 19189 - DNA, 771 bp, synthetic construct
  source 1..771: mol_type = other DNA; note = Synthetic coding sequence
atggccacccagaggaagcacctggtgaaggacttcaacccctacatcacctgctacatctgcaagggctacctgatcaagcccaccaccgtgacagaatgtctgcacaccttctgcaagacctgcatcgtgcagcactttgaggacagcaatgactgcccccgctgtggcaaccaggtgcatgagaccaaccccctggagatgctgcggctggacaacaccctggaggagatcatcttcaagctggtgcccggcctgcgggagcaggagctggagcgggagagcgagttctggaagaagaacaagccccaggagaatggccaggatgacaccagcaaggctgacaagcccaaggtggatgaggagggagatgaaaatgaagatgacaaggactaccacagaagtgacccccagatcgccatctgcctggactgcctgagaaataatggccagagcggggacaacgtggtgaagggcctgatgaagaagttcatccgctgcagcaccagggtgacagtgggcaccatcaagaagttcctgagcctgaagctgaagctgcccagcagctatgagctggatgtgctgtgcaatggagagatcatgggcaaggaccacaccatggagttcatctacatgacccgctggaggctgcggggggagaacttccgctgcctgaactgcagcgccagccaggtgtgcagccaggacggccccctgtaccagagctaccccatggtgctgcagtaccggcccagaattgactttggatag

SEQ ID NO: 19190 - DNA, 6672 bp, synthetic construct
  source 1..6672: mol_type = other DNA; note = Synthetic coding sequence
atggcccccaagaaggagaagggcggcaccgtgaacaccagcagcaagatctgggagcccagcctgattgctgcccagttcaaccagaatgactggcaggccagcatcgcctttgtggtgggcaaccagattgaagatgacctgctgatccaggccctgactgtggccgtgcaggtgccccagaggaagctgttctccatggtgtcctggcaggacatcctgcagcagatcaatgagatcaacaccctggtgggcagcgccagcagcaagaaggccaagaagcctgtgggcggcaatgcccccctgtactatgaggtgctgacagctgccaaggccatcatggacagcggggagaagctgaccctgcccctgattggcaagctgctgaagttccagctgctgcagatcaagttcaaggaccagcagaggagagaaaatgagaagaaggtgattgaggacaagcccaagctggagaaggacaagggcaaggccaagagccccaaggagaagaaggcccccagcgccaagccagccaagggcaagggcaaggaccagcctgaggccaatgcccctgtgaagaagaccacccagctgaagagaagaggagaagatgaccacaccaaccgctacattgatgatgagccagatgatggagcccagcactacatcatcgtggtgggcttcaacaacccccagctgctggccatcatggccgagctgggcatccccatcaccagcgtcatcaagatcagcagtgaaaattatgagcccctgcagacccacctggccgctgtgaaccagcagcaggaggtgctgctgcagagcgaggacctggaggccgagaagctgaagaaggaaaatgccatcaaggagctgaagaccttctggaagtacctggagcctgtgctgaacaatgagaagccagagaccaacctgtttgatgtggcccggctggagtacatggtgaaggctgctgacttccccagcgactggagcgatggagagatgatgctgaagctgggcacagacatctttgagaacatcgcctgcctgatgtatgacatcctggactggaagaggcagcaccagcactacctggagagcatgcagctgatcaacgtgccccaggtggtgaatgagaagcctgtgctggaggccatgcccaccagcgaggccccccagcctgctgtgcctgcccctgggaagaagaaggcccagtatgaggagccccaggcccctcctcctgtgaccagcgtcatcaccacagaggtggacatgagatactacaactacctgctgaaccccatccgggaggagttcatctctgtgcccctcatcctgcactgcatgctggagcaggtggtggccacagaggaggacctggtgccccccagcctgcgggagcccagccccagggcagatggcctggaccacagaattgctgcccacatcgtgtccctgctgcccagcctgtgcctgtctgagcgggagaagaagaacctgcatgacatcttcctgtctgaggaggagaatgaaagcaaggctgtgcccaagggccccctgctgctgaactaccatgatgcccacgcccacaagaagtatgccctgcaggaccagaagaactttgatcctgtgcagatcgagcaggagatgcagagcaagctgcccctgtgggagttcctgcagttccccctgcccccaccctggaacaacaccaagaggctggccaccatccacgagctgatgcacttctgcaccagtgatgtgctgtcctggaatgaggtggagcgggccttcaaggtgttcacctttgagagcctgaagctgtctgaggtggatgagaagggcaagctgaagcccagcggcatgatgtgtggcagtgacagcgagatgttcaacatcccctgggacaacccagccaggtttgccaagcagatccggcagcagtatgtgatgaagatgaacacccaggaggccaagcagaaggctgacatcaagatcaaggacaggaccctgtttgtggaccagaacctgtccatgtctgtgcaggacaatgaaagcaaccgggagcccagcgaccccagccagtgtgatgccaacaacatgaagcacagcgacctgaacaacctgaagctgtctgtgcctgacaaccggcagctgctggagcaggagagcatcatgaaggcccagccccagcacgagagcctggagcagaccaccaacaatgagatcaaggatgatgctgtgaccaaggctgacagccatgagaagaagcccaagaagatgatggtggaggccgacctggaggacatcaagaagacccagcagaggagcctgatggactggagcttcacagagcacttcaagcccaaggtgctgctgcaggtgctgcaggaggcccacaagcagtaccgctgtgtggacagctactaccacacccaggacaacagcctgctgctggtgttccacaaccccatgaaccggcagaggctgcactgtgagtactggaacatcgccctgcacagcaatgtgggcttcaggaactacctggagctggtggccaagagcatccaggactggatcaccaaggaggaggccatctaccaggagagcaagatgaatgagaagatcatccgcaccagggctgagctggagctgaagagcagcgccaatgccaagctgaccagcgccagcaagatcttcagcatcaaggagagcaagagcaacaagggcatcagcaagacagagatcagtgaccaggagaaggagaaggagaaggagaagatccccttcatcctggagggcagcctgaaggcctggaaggaggagcagcaccggctggccgaggaggagcggctgcgggaggagaagaaggccgagaagaagggcaaggaggccggcaagaagaagggcaaggacaatgctgagaaggaggacagccgcagcctgaagaagaagagcccctacaaggagaagagcaaggaggagcaggtgaagatccaggaggtgacagaggagagcccccaccagcctgagcccaagatcacctaccccttccacggctacaacatgggcaacatccccacccagatcagcggcagcaactactacctgtaccccagtgatggcggccagatcgaggtggagaagaccatgtttgagaagggccccaccttcatcaaggtgcgggtggtgaaggacaaccacaacttcatgatccacctgaatgaccccaaggagatcgtgaagaaggaggagaagggggactactacctggaggaggaggaggagggagatgaggagcagagcctggagacagaggtgtctgatgccaagaacaaggccttcagcaagtttggcagcttcagcgccaccctggagaatggcatctgcctgagcatctcctactacggcagcaatggcatggcccctgaggacaaggaccctgacctggagaccatcctgaacatccccagcgccctgacccccaccgtggtgcctgtgattgtgacagtgccccagagcaaggccaagggcaagatcaagggcaaggagaagcccaaggagagcctgaaggaggaggagcaccccaaggaggaggagaagaaggaggaggaggtggagcctgagcctgtgctgcaggagaccctggatgtgcccaccttccagagcctgaatgtgtcctgccccagcggcctgctgctgaccttcatcggccaggagagcacaggccagtatgtgattgatgaggagcccacctgggacatcatggtgcggcagagctacccccagagggtgaagcactatgagttctacaagacagtgatgcctcctgctgagcaggaggccagcagggtcatcaccagccagggcaccgtggtgaagtacatgctggatggcagcacccagatcctgtttgctgatggagctgtgagccgcagccccaacagcggcctcatctgcccccccagcgagatgcctgccaccccccacagcggggacctgatggacagcatcagccagcagaagtctgagaccatccccagcgagatcaccaacaccaagaagggcaagagccacaagagccagagctccatggcccacaagggggagatccatgaccccccacctgaggccgtgcagacagtgacccctgtggaggtgcacatcggcacctggttcaccaccaccccagagggcaacagaattggcaccaagggcctggagagaattgctgacctgacccccctgctgtccttccaggccacagatcctgtgaatggaacagtgatgaccacccgggaggacaaggtggtgattgtggagaggaaggatggcaccagaattgtggaccatgctgatggcacccgcatcaccaccttctaccaggtgtatgaggaccagatcatcctgcctgatgaccaggagaccacagagggccccaggacagtgacccggcaggtgaagtgcatgagggtggagagcagccgctatgccaccgtcatcgccaactgtgaggacagcagctgctgtgccacctttggagatggcaccaccatcatcgccaagccccagggcacctaccaggtgctgccccccaacacaggcagcctgtacatcgacaaggactgcagcgctgtgtactgccacgagagcagcagcaacatctactaccccttccagaagcgggagcagctgcgggccggccgctacatcatgaggcacaccagcgaggtgatctgtgaggtgctggaccctgagggcaacaccttccaggtgatggctgatggcagcatcagcaccatcctgcctgagaagaagctggaggatgacctgaatgagaagacagagggctatgacagcctgagctccatgcacctggagaagaaccaccagcagatctatggagagcacgtgccccgcttctttgtgatgtatgcagatggcagcggcatggagctgctgcgggacagcgacatcgaggagtacctgagcctggcctacaaggagagcaacacagtggtgctgcaggagcctgtgcaggagcagcccggcaccctgaccatcaccgtgctgcggcccttccacgaggccagcccctggcaggtgaagaaggaggacaccatcgtgccccccaacctgcggagccgctcctgggagaccttccccagcgtggagaagaagaccccaggcccccccttcggcacccagatctggaagggcctgtgcatcgagagcaagcagctggtgtctgcccctggggccatcctgaagagccccagcgtgctgcagatgaggcagttcatccagcatgaagtcatcaagaatgaggtgaagctgcggctgcaggtgtccctgaaggactacatcaactacatcctgaagaaggaggatgagctgcaggagatgatggtgaaggacagcaggacagaggaggagagaggaaatgctgctgacctgctgaagctggtgatgtccttccccaagatggaggagaccaccaagagccacgtgacagaggtggccgcccacctgacagacctcttcaagcagagcctggccaccccacccaagtgccccccagacaccttcggcaaggacttctttgagaagacctggaggcacacagccagcagcaagcgctggaaggagaagattgacaagaccaggaaggagattgagaccacccagaactacctgatggacatcaagaaccgcatcatcccccccttcttcaagtctgagctgaaccagctgtaccagagccagtacaaccacctggacagcctgagcaagaagctgcccagcttcaccaagaagaatgaagatgccaatgaaacagctgtgcaggacaccagtgacctgaacctggacttcaagccccacaaggtgtctgagcagaagagcagctctgtgcccagcctgcccaagccagagatctctgctgacaagaaggacttcaccgcccagaaccagacagagaacctgaccaagagccctgaggaggccgagagctatgagcctgtgaagatccccacccagagcctgctgcaggatgtggccggccagaccaggaaggagaaggtgaagctgccccactacctgctgagcagcaagcccaagagccagcccctggccaaggtgcaggacagcgtgggcggcaaggtgaacaccagctctgtggccagcgctgccatcaacaatgccaagagcagcctgtttggcttccacctgctgcccagctctgtgaagtttggagtgctgaaggagggccacacctacgccaccgtggtgaagctgaagaatgtgggcgtggacttctgccgcttcaaggtgaagcagcccccacccagcacaggcctgaaggtgacctacaagccaggccctgtggccgccggcatgcagacagagctgaacatcgagctgtttgccacagctgtgggagaagatggagccaagggcagcgcccacatcagccacaacatcgagatcatgacagagcacgaggtgctcttcctgcctgtggaggccaccgtgctgaccagcagcaactatgacaagaggcccaaggacttcccccagggcaaggagaaccccatggtgcagaggaccagcaccatctacagcagcaccctgggcgtcttcatgagcaggaaggtgagcccccactag

SEQ ID NO: 19191 - DNA, 2337 bp, synthetic construct
  source 1..2337: mol_type = other DNA; note = Synthetic coding sequence
atgcctgccttcctgggcctgaagtgcctgggcaagctgtgcagcagcgagaagagcaaggtgaccagcagcgagaggaccagcgcccggggcagcaacaggaagaggctcatcgtggaggaccggcgggtgtctggcaccagcttcaccgcccacagaagagccaccatcacccacctgctgtacctgtgccccaaggactactgcccccggggccgggtgtgcaacagcgtggacccctttgtggcccacccccaggacccccaccaccccagcgagaagcctgtgatccactgccacaagtgtggggagccctgcaagggggaggtgctgcgggtgcagaccaagcacttccacatcaagtgcttcacctgcaaggtgtgtggctgtgacctggcccagggcggcttcttcatcaagaatggagagtacctgtgcaccctggactaccagaggatgtatggcacccgctgccacggctgtggggagtttgtggagggggaggtggtgacagccctgggcaagacctaccaccccaactgctttgcctgcaccatctgcaagaggcccttccccccaggggacagagtgaccttcaacggccgggactgcctgtgccagctgtgtgcccagcccatgagcagcagccccaaggagaccaccttcagcagcaactgtgccggctgcggccgggacatcaagaatggccaggccctgctggccctggacaagcagtggcacctgggctgcttcaagtgcaagagctgtgggaaggtgctgactggagagtacatcagcaaggatggagccccctactgtgagaaggactaccagggcctgtttggagtgaagtgtgaggcctgccaccagttcatcaccgggaaggtgctggaggccggggacaagcactaccaccccagctgtgcccgctgcagccgctgcaaccagatgttcacagaaggagaggagatgtacctgcagggcagcacagtgtggcacccagactgcaagcagagcaccaagacagaggagaagctgcggcccaccaggaccagcagcgagagcatctacagccggcccggcagcagcatccctggcagccctggccacaccatctatgccaaggtggacaatgagatcctggactacaaggacctggccgccatccccaaggtgaaggccatctatgacatcgagaggccagacctgatcacctatgagcccttctacaccagcggctatgatgacaagcaggagcggcagagcctgggggagagccccaggaccctgagccccaccccatctgctgagggctaccaggatgtgcgggacaggatgatccacaggagcaccagccagggcagcatcaacagccctgtgtacagccgccacagctacacccccaccaccagccgcagcccccagcacttccacaggcctggaaatgagcccagcagcggcaggaacagccccctgccctacagaccagacagccggcccctgacccccacctacgcccaggcccccaagcacttccacgtgcctgaccagggcatcaacatctacaggaagccacccatctacaagcagcacgccgccctggccgcccagagcaagagcagcgaggacatcatcaagttcagcaagtttcctgctgcccaggccccagaccccagcgagacccccaagattgaaacagaccactggccaggcccccccagctttgctgtggtgggccctgacatgaagaggaggagcagcggccgggaggaggatgatgaggagctgctgcggcggcggcagctgcaggaggagcagctgatgaagctgaacagcggcctgggccagctgatcctgaaggaggagatggagaaggagagccgggagaggagcagcctgctggccagccgctatgacagccccatcaacagcgccagccacatccccagcagcaagacagccagcctgcccggctatggaagaaatggcctgcacaggcctgtgtccacagactttgcccagtacaacagctatggagatgtgtctgggggcgtgcgggactaccagaccctgcctgatggccacatgcctgccatgaggatggaccggggcgtgtccatgcccaacatgctggagcccaagatcttcccctatgagatgctgatggtgaccaacagaggaagaaacaagatcctgcgggaggtggacaggacccggctggagcggcacctggcccctgaggtgttccgggagatcttcggcatgagcatccaggagtttgaccggctgcccctgtggaggagaaatgacatgaagaagaaggccaagctgttctag

SEQ ID NO: 19192 - DNA, 1689 bp, synthetic construct
  source 1..1689: mol_type = other DNA; note = Synthetic coding sequence
atgaaccccctgtttggccccaacctcttcctgctgcagcaggagcagcagggcctggccggccccctgggggacagcctgggcggggaccactttgctgggggcggggacctgcccccagcccccctgagccctgctggccctgctgcctacagccccccaggccctggccctgcccccccagctgccatggccctgagaaatgacctgggcagcaacatcaacgtgctgaagaccctgaacctgcgcttccgctgcttcctggccaaggtgcatgagctggagaggaggaaccggctgctggagaagcagctgcagcaggccctggaggagggcaagcagggccggcggggcctgggcagaagagaccaggccgtgcagacaggctttgtgagccccatccggcccctgggcctgcagctgggcgcccggcctgctgctgtgtgcagccccagcgcccgggtgctgggcagccctgcccggagccctgctggccccctggcccccagcgctgccagcctgagcagcagcagcaccagcaccagcaccacctacagcagcagcgcccgcttcatgcctggcaccatctggagcttcagccacgcccggcggctgggccctggcctggagcccaccctggtgcagggccctggcctgtcctgggtgcacccagatggagtgggcgtgcagattgacaccatcaccccagagatccgggccctgtacaacgtgctggccaaggtgaagcgggagagagatgagtacaagaggcgctgggaggaggagtacacagtgcgcatccagctgcaggacagagtgaatgagctgcaggaggaggcccaggaggctgatgcctgccaggaggagctggccctgaaggtggagcagctgaaggccgagctggtggtgttcaagggcctgatgagcaacaacctgtctgagctggacaccaagatccaggagaaggccatgaaggtggacatggacatctgcagaagaattgacatcacagccaagctgtgtgatgtggcccagcagaggaactgtgaggacatgatccagatgttccagaagaagctggtgcccagcatgggcggcaggaagcgggagaggaaggctgctgtggaggaggacaccagcctgtctgagagcgagggcccccggcagccagatggagatgaggaggagagcacagccctgagcatcaatgaggagatgcagaggatgctgaaccagctgcgggagtatgactttgaagatgactgtgacagcctgacctgggaggagacagaggagaccctgctgctgtgggaggacttcagcggctacgccatggctgctgctgaggcccagggcgagcaggaggacagcctggagaaggtgatcaaggacacagagagcctcttcaagacccgggagaaggagtaccaggagaccatcgaccagatcgagctggagctggccacagccaagaatgacatgaacagacacctgcacgagtacatggagatgtgcagcatgaagaggggcctggatgtgcagatggagacctgcagaagactcatcacccagagcggggacaggaagagccctgccttcaccgctgtgcccctgagtgaccccccacctccacccagcgaggctgaagattctgacagagatgtgtccagtgacagctccatgaggtag

SEQ ID NO: 19193 - DNA, 2415 bp, synthetic construct
  source 1..2415: mol_type = other DNA; note = Synthetic coding sequence
atgaactaccagcagcagctggccaacagcgctgccatccgggcagagatccagagatttgagagcgtgcaccccaacatctacagcatctatgagctgctggagcgggtggaggagcctgtgctgcagaaccagatccgggagcacgtgattgccattgaagatgcctttgtgaacagccaggagtggaccctgagccgctctgtgcctgagctgaaggtgggcatcgtgggcaacctggccagcggcaagagcgccctggtgcaccgctacctgaccggcacctacgtgcaggaggagagccctgagggcggccgcttcaagaaggagatcgtggtggatggccagagctacctgctgctgatcagagatgagggcggccccccagaggcccagtttgccatgtgggtggatgctgtgatctttgtgttcagcctggaggatgagatctccttccagacagtgtaccactactacagcaggatggccaactacagaaacaccagcgagatccccctggtgctggtgggcacccaggatgccatcagcagcgccaacccccgggtgattgatgatgcccgggccaggaagctgagcaatgacctgaagcgctgcacctactatgagacctgtgccacctacggcctgaatgtggagagggtcttccaggatgtggcccagaagatcgtggccaccaggaagaagcagcagctgagcatcggcccctgcaagagcctgcccaacagccccagccacagctctgtgtgcagcgcccaggtgtctgctgtgcacatcagccagaccagcaatggaggcggcagcctgagtgactacagcagctctgtgcccagcacccccagcaccagccagaaggagctgagaattgatgtgcccccaacagccaacacccccacccctgtgaggaagcagagcaagagaagaagcaacctcttcaccagcaggaagggcagtgaccctgacaaggagaagaagggcctggagagcagagctgacagcatcggcagcggccgggccatccccatcaagcagggcatgctgctgaagaggtctgggaagagcctgaacaaggagtggaagaagaagtatgtgaccctgtgtgacaatggagtgctgacctaccaccccagcctgcatgactacatgcagaatgtgcacggcaaggagattgacctgctgcggaccaccgtgaaggtgcctgggaagaggcctccccgggccaccagcgcctgtgcccccatcagcagccccaagaccaacggcctgagcaaggacatgagcagcctgcacatcagccccaacagcgacaccggcctgggggacagcgtgtgcagcagccccagcatcagcagcaccaccagccccaagctggaccccccacccagcccccacgccaacaggaagaagcacaggaggaagaagagcaccagcaacttcaaggcagatggcctgtctggaacagctgaggagcaggaggagaactttgagttcatcatcgtgtccctgaccggccagacctggcactttgaggccaccacctatgaggagagagatgcctgggtgcaggccatcgagagccagatcctggccagcctgcagagctgtgagagcagcaagaacaagagccggctgaccagccagagcgaggccatggccctgcagagcatccggaacatgaggggcaacagccactgtgtggactgtgagacccagaaccccaactgggccagcctgaacctgggcgccctgatgtgcattgaatgttctggcatccacaggaacctgggcacccacctgagccgggtgcgcagcctggacctggatgactggcctgtggagctgatcaaggtgatgagcagcattggaaatgagctggccaacagcgtgtgggaggagagcagccagggccgcaccaagcccagcgtggacagcacccgggaggagaaggagcgctggatccgggccaagtatgagcagaagctgttcctggcccccctgccctgcacagagctgagcctgggccagcacctgctgcgggccacagcagatgaggacctgaggacagccatcctgctgctggcccacggcagcagagatgaggtgaatgagacctgtggggagggagatggccgcacagccctgcacctggcctgcaggaaaggaaatgtggtgctggcccagctgctgatctggtacggcgtggatgtgacagccagagatgcccacggcaacacagccctggcctatgcccggcaggccagcagccaggagtgcattgatgtgctgctgcagtatggctgcccagatgaaagatttgtgctgatggccacccccaacctgagcagaagaaacaacaacagaaacaacagcagcggccgggtgcccaccatcatctag

SEQ ID NO: 19194 - DNA, 2712 bp, synthetic construct
  source 1..2712: mol_type = other DNA; note = Synthetic coding sequence
atgcctgagcagttctctgtggccgagttcctggccgtgacagctgaggacctgagcagccctgctggagctgctgcctttgctgccaagatgccccgctacagaggagctgccctggcccgggaggagatcctggagggggaccaggccatcctgcagaggatcaagaaggctgtgcgggccatccacagcagcggcctgggccacgtggagaatgaggagcagtaccgggaggccgtggagagcctgggcaacagccacctgagccagaacagccatgagctgagcacaggcttcctgaacctggccgtgttcacccgggaggtggccgccctcttcaagaacctgatccagaacctgaacaacatcgtgtccttccccctggacagcctgatgaagggccagctgagagatggccggcaggacagcaagaagcagctggagaaggcctggaaggactatgaggccaagatggccaagctggagaaggagcgggaccgggcccgggtgactggaggcatccctggagaggtggcccaggacatgcagcgggagcggcgcatcttccagctgcacatgtgtgagtacctgctgaaggccggggagagccagatgaagcagggccctgacttcctgcagagcctcatcaagttcttccacgcccagcacaacttcttccaggacggctggaaggccgcccagagcctcttccccttcatcgagaagctggccgcctctgtgcacgccctgcaccaggcccaggaggatgagctgcagaagctgacccagctgcgggacagcctgcggggcaccctgcagctggagagccgggaggagcacctgagcaggaagaacagcggctgcggctacagcatccaccagcaccagggcaacaagcagtttggaacagagaaggtgggcttcctgtacaagaagagtgatggcatcagaagagtgtggcagaagaggaaatgtggggtgaagtatggctgcctgaccatcagccacagcaccatcaaccggccccctgtgaagctgaccctgctgacctgccaggtgcggcccaaccctgaggagaagaagtgctttgacctggtgacccacaacagaacctaccacttccaggctgaagatgaacatgaatgtgaggcctgggtgtctgtgctgcagaacagcaaggatgaggccctgagcagcgccttcctgggggagcccagcgctggccctggctcctggggcagcgctggccatgatggagagccccatgacctgaccaagctgctgattgctgaggtgaagagccggcccggcaacagccagtgctgtgactgtggggctgctgaccccacctggctgagcaccaacctgggcgtgctgacctgcatccagtgcagcggcgtgcaccgggagctgggcgtgcgcttcagcaggatgcagagcctgaccctggacctgctgggccccagcgagctgctgctggccctgaacatgggcaacaccagcttcaatgaggtgatggaggcccagctgcccagccatggaggccccaagcccagcgctgagagtgacatgggcacccggcgggactacatcatggccaagtatgtggagcacagatttgcccggcgctgcaccccagagccccagaggctgtggacagccatctgcaacagagacctgctgtctgtgctggaggcctttgccaacggccaggactttggccagcccctgcccggcccagatgcccaggcccctgaggagctggtgctgcacctggccgtgaaggtggccaaccaggccagcctgcccctggtggacttcatcatccagaatggaggccacctggatgccaaggccgcagatggcaacacagccctgcactatgctgccctgtacaaccagcctgactgcctgaagctgctgctgaagggccgggccctggtgggcaccgtgaatgaggccggggagacagccctggacatcgccaggaagaagcaccacaaggaatgtgaggagctgctggagcaggcccaggccggcacctttgccttccccctgcacgtggactacagctgggtgatcagcacagagcccggcagtgacagcgaggaggatgaggaggagaagcgctgcctgctgaagctgcctgcccaggcccactgggccagcggccgcctggacatcagcaacaagacctatgaaacagtggccagcctgggcgccgccaccccccagggcgagagcgaggactgccccccacccctgcctgtgaagaacagcagcaggaccctggtgcagggctgtgcccggcatgccagcggggacagaagtgaggtgagcagcctgagcagcgaggcccctgagaccccagagagcctgggcagccctgccagcagcagcagcctgatgagccccctggagcccggggaccccagccaggccccacccaacagcgaggagggcctgcgggagcccccaggcaccagccggcccagcctgaccagcggcaccacccccagcgagatgtacctgcctgtgcgcttcagcagcgagagcaccaggagctacagaagaggagcccggagcccagaagatggccccagcgcccggcagcccctgcccaggagaaatgtgcctgtgggcatcacagaaggagatggcagcaggacaggcagcctgcctgccagctctgtgcagctgctgcaggactag

SEQ ID NO: 19195 - DNA, 1359 bp, synthetic construct
  source 1..1359: mol_type = other DNA; note = Synthetic coding sequence
atgatgaagaggcagctgcacaggatgaggcagctggcccagacaggcagcctgggccgcaccccagagacagctgagttcctgggggaggacctgctgcaggtggagcagaggctggagcccgccaagagagctgcccacaacatccacaagaggctgcaggcctgcctgcagggccagagcggggctgacatggacaagagggtgaagaagctgcccctgatggccctgagcaccaccatggccgagagcttcaaggagctggaccctgacagctccatgggcaaggccctggagatgagctgtgccatccagaaccagctggcccgcatcctggccgagtttgagatgaccctggagagagatgtgctgcagcccctgagccggctgtctgaggaggagctgcctgccatcctgaagcacaagaagagcctgcagaagctggtgtctgactggaacaccctgaagagccggctgagccaggccaccaagaacagcggcagcagccagggcctgggcggcagccctggcagccacagccacaccaccatggccaacaaggtggagaccctgaaggaggaggaggaggagctgaagaggaaggtggagcagtgcagagatgagtacctggccgacctgtaccactttgtgaccaaggaggacagctatgccaactacttcatccggctgctggagatccaggccgactaccacagaagaagcctgagcagcctggacacagccctggccgagctgcgggagaaccacggccaggccgaccacagccccagcatgacagccacccacttcccccgggtgtatggagtgtccctggccacccacctgcaggagctgggccgggagatcgccctgcccatcgaggcctgtgtgatgatgctgctgtctgagggcatgaaggaggagggcctcttccggctggccgccggggcctctgtgctgaagaggctgaagcagaccatggccagtgacccccacagcctggaggagttctgcagcgacccccatgctgtggccggggccctgaagagctacctgcgggagctgcctgagcccctgatgacctttgacctgtatgatgactggatgagagctgccagcctgaaggagcccggggcccggctgcaggccctgcaggaggtgtgcagccggctgcccccagagaacctgagcaacctgcgctacctgatgaagttcctggcccggctggccgaggagcaggaggtgaacaagatgacccccagcaacatcgccatcgtgctgggccccaacctgctgtggcccccagagaaggagggcacagagcccgcccgggagctgggcagccagaccctgtgctag

SEQ ID NO: 19196 - DNA, 1137 bp, synthetic construct
  source 1..1137: mol_type = other DNA; note = Synthetic coding sequence
atgaacaacagcggggctgatgaaattggcaagctgtttgtgggcggcctggactggagcaccacccaggagaccctgcggagctacttcagccagtatggagaggtggtggactgtgtgatcatgaaggacaagaccaccaaccagagccggggctttggatttgtgaagttcaaggaccccaactgtgtgggcaccgtgctggccagccggccccacaccctggatggcaggaacatcgaccccaagccctgcaccccccggggcatgcagcctgagaggacccggcccaaggagggctggcagaagggccccaggagtgacaacagcaagagcaacaagatctttgtgggcggcatcccccacaactgtggggagacagagctgcgggagtacttcaagaagtttggagtggtgacagaggtggtgatgatctatgatgctgagaagcagaggccccggggcttcggcttcatcacctttgaagatgagcagagcgtggaccaggccgtgaacatgcacttccatgacatcatgggcaagaaggtggaggtgaagagagctgagccccgggacagcaagagccaggcccctggccagcccggggccagccagtggggcagccgggtggtgcccaatgctgccaacggctgggccggccagcccccacccacctggcagcagggctacggcccccagggcatgtgggtgcctgctggccaggccatcggcggctacggccccccacctgctggccgcggggcccctcctcctcctccacccttcaccagctacatcgtgtccaccccacctgggggcttccccccaccccagggcttcccccagggctacggggccccaccccagttctcctttggctacggccccccacctcctcctccagaccagtttgcccctcctggggtgcccccacctccagccacccctggggccgcccccctggccttccccccaccacccagccaggccgccccagacatgagcaagcccccaacagcccagcctgacttcccctacggccagtatggcctgggcagctacagccctgcccctcctggctgcggcccccactttgtgtacagcctgatggtgcggctgagcagtgatgtggcctag

SEQ ID NO: 19197 - DNA, 2430 bp, synthetic construct
  source 1..2430: mol_type = other DNA; note = Synthetic coding sequence
atggaggtgctgcgggagaaggtggaggaggaggaggaggccgagcgggaggaggccgctgagtgggccgagtgggccaggatggagaagatgatgaggcctgtggaggtgaggaaggaggagatcaccctgaagcaggagaccctgcgggacctggagaagaagctgtctgagatccagatcaccgtgtctgctgagctgcctgccttcaccaaggacaccatcgacatcagcaagctgcccatctcctacaagaccaacacccccaaggaggagcacctgctgcaggtggccgacaacttcagccggcagtacagccacctgtgcccagacagagtgcccctcttcctgcaccccctgaatgaatgtgaggtgcccaagtttgtgtccaccaccctgcggcccaccctgatgccctacccagagctgtacaactgggacagctgtgcccagtttgtgtctgacttcctgaccatggtgcccctgcctgaccccctgaagcccaccatcaagaaggaggagaaggtgctgcccaagaagtacaccatcaagccaccccgggacctgtgcagcagatttgagcaggagcaggaggtgaagaagcagcaggagatccgggcccaggagaagaagaggctgcgggaggaggaggagcggctgatggaggccgagaaggccaagccagatgccctgcacggcctgcgggtgcacagctgggtgctggtgctgagcggcaagcgggaggtgcctgagaacttcttcatcgaccccttcaccggccacagctacagcacccaggatgagcacttcctgggcatcgagagcctgtggaaccacaagaactactggatcaacatgcaggactgctggaactgctgcaaggacctgatctttgacctgggggaccctgtgcgctgggagtacatgctgctgggcacagacaagagccagctgagcctgacagaagaagatgacagcggcatcaatgatgaagatgatgtggagaacctgggcaaggaggatgaggacaagagctttgacatgccccacagctgggtggagcagatcgagatcagccctgaggcctttgagacccgctgccccaacgggaagaaggtgatccagtacaagagggccaagctggagaagtgggccccctacctgaacagcaatggcctggtgtcccggctgaccacctatgaggacctgcagtgcaccaacatcctggagatcaaggagtggtaccagaaccgggaggacatgctggagctgaagcacatcaacaagaccacagacctgaagacagactacttcaagccaggccacccccaggccctgcgggtgcacagctacaagtccatgcagcctgagatggacagagtcatcgagttctatgaaacagcccgggtggatggcctgatgaagcgggaggagacccccaggaccatgacagagtactaccagggccgcccagacttcctgagctacagacatgccagctttggcccccgggtgaagaagctgaccctgagcagcgctgagagcaacccccggcccatcgtgaagatcacagagcgcttcttcagaaatcctgccaagccagcagaagaagatgtggccgagagggtcttcctggtggccgaggagcgcatccagctgcgctaccactgccgggaggaccacatcacagccagcaagcgggagttcctgcggaggacagaggtggacagcaagggcaacaagatcatcatgaccccagacatgtgcatcagctttgaggtggagcccatggagcacaccaagaagctgctgtaccagtatgaggccatgatgcacctgaagcgggaggagaagctgagccgccaccaggtgtgggagagcgagctggaggtgctggagatcctgaagctgcgggaggaggaggaggccgcccacaccctgaccatcagcatctatgacaccaagagaaatgagaagagcaaggagtaccgggaggccatggagaggatgatgcatgaggagcacctgcggcaggtggagacccagctggactacctggcccccttcctggcccagctgcccccaggagagaagctgacctgctggcaggccgtgcggctgaaggatgagtgcctgagtgacttcaagcagaggctcatcaacaaggccaacctgatccaggccaggtttgagaaggagacccaggagctgcagaagaagcagcagtggtaccaggagaaccaggtgaccctgaccccagaagatgaggacctgtacctgagctactgcagccaggccatgttccgcatccgcatcctggagcagaggctgaacagacacaaggagctggcccccctgaagtacctggccctggaggagaagctgtacaaggacccccggctgggggagctgcagaagatctttgcctag

SEQ ID NO: 19198 - DNA, 828 bp, synthetic construct
  source 1..828: mol_type = other DNA; note = Synthetic coding sequence
atgtggcccctgacagccctgctgctgctggtgcccagcagcggccaggccgccaccctggagaagcccatcctgagcctgcaccccccctggaccaccatcttcaagggggagcgggtgaccctgaagtgtgatggctaccaccccctgctgctggagctgcagcccatcagcaccctgtggtacctgggccacctgctgctgcccagccacaagaagagcattgaggtgcagaccccaggagtgtaccgctgccagaccaggggggcccctgtgtctgaccccatccacctgtctgtgtccaatgactggctgatcctgcaggtgccctatgcccctgtgtttgaaggagagcccctggtgctgcgctgccggggctggtatgacaaggtggtgtacaagctgcactactaccatgatggccaggccgtgcgctacttccacagcagcgccaactacacagtgctgcaggcccgggccagtgacagcggccgctaccagtgcagcggcaccatgagaattcctgtggagagcgcccccatgttttctgccaaggtggccgtgacagtgcaggaggcccggcatgctgctgctgtgcgggtgctgcaggtgcagcccaggggggcccccctgcggctgggcagaagagtgcacagccctggggcccggggccgcggggccagaattgtgctggtgcggggcggctaccgccacccccagtgcccagagacccagagcgtggccgccgcccctggagctggcttcagccctggccctggcctgcaccaccggcccagctccatgggccgcagcctgggctcctggtag

SEQ ID NO: 19199 - DNA, 657 bp, synthetic construct
  source 1..657: mol_type = other DNA; note = Synthetic coding sequence
atgaactgccgctctgaggtgctggaggtgtctgtggagggccggcaggtggaggaggccatgctggccgtgctgcacacagtgctgctgcacaggagcacaggcaagttccactacaagaaggagggcacctacagcattggaacagtgggcacccaggatgtggactgtgacttcatcgacttcacctacgtgcgggtgtcctctgaggagctggaccgggccctgaggaaggtggtgggggagttcaaggatgccctgaggaacagcggaggagatggcctgggccagatgagcctggagttctaccagaagaagaagagccgctggcccttcagtgatgagtgcatcccctgggaggtgtggacagtgaaggtgcacgtggtggccctggccacagagcaggagcggcagatctgccgggagaaggtgggggagaagctgtgtgagaagatcatcaacatcgtggaggtgatgaacagacatgagtacctgcccaagatgcccacccagagcgaggtggacaacgtgtttgacaccggcctgagagatgtgcagccctacctgtacaagatctccttccagatcacagatgccctgggcacctctgtgaccaccaccatgagaagactcatcaaggacaccctggccctgtag

SEQ ID NO: 19200 - DNA, 552 bp, synthetic construct
  source 1..552: mol_type = other DNA; note = Synthetic coding sequence
atgatgcagatctgtgacacctacaaccagaagcacagcctcttcaatgccatgaaccgcttcatcggggctgtgaacaacatggaccagacagtgatggtgcccagcctgctgagagatgtgcccctggccgaccccggcctggacaatgatgtgggcgtggaggtgggcggcagcggcggctgcctggaggagaggaccccacctgtgcctgattctggcagcgccaacggcagcttctttgcccccagccgggacatgtacagccactacgtgctgctgaagagcatcagaaatgacatcgagtggggcgtgctgcaccagcccccacctcctgctggcagcgaggagggcagcgcctggaagagcaaggacatcctggtggacctgggccacctggagggcgcagatgctggggaggaggacctggagcagcagttccactaccacctgcggggcctgcacacagtgctgagcaagctgaccaggaaggccaacatcctgaccaaccgctacaagcaggagatcggcttcggcaactggggccactag

SEQ ID NO: 19201 - DNA, 369 bp, synthetic construct
  source 1..369: mol_type = other DNA; note = Synthetic coding sequence
atgctgtttgccccctgctgccaccagtgtggggagttcatcatcggccgggtcatcaaggccatgaacaacagctggcaccctgagtgcttccgctgtgacctgtgccaggaggtgctggccgacattggatttgtgaagaatgccggccgccacctgtgccggccctgccacaaccgggagaaggcccggggcctgggcaagtacatctgccagaagtgccacgccatcattgatgagcagcccctcatcttcaagaatgacccctaccacccagaccacttcaactgtgccaactgtggccaggagggcagtgactgccgctgcaccggggctgagcggggggccatcctgcctgccatgccctag

SEQ ID NO: 19202 - DNA, 1083 bp, synthetic construct
  source 1..1083: mol_type = other DNA; note = Synthetic coding sequence
atggattctgagctgatgcacagcatcgtgggcagctaccacaagcccccagagcgggtgtttgtgcccagcttcacccagaatgagcccagccagaactgccacccagccaacctggaggtgaccagccccaagatcctgcacagccccaacagccaggagaagcagctggagtacaccaagaggatggtgctgaatgtggagcgggagaagaacatgatcctggagcagcaggcccagctgcagcgggagaaggagcaggaccagatgaagctgtatgccaagctggagaagctggatgtgctggagaaggagtgcttccggctgaccaccacccagaagacagctgaggacaagatcaagcacctggaggagaagctgaaggaggaggagcaccagaggaagctgttccaggacaaggccagcgagctgcagacaggcctggagatcagcaagatcatcatgagctctgtgagcaacctgaagcacagcaaggagaagaagaagagcagcaagaagaccaagtgcatcaagagaagaccaccctggcagatctgcagcaagtttggagccctgccctttgtggccgagaagcccagcaggaccacctcctggtgcaaggccatccccccagattctgagaagagcatcagcatctgtgacaacctgtctgagctgctgatggccatgcaggatgagctggaccagatgtccatggagcaccaggagctgctgaagcagatgaaggagacagagagccacagcgtgtgtgatgacattgaatgtgagctggagtgcctgctgaagaagatggagatcaagggggagcagatcagcaagctgaagaagcaccaggacagcgtgtgcaagctgcagcagaaggtgcagaacagcaagatgtctgaggccagcggcatccagcaggaggacagctaccccaagggcagcaagaacatcaagaacagccccaggaagtgcctgacagacaccaacctcttccagaagaacagcagcttccaccccatccgggtgcacaacctgcagatgaagctgcggagagatgacatcatgtgggagcagtag

SEQ ID NO: 19203 - DNA, 1758 bp, synthetic construct
  source 1..1758: mol_type = other DNA; note = Synthetic coding sequence
atgagcggcagcacccccttccagatgaggctggtgcacctggacctgaagggggccccacccaaggtgtcctacctgtctgagatcttccccctcttccgggccctgggcgccaacggcctgctgattgaatatgaggacatgttcccctatgagggccccctgcggctgctgcgggccaagtatgcctacagccccagcgagatcaaggagatcctgcacctggccggcctgaatgagctggaggtgatccccctggtgcagaccttcggccacatggagtttgtgctgaagcacacagcctttgcccacctgcgggaggtgggcagcttcccctgcaccctgaacccccatgaggccgagagcctggccctggtgggcgccatgattgaccaggtgctggagctgcaccctggggcccagaggctgcacatcggctgtgatgaggtgtactacctgggggagggggaggccagccgccgctggctgcagcaggagcagaacagcacaggcaagctgtgcctgagccacatgagagctgtggccagcggcgtgaaggcccggcggcccagcgtgacccccctggtgtgggatgacatgctgcgggacctgcctgaggaccagctggccgccagcggcgtgccccagctggtggagcctgtgctgtgggactacacagctgacctggatgtgcacggcaaggtgctgctgatgcagaagtaccgccgctgtggcttcccccagctgtgggccgccagcgccttcaagggggccaccggccccagccaggccgtgccccctgtggagcaccacctgagaaatcatgtgcagtggctgcaggtggccggcagcggccccacagacagcctgcagggcatcatcctgaccggctggcagagatatgaccactacagcgtgctgtgtgagctgctgcctgctggggtgcccagcctggccgcctgcctgcagctgctgctgcggggcggctttgatgaagatgtgaaggccaaggtggagaacctgctgggcatcagcagcctggagaagacagatcctgtgcggcaggccccctgcagccccccctgccccctgctgcccctgcccttcccccggccctggaggcagctgttctctgctggcctgtctgctggccggggccctgcccccagcctggccgccaccagcctgcccctgagccacaagagcgccagcatctgtgccgccctgtggatgcgctgctggagggccaccggcatgagcctggccggcagcgcccccaccacagccagcggcagcagcagcaccaggtcctggttcagcaccagcagcccccagaggtctgcctcctggcacagcggggcccccagctgccgctcctggaggctgccctgctcctggctgagcaccaggatgccctggaggagcggctggaggaagacctgcaccccagcctgcagcggctgcaagctgtgctgcaggaccagcgcccgctgcctgcccccacgctgccaccccccagccctggccggcaccctgctgcggaccccagagggccgggcccacgcccggggcctgctgctggaggccggcggggccctgcactgccagatggcctgggccatccgggcccacgtgggcgtggtgcccagcggccctgctgtgtcctgcccccacagcgtgcctgagggccctggccagcccctgggggagcggctggagaacacagagggcagcagcacaggccgcccagccctgtag

SEQ ID NO: 19204 - DNA, 2112 bp, synthetic construct
  source 1..2112: mol_type = other DNA; note = Synthetic coding sequence
atggaggccctgctggagggcatccagaacagaggacatggaggcggcttcctgaccagctgtgaggccgagctgcaggagctgatgaagcagattgacatcatggtggcccacaagaagtctgagtgggagggccgcacccacgccctggagacctgcctgaagatccgggagcaggagctgaagagcctgcggagccagctggatgtgacccacaaggaggtgggcatgctgcaccagcaggtggaggagcacgagaagatcaagcaggagatgaccatggagtacaagcaggagctgaagaagctgcacgaggagctgtgcatcctgaagaggagctatgagaagctgcagaagaagcagatgagggagttccggggcaacaccaagaaccaccgggaggacagaagtgaaattgagcggctgacagccaagattgaggagttccggcagaagagcctggactgggagaagcagaggctcatctaccagcagcaggtgagcagcctggaggcccagaggaaggccctggccgagcagagcgagatcatccaggcccagctggtgaacaggaagcagaagctggagagcgtggagctgagcagccagagcgagatccagcacctgagcagcaagctggagcgggccaatgacaccatctgtgccaatgagctggagattgagcggctgaccatgagggtgaatgacctggtgggcacctccatgacagtgctgcaggagcagcagcagaaggaggagaagctgcgggagagcgagaagctgctggaggccctgcaggaggagaagcgggagctgaaggccgccctgcagagccaggagaacctgatccacgaggcccgcatccagaaggagaagctgcaggagaaggtgaaggccaccaacacccagcacgctgtggaggccatccggccccgggaggagagcctggccgagaagaagtacaccagccagggccagggcgacctggacagcgtgctgagccagctgaacttcacccacaccagcgaggacctgctgcaggccgaggtgacctgcctggagggcagcctggagagcgtgtctgccacctgcaagcagctgagccaggagctgatggagaagtatgaggagctgaagaggatggaggcccacaacaatgagtacaaggccgagatcaagaagctgaaggagcagatcctgcagggcgagcagagctacagcagcgccctggagggcatgaagatggagatcagccacctgacccaggagctgcaccagagggacatcaccatcgccagcaccaagggcagcagcagtgacatggagaagaggctgcgggcagagatgcagaaggccgaggacaaggctgtggagcacaaggagatcctggaccagctggagagcctgaagctggagaacagacacctgtctgagatggtgatgaagctggagctgggcctgcacgaggccaaggagatcagcctggccgacctgcaggagaactacatcgaggccctgaacaagctggtgtctgagaaccagcagctgcagaaggacctgatgaacaccaagagccagctggagatcagcacccagatgtgcaagaagcagaatgaccgcatcttcaagcccacccacagcaggaccacagagttcaagaacacagagttcaagcccacccacggccagcacagacatgatggcatcaagacagagcactacaagacagacctgcacagcccccggggccaggccagtgacagcatcaaccccatgagccgggtgctgagccccctgagcccccagatcagcccctgcagcagcaccaggagcctgaccagctacagcctgtgcaagacccacagcctgcccagcgccctggacaccaatgaggccaacttcagtgacaccatgtctgagagcatgaatgaccaggaggagttcatcagcagctgcagcctgcctgtgagccccctgggcagcatcgccacccgcttcctggaggaggaggagctgcggagccaccacatcctggagcggctggatgcccacatcgaggagctgaagcgggagagcgagaagacagtgcggcagttcaccgccctgaagtag

SEQ ID NO: 19205 - DNA, 1626 bp, synthetic construct
  source 1..1626: mol_type = other DNA; note = Synthetic coding sequence
atgagcagctgtgtgagcagccagcccagcagcaacagagctgccccccaggatgagctgggcggccggggcagcagcagcagcgagagccagaagccctgtgaggccctgcggggcctgagcagcctgagcatccacctgggcatggagagcttcatcgtggtgacagaatgtgagcccggctgtgctgtggacctgggcctggcccgggaccggcccctggaggctgatggccaggaggtgcccctggacaccagcggcagccaggcccggccccacctgagcggcaggaagctgagcctgcaggagaggagccagggcggcctggccgccggcggcagcctggacatgaatggccgctgcatctgccccagcctgccctacagccctgtgagcagcccccagagcagcccccggctgccccggcggcccaccgtggagagccaccacgtgtccatcaccggcatgcaggactgtgtgcagctgaaccagtacaccctgaaggatgaaattggcaagggcagctatggagtggtgaagctggcctacaatgaaaatgacaacacctactatgccatgaaggtgctgagcaagaagaagctgatccggcaggccggcttcccccggcggcccccaccccggggcaccaggcctgcccctgggggctgcatccagccccggggccccatcgagcaggtgtaccaggagatcgccatcctgaagaagctggaccaccccaacgtggtgaagctggtggaggtgctggatgaccccaatgaagaccacctgtacatggtgtttgagctggtgaaccagggccctgtgatggaggtgcccaccctgaagcccctgtctgaggaccaggcccgcttctacttccaggacctgatcaagggcatcgagtacctgcactaccagaagatcatccaccgggacatcaagcccagcaacctgctggtgggggaggatggccacatcaagattgctgactttggagtgtccaatgagttcaagggcagtgatgccctgctgagcaacacagtgggcaccccagccttcatggcccctgagagcctgtctgagaccaggaagatcttcagcggcaaggccctggatgtgtgggccatgggcgtgaccctgtactgctttgtgtttggccagtgccccttcatggatgagcgcatcatgtgcctgcacagcaagatcaagagccaggccctggagttcccagaccagcctgacattgctgaggacctgaaggacctgatcaccaggatgctggacaagaaccctgagagcagaattgtggtgcctgagatcaagctgcacccctgggtgaccaggcatggagctgagcccctgcccagtgaagatgagaactgcaccctggtggaggtgacagaggaggaggtggagaacagcgtgaagcacatccccagcctggccaccgtcatcctggtgaagaccatgatcaggaagaggagctttggaaacccctttgagggcagccggcgggaggagaggagcctgagcgcccctggcaacctgctgaccaagcagggcagcgaggacaacctgcagggcacagatcctcctcctgtgggggaggaggaggtgctgctgtag

SEQ ID NO: 19206 - DNA, 2463 bp, synthetic construct
  source 1..2463: mol_type = other DNA; note = Synthetic coding sequence
atgacagacacccggcggcgggtgaaggtgtacaccctgaatgaagatcggcagtgggatgaccggggcaccggccacgtgagcagcggctacgtggagcggctgaagggcatgagcctgctggtgcgggcagagagtgatggcagcctgctgctggagagcaagatcaaccccaacacagcctaccagaagcagcaggacaccctcatcgtgtggagcgaggccgagaactatgacctggccctgtccttccaggagaaggccggctgtgatgagatctgggagaagatctgccaggtgcagggcaaggaccccagcgtggacatcacccaggacctggtggatgaaagtgaggaggagagatttgatgacatgagcagccctggcctggagctgcccagctgtgagctgagccggctggaggagattgctgagctggtggccagcagcctgcccagccccctgcggcgggagaagctggccctggccctggagaatgaaggctacatcaagaagctgctggagctgttccacgtgtgtgaggacctggagaacatcgagggcctgcaccacctgtatgagatcatcaagggcatcttcctgctgaacagaacagccctgtttgaggtgatgttttctgaggagtgcatcatggatgtgattggctgcctggagtatgaccctgccctgagccagcccaggaagcaccgggagttcctgaccaagacagccaagttcaaggaggtgatccccatcagtgaccctgagctgaagcagaagatccaccagacctacagagtgcagtacatccaggacatggtgctgcccaccccatctgtgtttgaggagaacatgctgagcaccctgcacagcttcatcttcttcaacaaggtggagatcgtgggcatgctgcaggaggatgagaagttcctgacagacctgtttgcccagctgacagatgaggccacagatgaggagaagaggcaggagctggtgaacttcctgaaggagttctgtgccttcagccagaccctgcagccccagaacagagatgccttcttcaagaccctgagcaacatgggcatcctgcctgccctggaggtgatcctgggcatggatgacacccaggtgcgctctgctgccacagacatcttctcctacctggtggagtacaaccccagcatggtgcgggagtttgtgatgcaggaggcccagcagaatgatgatgacatcctgctgatcaacctgatcatcgagcacatgatctgtgacacagatcctgagctgggcggcgctgtgcagctgatgggcctgctgcggaccctggtggaccctgagaacatgctggccacagccaacaagacagagaagacagagttcctgggcttcttctacaagcactgcatgcacgtgctgacagcccccctgctggccaacaccacagaggacaagcccagcaaggatgacttccagacagcccagctgctggccctggtgctggagctgctgaccttctgtgtggagcaccacacctaccacatcaagaactacatcatcaacaaggacatcctgcggcgggtgctggtgctgatggccagcaagcacgccttcctggccctgtgtgccctgcgcttcaagaggaagatcatcggcctgaaggatgagttctacaaccgctacatcatgaagagcttcctgtttgagcctgtggtgaaggccttcctgaacaacggcagccgctacaacctgatgaacagcgccatcatcgagatgtttgagttcatccgggtggaggacatcaagagcctgacagcccacgtgattgagaactactggaaggccctggaggatgtggactatgtgcagaccttcaagggcctgaagctgcgctttgagcagcagcgggagcggcaggacaaccccaagctggacagcatgaggagcatcctgaggaaccaccgctacagaagagatgcccggaccctggaggatgaggaggagatgtggttcaacacagatgaagatgacatggaggatggagaggccgtggtgagccccagcgacaagaccaagaatgatgatgacatcatggaccccatcagcaagttcatggagaggaagaagctgaaggagagcgaggagaaggaggtgctgctgaagaccaacctgagcggccggcagagccccagcttcaagctgagcctgagcagcggcaccaagaccaacctgaccagccagagcagcaccaccaacctgcccggcagccctggcagccctggcagccctggcagccctggcagccctggctctgtgcccaagaacaccagccagacagctgccatcaccaccaagggcggcctggtgggcctggtggactacccagatgatgatgaagatgatgatgaagatgaggacaaggaggacaccctgcccctgagcaagaaggccaagtttgacagctag

SEQ ID NO: 19207 - DNA, 2382 bp, synthetic construct
  source 1..2382: mol_type = other DNA; note = Synthetic coding sequence
atgtctgagcagggcgacctgaaccaggccatcgccgaggagggcggcacagagcaggagacagccaccccagaaaatggcatcgtgaagtctgagagcctggatgaggaggagaagctggagctgcagaggcggctggaggcccagaaccaggagaggaggaagagcaagagcggggccggcaagggcaagctgaccaggagcctggccgtgtgtgaggagagcagcgcccggcctggaggagagagcctgcaggaccaggagagcatccacctgcagctgagcagcttcagcagcctgcaggaggaggacaagagcaggaaggatgattctgagcgggagaaggagaaggacaagaacaaggacaagaccagcgagaagcccaagatccgcatgctgagcaaggactgcagccaggagtacacagacagcactggaattgacctgcacgagttcctgatcaacaccctgaagaacaacagccgggacaggatgatcctgctgaagatggagcaggagatcatcgacttcatcgctgacaacaacaaccactacaagaagttcccccagatgagcagctaccagaggatgctggtgcaccgggtggccgcctacttcggcctggaccacaacgtggaccagacaggcaagagcgtcatcatcaacaagaccagcagcacccgcatccctgagcagcgcttctgtgagcacctgaaggatgagaagggggaggagagccagaagcgcttcatcctgaagagggacaacagcagcattgacaaggaggacaaccagagcgtgtgcagccaggagagcctgtttgtggagaacagaggcaacagagatggcagcggccgcaccagcggcagccggcagagcagcagtgaaaatgagctgaagtggagcgaccaccagagggcctggagcagcacagacagcgacagcagcaacagaaacctgaagccagccatgaccaagacagccagctttggaggcatcaccgtgctgaccaggggggacagcaccagcagcaccaggagcacaggcaagctgagcaaggccggcagcgagagcagcagcagcgctggcagcagcggcagcctgagcaggacccacccccccctgcagagcacccccctggtgtctggagtggccgccggcagccctggctgtgtgccctacccagaaaatggaattggaggccaggtggcccccagcagcaccagctacatcctgctgcccctggaggccgccaccggcatccccccaggcagcatcctgctgaacccccacacaggccagccctttgtgaacccagatggcaccccagccatctacaacccccccaccagccagcagcccctgcggagcgccatggtgggccagagccagcagcagcccccccagcagcagcccagcccccagccccagcagcaggtgcagcccccccagccccagatggccggccccctggtgacccagagcgtgcagggcctgcaggccagcagccagagcgtgcagtacccagctgtgtccttccccccccagcacctgctgcctgtgagccccacccagcacttccccatgagagatgatgtggccacccagtttggccagatgaccctgagccggcagagcagtggagagaccccagagcccccatctggccctgtgtaccccagcagcctgatgccccagcctgcccagcagcccagctatgtgattgccagcacaggccagcagctgcccaccggcggcttcagcggcagcggcccccccatcagccagcaggtgctgcagcccccacccagcccccagggctttgtgcagcagcccccaccagcccagatgcctgtgtactactaccccagcggccagtaccccaccagcaccacccagcagtaccggcccatggcccctgtgcagtacaatgcccagaggagccagcagatgccccaggccgcccagcaggccggctaccagcctgtgctgagcggccagcagggcttccagggcctcatcggcgtgcagcagcccccccagagccagaatgtcatcaacaaccagcagggcacccctgtgcagagcgtgatggtgtcctaccccaccatgagcagctaccaggtgcccatgacccagggcagccagggcctgccccagcagagctaccagcagcccatcatgctgcccaaccaggccggccagggcagcctgcctgccaccggcatgcctgtgtactgcaatgtgaccccacccaccccccagaacaacctgcggctgattggcccccactgccccagcagcacagtgcctgtgatgtctgccagctgcaggaccaactgtgcctccatgagcaatgccggctggcaggtgaagttctag

SEQ ID NO: 19208 - DNA, 1467 bp, synthetic construct
  source 1..1467: mol_type = other DNA; note = Synthetic coding sequence
atgaggttccactggctgcccaccctgtctgagccctttgacaggaaccaggagctggagacctgcatccggcccctgtggacccccagcggcagcgcctgtgaaacagagcacaacaagtccatggacatgggcaaccagcaccccagcatcagccggctgcaggagatccagaaggaggtgaagtctgtggagcagcaggtgattggcttcagcggcctgagtgatgacaagaactacaagaagctggagcgcatcctgaccaagcagctgtttgaaattgacagcgtggacacagagggcaagggggacatccagcaggccaggaagagagctgcccaggagacagagcggctgctgaaggagctggagcagaatgccaaccacccccacagaattgagatccagaacatctttgaggaggcccagagcctggtgcgggagaagatcgtgcccttctacaatggaggcaactgtgtgacagatgaatttgaggagggcatccaggacatcatcctgcggctgacccacgtgaagacaggaggcaagatcagcctgaggaaggcccgctaccacaccctgaccaagatctgtgctgtgcaggagatcatcgaggactgcatgaagaagcagcccagcctgcccctgtctgaagatgcccaccccagcgtggccaagatcaactttgtgatgtgtgaggtgaacaaggcccggggcgtgctgattgccctgctgatgggcgtgaacaacaatgagacctgccgccacctgagctgtgtgctgagcggcctgattgctgacctggatgccctggatgtgtgtggccgcacagagatccggaactacagaagagaggtggtggaggacatcaacaagctgctgaagtacctggacctggaggaggaggccgacaccaccaaggcctttgacctgcggcagaaccacagcatcctgaagattgagaaggtgctgaagaggatgagggagatcaagaatgagctgctgcaggcccagaaccccagcgagctgtacctgagcagcaagacagagctgcagggcctgattggccagctggatgaggtgtccctggagaagaacccctgcatccgggaggcccggcggcgggccgtcatcgaggtgcagaccctcatcacctacatcgacctgaaggaggccctggagaagaggaagctgtttgcctgtgaggagcaccccagccacaaggctgtgtggaatgtgctgggcaacctgtctgagatccagggcgaggtgctgagctttgatggcaacagaacagacaagaactacatccggctggaggagctgctgaccaagcagctgctggccctggatgctgtggacccccagggcgaggagaagtgcaaggccgccaggaagcaggccgtgcggctggcccagaacatcctgagctacctggacctgaagagtgatgagtgggagtactag

SEQ ID NO: 19209 - DNA, 978 bp, synthetic construct
  source 1..978: mol_type = other DNA; note = Synthetic coding sequence
atgggcaagatggtgtctgtcatcaacacagtggacaccagccatgaggacatgattcatgatgcccagatggactactacggcacccggctggccacctgcagcagtgacagatctgtgaagatctttgatgtgagaaatggaggccagatcctgattgctgacctgcggggccacgagggccctgtgtggcaggtggcctgggcccaccccatgtatggcaacatcctggccagctgcagctatgacaggaaggtgatcatctggagggaggagaatggcacctgggagaagagccatgagcacgccggccatgacagctctgtgaacagcgtgtgctgggcccctcatgactatggcctcatcctggcctgtggcagcagtgatggagccatcagcctgctgacctacaccggggagggccagtgggaggtgaagaagatcaacaatgcccacaccatcggctgcaatgctgtgtcctgggccccagctgtggtgcccggcagcctgattgaccaccccagcggccagaagcccaactacatcaagagatttgccagcggcggctgtgacaacctgatcaagctgtggaaggaggaggaggatggccagtggaaggaggagcagaagctggaggcccacagcgactgggtgagagatgtggcctgggcccccagcatcggcctgcccaccagcaccatcgccagctgcagccaggacggccgggtcttcatctggacctgtgatgatgccagcagcaacacctggagccccaagctgctgcacaagttcaatgatgtggtgtggcacgtgtcctggagcatcacagccaacatcctggccgtgtctggaggagacaacaaggtgaccctgtggaaggagagcgtggatggccagtgggtgtgcatcagtgatgtgaacaagggccagggctctgtgtctgcctctgtgacagagggccagcagaatgagcagtag

SEQ ID NO: 19210 - DNA, 846 bp, synthetic construct
  source 1..846: mol_type = other DNA; note = Synthetic coding sequence
atgctgttcatcttccccctgagcctgccctggaggcccagctgctggaaggagagctgcagcacaggccagaggcaggccggccgcagccgggaggacagcgtgaccccaccacccagcagcccctggcccaccccacctgctggggccatgagcaccaagcaggaggccaggagagatgaaggagaggcccggacccggggccaggaggcccagctgcgggaccgggcccacctgagccagcagaggcggctgaagcaggccacccagttcctgcacaaggacagcgctgacctgctgcccctggacagcctgaagaggctgggcaccagcaaggacctgcagcccaggagcgtcatccagaggcggctggtggagggcaaccccaactggctgcagggcgagccccccaggatgcaggacctgatccacggccaggagagcaggaggaagaccagcaggacagagatcccagccctgctggtgaactgcaagtgccaggaccagctgctgcgggtggccgtggacaccggcacccagtacaaccgcatctctgctggctgcctgagccggctgggcctggagaagagggtgctgaaggccagcgctggggacctggcccctggcccccccacccaggtggagcagctggagctgcagctgggccaggagaccgtggtgtgcagcgcccaggtggtggatgctgagagccctgagttctgcctgggcctgcagaccctgctgagcctgaagtgctgcatcgacctggagcacggcgtgctgcggctgaaggcccccttcagcgagctgcccttcctgcccctgtaccaggagcccggccagtag

SEQ ID NO: 19211 - DNA, 1533 bp, synthetic construct
  source 1..1533: mol_type = other DNA; note = Synthetic coding sequence
actggaggcggcgtggccccagctggccaggtgaggacagccacctgggcccggcgggcccggccctacaggaagatggccgccaggactggaacagagctggccagcgctgccagcaccacagcccctggcagcagcaagaggaggaagaggcacccctggcacacagtgtccagaagacctggccgcacccccaagtggaggctgccccgcatcagcgcccgggccccctaccgcctgcggcggctgcggcggcacacctactggccaccccggcggcctgtggccgccagccgctgctggcctgtgggcgccacccccctgggctctgtgggcggccgcacaggcaagatggatgctgccaccctgacctatgacaccctgcgctttgctgagtttgaggacttccctgagaccagcgagcctgtgtggatcctgggcaggaagtacagcatcttcacagagaaggatgagatcctgagtgatgtggccagccggctgtggttcacctacaggaagaacttccctgccatcggcggcaccggccccaccagtgacaccggctggggctgcatgctgcgctgtggccagatgatctttgcccaggccctggtgtgccgccacctgggccgggactggcgctggacccagaggaagaggcagcctgacagctacttctctgtgctgaatgccttcatcgacaggaaggacagctactacagcatccaccagatcgcccagatgggcgtgggggagggcaagagcatcggccagtggtacggccccaacacagtggcccaggtgctgaagaagctggccgtgtttgacacctggagcagcctggccgtgcacatcgccatggacaacacagtggtgatggaggagatccggcggctgtgcaggacctctgtgccctgtgccggggccacagccttccctgctgacagcgacagacactgcaatggcttccctgctggagctgaggtgaccaaccggcccagcccctggaggcccctggtgctgctgatccccctgcggctgggcctgacagacatcaatgaggcctacgtggagaccctgaagcactgcttcatgatgccccagagcctgggcgtgattggaggcaagcccaacagcgcccactacttcatcggctacgtgggggaggagctgatctacctggacccccacaccacccagcctgctgtggagcccacagatggctgcttcatcccagatgagagcttccactgccagcaccccccctgcaggatgagcattgctgagctggaccccagcattgctgtgggcttcttctgcaagacagaagatgacttcaatgactggtgccagcaggtgaagaagctgagcctgctgggcggggccctgcccatgtttgagctggtggagctgcagcccagccacctggcctgcccagatgtgctgaacctgagcctggacagcagtgatgtggagcggctggagcgcttctttgacagtgaagatgaagattttgagatcctgagcctgtag

SEQ ID NO: 19212 - DNA, 552 bp, synthetic construct
  source 1..552: mol_type = other DNA; note = Synthetic coding sequence
atggccagcaacaagaccaccctgcagaagatgggcaagaagcagaatggcaagagcaagaaggtggaggaggccgagcctgaggagtttgtggtggagaaggtgctggaccggcgggtggtgaatggcaaggtggagtacttcctgaagtggaagggcttcacagatgctgacaacacctgggagcctgaggagaacctggactgcccagagctgattgaggccttcctgaacagccagaaggccggcaaggagaaggatggcaccaagaggaagagcctgagtgacagcgagagtgatgacagcaagagcaagaagaagagagatgctgctgacaagccccggggctttgcccggggcctggaccctgagcgcatcattggagccacagacagcagtggagagctgatgttcctgatgaagtggaaggacagtgatgaggccgacctggtgctggccaaggaggccaacatgaagtgcccccagatcgtgattgccttctatgaggagcggctgacctggcacagctgcccagaagatgaggcccagtag

SEQ ID NO: 19213 - DNA, 1464 bp, synthetic construct
  source 1..1464: mol_type = other DNA; note = Synthetic coding sequence
atggagaggagcggccagagggtgaccacctgggactgtgaccagggcaagcacagcgacagcgactacagagaagatggcatggacctgggcagtgatgctggcagcagcagcagcagcagccgggccagcagccagagcaacagcaccaaggtgaccccctgcagcgagtgcaagagcagcagcagccctgggggcagcctggacctggtgtctgccctggaggactatgaggagcccttccctgtgtaccagaagaaggtgattgatgagtgggcccctgaggaggatggagaggaggaggaggaggaggatgagcgggaccagaggggctacagagatgacaggagccctgcccgggagcctggagatgtgtctgcccggaccaggtctgggggcggcggcggccgcagcgccaccacagccatgcctcctcctgtgcccaatggaaacctgcaccagcacgacccccaggacctgcggcacaatggaaatgtggtggtggccggccggcccagctgcagccggggcccccggcgggccatccagaagccccagcctgctgggggcagaagaagtggccggggccctgctgctgggggcctgtgcctgcagcccccagatggcggcacctgtgtgcctgaggagccccctgtgccccccatggactgggaggccctggagaagcacctggccggcctgcagttccgggagcaggaggtgaggaaccagggccaggcccggaccaacagcaccagcgcccagaagaatgaaagagagagcatccggcagaagctggccctgggcagcttctttgatgatggccctggcatctacaccagctgcagcaagagcggcaagcccagcctgagcagccggctgcagagcggcatgaacctgcagatctgctttgtgaatgacagcggcagtgacaaggacagtgatgctgatgacagcaagacagagaccagcctggacacccccctgagccccatgagcaagcagagcagcagctacagcgaccgggacaccacagaggaggagagcgagagcctggatgacatggacttcctgacccggcagaagaagctgcaggccgaggccaagatggccctggccatggccaagcccatggccaagatgcaggtggaggtggagaagcagaacaggaagaagagccctgtggccgacctgctgccccacatgccccacatcagtgaatgtctgatgaagaggagcctgaagcccacagacctgcgggacatgaccatcggccagctgcaggtgattgtgaatgacctgcacagccagatcgagagcctgaatgaggagctggtgcagctgctgctgatcagagatgagctgcacacagagcaggatgccatgctggtggacatcgaggacctgaccaggcatgctgagagccagcagaagcacatggccgagaagatgcctgccaagtag

SEQ ID NO: 19214 - DNA, 927 bp, synthetic construct
  source 1..927: mol_type = other DNA; note = Synthetic coding sequence
atgaagagggcccaccctgagtacagcagcagtgacagcgagctggatgagaccatcgaggtggagaaggagagcgcagatgaaaatggaaacctgagcagcgccctgggctccatgagccccaccaccagcagccagatcctggccaggaagagaagaagaggcatcatcgagaagagaagaagagaccgcatcaacaacagcctgtctgagctgcggcggctggtgcccagcgcctttgagaagcaggtgatggagcagggcagcgccaagctggagaaggccgagatcctgcagatgacagtggaccacctgaagatgctgcacacagctgggggcaagggctactttgatgcccacgccctggccatggactaccgcagcctgggcttcagagaatgtctggccgaggtggcccgctacctgagcatcatcgagggcctggatgccagtgaccccctgcgggtgcggctggtgagccacctgaacaactatgccagccagcgggaggccgccagcggggcccatgctggcctgggccacatcccctggggcaccgtgtttggccaccacccccacatcgcccaccccctgctgctgccccagaatggacatggaaatgccggcaccacagccagccccacagagccccaccaccagggccgcctgggcagcgcccaccctgaggccccagccctgcgggccccacccagcggcagcctgggccctgtgctgcctgtggtgaccagcgccagcaagctgagcccccccctgctgagctctgtggccagcctgagcgccttccccttctcctttggcagcttccacctgctgagccccaatgccctgagccccagcgcccccacccaggccgccaacctgggcaagccctaccggccctggggcacagaaattggagccttctag

SEQ ID NO: 19215 - DNA, 1338 bp, synthetic construct
  source 1..1338: mol_type = other DNA; note = Synthetic coding sequence
atgtctgtgacctatgatgacagcgtgggcgtggaggtgtccagtgacagcttctgggaggtgggcaactacaagaggacagtgaagagaattgatgatggccaccggctgtgcagcgacctgatgaactgcctgcacgagcgggccagaattgagaaggcctatgcccagcagctgacagagtgggcccggcgctggaggcagctggtggagaagggcccccagtatggcaccgtggagaaggcctggatggccttcatgtctgaggccgagcgggtgtctgagctgcacctggaggtgaaggccagcctgatgaatgatgactttgagaagatcaagaactggcagaaggaggccttccacaagcagatgatgggcggcttcaaggagaccaaggaggctgaagatggcttcaggaaggcccagaagccctgggccaagaagctgaaggaggtggaggccgccaagaaggcccaccacgccgcctgcaaggaggagaagctggccatcagccgggaggccaacagcaaggctgaccccagcctgaaccctgagcagctgaagaagctgcaggacaagattgagaagtgcaagcaggatgtgctgaagaccaaggagaagtatgagaagagcctgaaggagctggaccagggcaccccccagtacatggagaacatggagcaggtgtttgagcagtgccagcagtttgaggagaagaggctgcgcttcttccgggaggtgctgctggaggtgcagaagcacctggacctgagcaatgtggccggctacaaggccatctaccatgacctggagcagagcatccgggctgctgatgctgtggaggacctgcgctggttccgggccaaccacggccctggcatggccatgaactggccccagtttgaggagtggagcgctgacctgaacagaaccctgagccggcgggagaagaagaaggccacagatggagtgaccctgaccggcatcaaccagacaggagaccagagcctgcccagcaagcccagctctgtgagcagctatgagaagacccagagctaccccacagactggagcgatgatgagagcaacaaccccttcagcagcacagatgccaacggggacagcaacccctttgatgatgatgccaccagcggcacagaggtgcgggtgcgggccctgtatgactatgagggccaggagcatgatgagctgtccttcaaggctggagatgagctgaccaagatggaggatgaagatgagcagggctggtgcaagggccgcctggacaatggccaggtgggcctgtacccagccaactacgtggaggccatccagtag

SEQ ID NO: 19216 - DNA, 1248 bp, synthetic construct
  source 1..1248: mol_type = other DNA; note = Synthetic coding sequence
atgatgctgggccctgagggcggggagggctttgtggtgaagctgcggggcctgccctggagctgcagcgtggaggatgtgcagaacttcctgagtgactgcaccatccatgatggagctgctggggtgcacttcatctacacccgggagggccggcagagcggggaggcctttgtggagctgggctctgaagatgatgtgaagatggccctgaagaaggaccgggagagcatgggccaccgctacatcgaggtgttcaagagccacaggacagagatggactgggtgctgaagcacagcggccccaacagcgctgacagcgccaatgatggctttgtgcggctgcggggcctgcccttcggctgcaccaaggaggagatcgtgcagttcttcagcggcctggagatcgtgcccaacggcatcaccctgcctgtggaccctgagggcaagatcaccggggaggcctttgtgcagtttgccagccaggagctggccgagaaggccctgggcaagcacaaggagcgcatcggccaccgctacatcgaggtgttcaagagcagccaggaggaggtgcgcagctacagcgacccccccctgaagttcatgtctgtgcagaggcctggcccctatgacaggcctggaacagcccggcgctacatcggcatcgtgaagcaggccggcctggagaggatgaggcctggggcctacagcacaggctacggcggctatgaggagtacagcggcctgagtgatggctacggcttcaccacagacctgtttggccgggacctgagctactgcctgagcggcatgtatgaccaccgctacggggacagcgagttcaccgtgcagagcaccaccggccactgtgtgcacatgaggggcctgccctacaaggccacagaaaatgacatctacaacttcttcagccccctgaaccctgtgcgggtgcacattgaaattggaccagatggccgggtgactggagaggctgatgtggagtttgccacccatgaggaggccgtggccgccatgagcaaggaccgggccaacatgcagcaccgctacatcgagctgttcctgaacagcaccactggagccagcaatggagcctacagcagccaggtgatgcagggcatgggcgtgtctgctgcccaggccacctacagcggcctggagagccagagcgtgtctggctgctatggagctggctacagcggccagaacagcatgggcggctatgactag

SEQ ID NO: 19217 - DNA, 1770 bp, synthetic construct
  source 1..1770: mol_type = other DNA; note = Synthetic coding sequence
atgtctgtgtctgtgcatgagaccaggaagagccgcagcagcacaggctccatgaatgtgaccctcttccacaaggccagccacccagactgtgtgctggcccacctgaacaccctgaggaagcactgcatgttcacagatgtgaccctgtgggccggggaccgggccttcccctgccacagagctgtgctggccgccagcagccgctactttgaggccatgttcagccacggcctgcgggagagcagagatgacacagtgaacttccaggacaacctgcaccctgaggtgctggagctgctgctggactttgcctacagcagccgcatcgccatcaatgaagaaaatgctgagagcctgctggaggccggggacatgctgcagttccatgatgtgagagatgctgctgctgagttcctggagaagaacctcttccccagcaactgcctgggcatgatgctgctgagtgatgcccaccagtgccggcggctgtatgagttctcctggaggatgtgcctggtgcactttgagaccgtgcggcagagcgaggacttcaacagcctgagcaaggacaccctgctggacctgatcagcagtgatgagctggagacagaagatgagcgggtggtgtttgaggccatcctgcagtgggtgaagcatgacctggagcccaggaaggtgcacctgcctgagctgctgcggtctgtgcggctggccctgctgcccagcgactgcctgcaggaggccgtgagcagcgaggccctgctgatggctgatgagaggaccaagctgatcatggatgaggccctgcgctgcaagacccgcatcctgcagaatgatggagtggtgaccagcccctgtgcccggcccaggaaggccggccacaccctgctgatcctgggcggccagaccttcatgtgtgacaagatctaccaggtggaccacaaggccaaggagatcatccccaaggctgacctgcccagccccaggaaggagttcagcgccagcgccatcggctgcaaggtgtatgtgactggaggccggggctctgaaaatggagtgtccaaggatgtgtgggtgtatgacacagtgcatgaggagtggagcaaggccgcccccatgctgattgccaggtttggacatggcagcgctgagctggagaactgcctgtatgtggtgggcggccacaccagcctggccggggtcttccctgccagccccagcgtgtccctgaagcaggtggagaagtatgaccccggggccaacaagtggatgatggtggcccccctgagagatggagtgtccaatgctgctgtggtgtctgccaagctgaagctgtttgtgtttggaggcaccagcatccaccgggacatggtgtccaaggtgcagtgctatgaccccagtgaaaatcgctggaccatcaaggcagaatgtccccagccctggagatacacagctgctgctgtgctgggcagccagatcttcatcatgggcggggacacagagttcaccgctgccagcgcctacagatttgactgtgagaccaaccagtggaccagaattggagacatgacagccaagaggatgagctgccacgccctggccagcggcaacaagctgtatgtggtgggcggctacttcggcacccagcgctgcaagaccctggactgctatgaccccaccagtgacacctggaactgcatcaccaccgtgccctacagcctcatccccacagcctttgtgtccacctggaagcacctgcctgcctag

SEQ ID NO: 19218 - DNA, 1311 bp, synthetic construct
  source 1..1311: mol_type = other DNA; note = Synthetic coding sequence
atgatgggagaggccgctgtggccgccggcccctgccccctgcgggaggacagcttcacccgcttcagcagccagagcaatgtgtatggcctggccggcggggccggcggccgcggggagctgctggccgccaccctgaagggcaaggtgctgggcttccgctaccaggacctgcggcagaagatccggcctgtggccaaggagctgcagttcaactacatccctgtggatgctgagatcgtgtccattgacaccttcaacaagagcccccccaagaggggcctggtggtgggcatcaccttcatcaaggacagcggggacaagggcagccccttcctgaacatctactgtgactatgagcccggcagcgagtacaacctggacagcatcgcccagagctgcctgaacctggagctgcagttcacccccttccagctgtgccacgccgaggtgcaggtgggggaccagctggagaccgtcttcctgctgtctggaaatgaccctgccatccacctgtacaaggaaaatgaaggcctgcaccagtttgaggagcagcctgtggagaacctcttccctgagctgaccaacctgaccagctctgtgctgtggctggatgtgcacaacttccctggcaccagccggcggctgagcgccctgggctgccagagcggctacgtgcgggtggcccacgtggaccagaggagccgggaggtgctgcagatgtggagcgtgctgcaggacggccccatcagcagggtcatcgtgttcagcctgtctgctgccaaggagaccaaggaccggcccctgcaggatgagtacagcgtgctggtggcctccatgctggagcctgctgtggtgtacagagacctgctgaacagaggcctggaggaccagctgctgctgcccggcagtgaccagtttgattctgtgctgtgcagcctggtgacagatgtggacctggatggccggcctgaggtgctggtggccacctacggccaggagctgctgtgctacaagtaccggggccctgagagcggcctgcctgaggcccagcacggcttccacctgctgtggcagaggagcttcagcagccccctgctggccatggcccacgtggacctgactggagatggcctgcaggagctggccgtggtgtccctgaagggcgtgcacatcctgcagcacagcctcatccaggccagcgagctggtgctgacccggctgcggcaccaggtggagcagaggagaagaaggctgcagggcctggaggatggagctggggccggccctgcagaaaatgctgccagctag

SEQ ID NO: 19219 - DNA, 642 bp, synthetic construct
  source 1..642: mol_type = other DNA; note = Synthetic coding sequence
atgctgctgcccttcatccgcaccctgcccctgctgtgctacaaccacctgctggtgtccccagattctgccaccctgagccccccctacagcctggagaagatgacagacctggtggccgtgtgggatgtggccctgagtgatggagtgcacaagattgaatttgaacatggcaccaccagcggcaagagggtggtgtatgtggatggcaaggaggagatcaggaaggagtggatgttcaagctggtgggcaaggagaccttctacgtgggcgccgccaagaccaaggccaccatcaacattgatgccatcagcggctttgcctatgagtacaccctggagatcaacgggaagagcctgaagaagtacatggaggacaggagcaagaccaccaacacctgggtgctgcacatggatggagagaacttcagaattgtgctggagaaggatgccatggatgtgtggtgcaatggcaagaagctggagacagctggggagtttgtggatgatggaacagagacccacttcagcatcggcaaccacgactgctacatcaaggctgtgagcagcggcaagaggaaggagggcatcatccacaccctcatcgtggacaaccgggagatccctgagatcgccagctag

SEQ ID NO: 19220 - DNA, 663 bp, synthetic construct
  source 1..663: mol_type = other DNA; note = Synthetic coding sequence
atgaccagcggggaggtgaagaccagcctgaagaatgcctacagcagcgccaagaggctgagccccaagatggaggaggagggggaggaggaggactactgcacccctggggcctttgagctggagcggctcttctggaagggcagcccccagtacacccacgtgaatgaggtgtggcccaagctgtacatcggagatgaggccacagccctggaccgctaccgcctgcagaaggccggcttcacccacgtgctgaatgctgcccacggccgctggaatgtggacaccggccctgactactacagagacatggacatccagtaccatggagtggaggctgatgacctgcccacctttgacctgagcgtcttcttctacccagctgctgccttcatcgaccgggccctgagtgatgaccacagcaagatcctggtgcactgtgtgatgggccgcagccgcagcgccaccctggtgctggcctacctgatgatccacaaggacatgaccctggtggatgccatccagcaggtggccaagaacagatgtgtgctgcccaacagaggcttcctgaagcagctgcgggagctggacaagcagctggtgcagcagaggagaagaagccagaggcaggatggagaggaggaggatggccgggagctgtag

SEQ ID NO: 19221 - DNA, 1845 bp, synthetic construct
  source 1..1845: mol_type = other DNA; note = Synthetic coding sequence
atgagccctgctgaccgctgccgcagcgccaacaccattgaaccagccaccaccagcagcctggccctcttcctgctgctgcagagggaccagagcagcaggacccggggcctgcctgaggagaaggaggaggtgaccatggacaccagtgaaaatagaccagaaaatgatgtgcctgagccccccatgcccatcgctgaccaggtgtccaatgatgacaggcctgagggctctgtggaggatgaggagaagaaggagagcagcctgcccaagagcttcaagaggaagatctctgtggtgtctgccaccaagggcgtgcctgctggcaacagcgacacagaaggaggccagcccggcaggaagaggcgctggggcgccagcacagccaccacccagaagaagcccagcatcagcatcaccacagagagcctgaagagcctcatcccagacatcaagcccctggccggccaggaggccgtggtggacctgcatgctgatgacagccgcatcagtgaagatgaaacagaaagaaatggagatgatggcacccatgacaagggcctgaagatctgcaggacagtgacccaggtggtgcctgctgagggccaggagaatggccagcgggaggaggaggaggaggagaaggagcctgaggccgagccccctgtgcccccccaggtgtctgtggaggtggccctgcccccacctgctgagcacgaggtgaagaaggtgaccctgggggacaccctgacccggcgcagcatcagccagcagaagagcggcgtgtccatcaccattgatgatcctgtgaggacagcccaggtgcccagccccccccggggcaagatcagcaacatcgtgcacatcagcaacctggtgcggcccttcaccctgggccagctgaaggagctgctgggccgcacaggcaccctggtggaggaggccttctggattgacaagatcaagagccactgctttgtgacctacagcacagtggaggaggccgtggccaccaggacagccctgcatggagtgaagtggccccagagcaaccccaagttcctgtgtgccgactatgcagagcaggatgagctggactaccaccggggcctgctggtggaccggcccagcgagaccaagacagaggagcagggcatcccccggcccctgcaccccccacctcctcctcctgtgcagcccccccagcaccccagggctgagcagcgggagcaggagagagctgtgcgggagcagtgggccgagcgggagcgggagatggagcggcgggagaggaccaggtctgagcgggagtgggaccgggacaaggtgcgggagggccccaggagccgcagccgcagccgggacagaagaaggaaggagcgggccaagagcaaggagaagaagtctgagaagaaggagaaggcccaggaggagcccccagccaagctgctggatgacctcttcaggaagaccaaggccgccccctgcatctactggctgcccctgacagacagccagatcgtgcagaaggaggccgagagagctgagcgggccaaggagcgggagaagaggaggaaggagcaggaggaggaggagcagaaggagcgggagaaggaggccgagcgggagaggaaccggcagctggagcgggagaagagaagagagcacagccgggagcgggaccgggagcgggagcgggagcgggagcgggacagaggagaccgggaccgggaccgggagcgggaccgggagcggggccgggagcgggacagaagagacaccaagaggcacagccgcagccgcagccgcagcacccctgtgcgggacagaggaggaagaagatag

SEQ ID NO: 19222 - DNA, 1203 bp, synthetic construct
  source 1..1203: mol_type = other DNA; note = Synthetic coding sequence
atgaagaatgagcccctgaccccaggctaccacggcttccctgcccgggacagccagggcaaccaggagcccaccaccaccccagatgccatggtgcagcccttcaccaccatccccttccccccaccaccccagaatggcatccccacagaatatggagtgccccacacccaggactatgccggccagacaggagagcacaacctgaccctgtatggcagcacccaggcccacggggagcagagcagcaacagccccagcacccagaatggcagcctgaccacagaaggaggagcccagacagatggccagcagagccagacccagagcagcgagaacagcgagagcaagagcacccccaagaggctgcacgtgagcaacatccccttccgcttccgggaccctgacctgcggcagatgtttggccagtttgggaagatcctggatgtggagatcatcttcaatgaaagaggcagcaagggcttcggctttgtgacctttgagaacagcgcagatgctgaccgggcccgggagaagctgcatggaacagtggtggagggcaggaagattgaggtgaacaatgccacagcccgggtgatgaccaacaagaagatggtgaccccctatgccaacggctggaagctgagccctgtggtgggcgctgtgtatggccctgagctgtatgctgccagcagcttccaggctgatgtgtccctgggcaatgatgctgctgtgcccctgagcggccggggcggcatcaacacctacatccccctcatcatccctggcttcccctaccccacagctgccaccacagctgctgccttccggggggcccacctgcggggccggggccgcacagtgtatggagctgtgcgggctgtgcccccaacagccatcccagcctacccaggagtggtgtaccaggacggcttctatggagctgacctgtacattgaaagtgccaactgcttccgcagcaacagagtggacatgcagcccacagacatgcacagcctgctgctgcagccccagccccccctgctgcagcccctgcagcccctgactgtgacagtgatggccggctgcacccagcccacccccaccatgcccctgcccctgcccctggccatggagctggccctgtggagggtgtacacagaggtggccacagctgacctgcccccaacagaggtgacctag

SEQ ID NO: 19223 - DNA, 1545 bp, synthetic construct
  source 1..1545: mol_type = other DNA; note = Synthetic coding sequence
atggatgagggcatggagatcagcagcgagggcaacagcctcatcaaggctgtgcaccagagccggctgcggctgacccggctgctgctggagggcggggcctacatcaatgaaagcaatgacagaggagagacccccctgatgattgcctgcaagaccaagcacgtggaccaccagagcgtgtccaaggccaagatggtgaagtacctgctggagaacaatgctgaccccaacatccaggacaagagcggcaagacagccctgatgcacgcctgcctggagaaggccggccctgaggtggtgtccctgctgctgaagtctggagctgacctgagcctgcaggaccacagcagctacagcgccctggtgtatgccatcaacagcgaggacacagagaccctgaaggtgctgctgagcgcctgcaaggccaagggcaaggaggtgatcatcatcaccacagccaagctgccctgtgggaagcacaccaccaagcagtacctgaacatgcctcctgtggacattgatggctgccacagccctgccacctgcaccaccccatctgaaattgacatcaagacagccagcagccccctgagccacagcagcgagacagagctgaccctgtttggcttcaaggacctggagctggccggcagcaatgatgacacctgggaccccggcagccctgtgaggaagccagccctggcccccaagggccccaagctgccccacgccccaccctgggtgaagagcccccccctgctgatgcaccagaacagagtggccagcctgcaggaggagctgcaggacatcaccccagaggaggagctgagctacaagaccaacggcctggccctgagcaagcgcttcatcaccaggcaccagagcattgatgtgaaggacacagcccacctgctgcgggcctttgaccaggccagcagcaggaagatgtcctatgatgagatcaactgccagagctacctgtctgagggcaaccagcagtgcatcgaggtgcctgtggaccaggaccctgacagcaaccagaccatctttgccagcaccctgcggagcatcgtgcagaagaggaacctgggcgccaaccactacagcagtgacagccagctgtctgctggcctgaccccacccaccagtgaagatggcaaggccctgattggcaagaagaagatcctgagccccagccccagccagctgtctgagagcaaggagctgctggagaacatccccccaggccccctgagcagaagaaaccacgctgtgctggagcggcggggcagcggggccttccccctggaccacagcgtgacccagacccggcagggcttcctgccccccctgaatgtgaacagccacccccccatcagtgacatcaacgtgaacaacaagatctgcagcctgctgagctgtggccagaaggtgctgatgcccaccgtgcccatcttccccaaggagttcaagagcaagaagatgctgctgcggcggcagagcctgcagacagagcagatcaagcagctggtgaacttctag

SEQ ID NO: 19224 - DNA, 1674 bp, synthetic construct
  source 1..1674: mol_type = other DNA; note = Synthetic coding sequence
atggaccagagccgggtgctgctgtgggtgaaggccgagcccttcatcgtgggcgccctgcaggtgcccccacccagcaagttcagcctgcactacctgaggaagatcagcacctacgtgcagatccgggccacagaaggagcctacccccggctgtactggagcacctggaggcacatcgcctgtgggaagctgcagctggccaaggacctggcctggctgtactttgagatctttgacagcctgtccatgaagaccccagaggagcggctggagtggagcgaggtgctgagcaactgcatgtctgaggaggaggtggagaagcagaggaaccagctgtctgtggacaccctgcagttcctgctcttcctgtacatccagcagctgaacaaggtgtccctgcggaccagcctgattggagaggagtggcccagccccaggaacaagagccagagcccagacctgacagagaagagcaactgccacaacaagaactggaatgactacagccaccaggcctttgtgtatgaccacctgagtgacctgctggagctgctgctggaccccaagcagctgacagccagcttccacagcacccacagcagcctggtgtcccgggaggccgtggtggccctgtccttcctgattgagggcaccatcagccgggccaggaagatctaccccctgcacgagctggccctgtggcagcccctgcacgccgacagcggcttcagcaagatcagcaagaccttctccttctacaagctggagacctggctgcggagctgcctgactggaaaccccttcggcaccagcgcctgcctgaagagcggcaagaagctggcctgggcccaccaggtggagggcaccaccaagagggccaagatcgcctgcaacacccacgtggcccccaggatgcaccggctggtggtgatgagccaggtgtacaagcagaccctggccaagagcagtgacaccctggccggggcccacgtgaagatccaccgctgcaatgaaagcttcatctacctgctgagccccctgcggtctgtgaccattgaaaaatgtagaaattccatctttgtgctgggccctgtgggcaccaccctgcacctgcacagctgtgacaacgtgaaggtgattgctgtgtgccaccggctgagcatcagcagcaccaccggctgcatcttccacgtgctgacccccacccggcccctcatcctgagcggcaaccagacagtgacctttgcccccttccacacccactaccccatgctggaggaccacatggccaggacaggcctggccaccgtgcccaactactgggacaaccccatggtggtgtgcagagaaaattctgacaccagggtcttccagctgctgcccccctgtgagttctacgtgttcatcatcccctttgagatggagggggacaccacagagatccctgggggcctgcccagcgtgtaccagaaggccctgggccagcgggagcagaagatccagatctggcagaagacagtgaaggaggcccacctgaccaaggaccagaggaagcagttccaggtgctggtggagaacaagttctatgagtggctgatcaacacaggccaccggcagcagctggacagcctggtgcccccagctgctggcagcaagcaggccgccggctag

SEQ ID NO: 19225 - DNA, 648 bp, synthetic construct
  source 1..648: mol_type = other DNA; note = Synthetic coding sequence
atggtgttccgccgctttgtggaggtgggccgggtggcctacgtgtcctttggcccccatgctgggaagctggtggccatcgtggatgtgattgaccagaacagagccctggtggatggcccctgcacccaggtgcggcggcaggccatgcccttcaagtgcatgcagctgacagacttcatcctgaagttcccccacagcgcccaccagaagtatgtgcggcaggcctggcagaaggctgacatcaacaccaagtgggccgccacccgctgggccaagaagattgaggcccgggagaggaaggccaagatgacagactttgaccgcttcaaggtgatgaaggccaagaagatgaggaaccgcatcatcaagaatgaggtgaagaagctgcagaaggccgccctgctgaaggccagccccaagaaggcccctggcaccaagggcacagctgctgctgctgctgctgctgctgctgccaaggtgcctgccaagaagatcacagctgccagcaagaaggccccagcccagaaggtgcctgcccagaaggccaccggccagaaggccgccccagcccccaaggcccagaagggccagaaggccccagcccagaaggccccagcccccaaggccagcggcaagaaggcctag

SEQ ID NO: 19226 - DNA, 888 bp, synthetic construct
  source 1..888: mol_type = other DNA; note = Synthetic coding sequence
atggagctgatccaggacaccagccggccccccctggagtatgtgaagggcgtgcccctcatcaagtactttgctgaggccctgggccccctgcagagcttccaggcccggccagatgacctgctgatcaacacctaccccaagagcggcaccacctgggtgtcccagatcctggacatgatctaccagggcggggacctggagaagtgcaacagagcccccatctacgtgcgggtgcccttcctggaggtgaatgaccctggagagcccagcggcctggagaccctgaaggacaccccaccacccaggctcatcaagagccacctgcccctggccctgctgccccagaccctgctggaccagaaggtgaaggtggtgtatgtggccaggaaccccaaggatgtggccgtgtcctactaccacttccacaggatggagaaggcccaccctgagcccggcacctgggacagcttcctggagaagttcatggccggggaggtgtcctatggctcctggtaccagcacgtgcaggagtggtgggagctgagcaggacccaccctgtgctgtacctgttctatgaggacatgaaggagaaccccaagcgggagatccagaagatcctggagtttgtgggccgcagcctgcctgaggagaccatggacttcatggtgcagcacaccagcttcaaggagatgaagaagaaccccatgaccaactacaccaccgtgccccaggagctgatggaccacagcatcagccccttcatgaggaagggcatggccggggactggaagaccaccttcaccgtggcccagaatgaaagatttgatgctgactatgcagagaagatggccggctgcagcctgtccttccgctctgagctgtag

SEQ ID NO: 19227 - DNA, 1368 bp, synthetic construct
  source 1..1368: mol_type = other DNA; note = Synthetic coding sequence
atgagcagcctgggcgccagctttgtgcagatcaagtttgatgacctgcagttctttgagaactgtggcggcggcagctttggatctgtgtaccgggccaagtggatcagccaggacaaggaggtggccgtgaagaagctgctgaagattgagaaggaggccgagatcctgtctgtgctgagccacaggaacatcatccagttctatggagtcatcctggagccccccaactacggcatcgtgacagaatatgccagcctgggcagcctgtatgactacatcaacagcaacagaagtgaggagatggacatggaccacatcatgacctgggccacagatgtggccaagggcatgcactacctgcacatggaggcccctgtgaaggtgatccaccgggacctgaagagcagaaatgtggtgattgctgctgatggagtgctgaagatctgtgactttggagccagccgcttccacaaccacaccacccacatgagcctggtgggcaccttcccctggatggcccctgaggtgatccagagcctgcctgtgtctgagacctgtgacacctacagctatggagtggtgctgtgggagatgctgacccgggaggtgcccttcaagggcctggagggcctgcaggtggcctggctggtggtggagaagaatgaaaggctgaccatccccagcagctgccccaggagctttgctgagctgctgcaccagtgctgggaggctgatgccaagaagaggcccagcttcaagcagatcatcagcatcctggagagcatgagcaatgacaccagcctgcctgacaagtgcaacagcttcctgcacaacaaggccgagtggaggtgtgaaattgaggccaccctggagcggctgaagaagctggagcgggacctgtccttcaaggagcaggagctgaaggagcgggagcggcggctgaagatgtgggagcagaagctgacagagcagagcaacacccccctgctgctgcccctggccgccaggatgtctgaggagagctactttgagagcaagacagaggagagcaacagcgctgagatgagctgccagatcacagccaccagcaatggagagggccacggcatgaaccccagcctgcaggccatgatgctgatgggctttggagacatcttctccatgaacaaggccggggctgtgatgcacagcggcatgcagatcaacatgcaggccaagcagaacagcagcaagaccaccagcaagagaagaggcaagaaggtgaacatggccctgggcttcagtgactttgacctgtctgaaggagatgatgatgatgatgatgatggagaggaggaggacaatgacatggacaacagcgagtag

SEQ ID NO: 19228 - DNA, 423 bp, synthetic construct
  source 1..423: mol_type = other DNA; note = Synthetic coding sequence
atgaggttccgcttctgtggggacctggactgcccagactgggtgctggccgagatcagcaccctggccaagatgagctctgtgaagctgcggctgctgtgcagccaggtgctgaaggagctgctgggccagggcatcgactatgagaagatcctgaagctgacagcagatgccaagtttgagagcggagatgtgaaggccaccgtggccgtgctgtccttcatcctgagcagcgctgccaagcacagcgtggatggagagagcctgagcagcgagctgcagcagctgggcctgcccaaggagcacgccgccagcctgtgccgctgctatgaggagaagcagagccccctgcagaagcacctgcgggtgtgcagcctgaggaagctgaagcaggcccagaccctgatgagcagcctgggctag

SEQ ID NO: 19229 - DNA, 573 bp, synthetic construct
  source 1..573: mol_type = other DNA; note = Synthetic coding sequence
atgacagccagcgccagcagcttcagcagcagccagggcgtgcagcagcccagcatctacagcttcagccagatcaccaggagcctcttcctgagcaatggagtggccgccaatgacaagctgctgctgagcagcaaccgcatcacagccatcgtgaatgcctctgtggaggtggtgaatgtgttctttgagggcatccagtacatcaaggtgcctgtgacagatgcccgggacagccggctgtatgacttctttgaccccatcgctgacctgatccacaccatcgacatgaggcagggccgcaccctgctgcactgcatggccggcgtgagccgcagcgccagcctgtgcctggcctacctgatgaagtaccacagcatgagcctgctggatgcccacacctggaccaagagcagaagacccatcatccggcccaacaacggcttctgggagcagctgatcaactatgagttcaagctgttcaacaacaacacagtgaggatgatcaacagccctgtgggcaacatcccagacatctatgagaaggacctgaggatgatgatctccatgtag

SEQ ID NO: 19230 - DNA, 3576 bp, synthetic construct
  source 1..3576: mol_type = other DNA; note = Synthetic coding sequence
atgctgaggaagctgaccatcgagcagatcaatgactggttcaccatcggcaagacagtgaccaacgtggagctgctgggcgcccccccagccttccctgctggggccgcccgggaggaggtgcagaggcaggatgtggcccctggggccggccctgctgcccaggccccagccctggcccaggccccagcccggcctgctgctgcctttgagaggagcctgagccagaggagcagcgaggtggagtacatcaacaagtaccggcagctggaggcccaggagctggatgtgtgccgctctgtgcagcccaccagcggccctggcccccggcccagcctggccaagctgagctctgtgacctgcatccctggcaccacctacaagtacccagacctgcccatcagccgctacaaggaggaggtggtgtccctgattgagagcaacagcgtggtgatcatccacggggccactggaagtggcaagagcacccagctgccccagtacatcctggaccactacgtgcagaggtctgcctactgcagcatcgtggtgacccagcccaggaagatcggggccagcagcatcgcccgctggatcagcaaggagcgggcctggaccctgggcggcgtggtgggctaccaggtgggcctggagaagatcgccacagaggacaccaggctcatctacatgaccaccggggtgctgctgcagaagatcgtgtctgccaagagcctgatggagttcacccacatcatcattgatgaggtgcatgagaggacagaggagatggacttcctgctgctggtggtgaggaagctgctgcggaccaacagcagatttgtgaaggtggtgctgatgtctgccaccatcagctgcaaggagtttgctgactactttgctgtgcctgtgcagaacaagatgaacccagcctacatctttgaggtggagggcaagccccacagcgtggaggagtactacctgaatgacctggagcacatccaccacagcaagctgagcccccacctgctggaggagcccgtcatcaccaaggacatctatgaggtggccgtgtccctcatccagatgtttgatgacctggacatgaaggagagcggcaacaaggcctggagcggggcccagtttgtgctggagaggagctctgtgctggtgttcctgcccggcctgggggagatcaactacatgcatgagctgctgaccagcctggtgcacaagaggctgcaggtgtaccccctgcacagctctgtggccctggaggagcagaacaacgtgttcctgagccctgtgcccggctacaggaagatcatcctgagcaccaacattgctgagagctctgtgacagtgcctgatgtgaagtatgtgattgacttctgcctgaccaggaccctggtgtgtgatgaggacaccaactaccagagcctgcggctgtcctgggccagcaagaccagctgcaaccagaggaagggccgggccggccgggtgtcccggggctactgctaccgcctggtgcacaaggacttctgggacaacagcatcccagaccacgtggtgcctgagatgctgcgctgccccctgggcagcaccatcctgaaggtgaagctgctggacatgggagagccccgggccctgctggccacagccctgagccccccaggcctgagtgacatcgagaggaccatcctgctgctgaaggaggtgggcgccctggccgtgtctggccagcgggaggatgagaacccccatgatggagagctgaccttcctgggccgggtgctggcccagctgcctgtgaaccagcagctgggcaagctgattgtgctgggccacgtgtttggctgcctggatgagtgcctgatcatcgccgccgccctgagcctgaagaacttctttgccatgcccttccggcagcacctggatggctacagaaacaaggtgaacttcagcggcagcagcaagagtgactgcatcgccctggtggaggccttcaagacctggaaggcctgccggcagacaggagagctgcgctaccccaaggatgagctgaactggggccgcctgaactacatccagatcaagaggatccgggaggtggccgagctgtatgaggagctgaagacccgcatcagccagttcaacatgcacgtggacagccggcggcctgtgatggaccaggagtacatctacaagcagcgcttcatcctgcaggtggtgctggccggggccttctaccccaactacttcaccttcggccagccagatgaggagatggctgtgcgggagctggccggcaaggaccccaagaccaccgtggtgctgaagcacatccccccctacggcttcctgtactacaagcagctgcagagcctcttccggcagtgtggccaggtgaagagcatcgtgtttgatggagccaaggcctttgtggagttcagcaggaaccccacagagcgcttcaagaccctgcctgctgtgtacatggccatcaagatgagccagctgaaggtgtccctggagctgtctgtgcacagcgctgaggagattgagggcaaggtgcagggcatgaatgtgtccaagctgaggaacaccagggtgaatgtggacttccagaagcagacagtggaccccatgcaggtgtccttcaacaccagtgacaggagccagacagtgacagacctgctgctgaccattgatgtgacagaggtggtggaggtgggccacttctggggctacagaattgatgagaacaacagcgagatcctgaagaagctgacagctgagatcaaccagctgaccctggtgcccctgcccacccacccccacccagacctggtgtgcctggccccctttgctgactttgacaagcagcgctacttccgggcccaggtgctgtatgtgtctggcaacagcgctgaggtgttctttgtggactatggcaacaagagccacgtggacctgcacctgctgatggagatcccctgccagttcctggagctgcccttccaggccctggagttcaagatctgcaagatgaggccttctgccaagagcctggtgtgtgggaagcactggagcgatggagccagccagtggtttgccagcctggtgtctggctgcaccctgctggtgaaggtgttttctgtggtgcacagcgtgctgcacgtggatgtgtaccagtacagcggcgtgcaggatgccatcaacatcagagatgtgctgatccagcagggctacgccgagctgacagaggagagctatgagagcaaggtgaacatcctgcgggccgccatcaacaagctggtgtgtgatggccccaacggctgcaagtgcctgggccctgagcgggtggcccagctgcaggacatcgcccggcagaagctgctgggcctcttctgccagagcaagccccgggagaagatcgtgcccaagtggcatgagaagccctatgagtggaaccaggtggaccccaagctggtgatggagcaggccgaccgggagagcagccggggcaagaacaccttcctgtaccagctgcacaagctggtggtgctgggcacctag

SEQ ID NO: 19231 - DNA, 906 bp, synthetic construct
  source 1..906: mol_type = other DNA; note = Synthetic coding sequence
atgaccaggcatggcaagaactgcacagctggagctgtgtacacctaccacgagaagaagaaggacacagctgccagcggctacggcacccagaacatccggctgagcagagatgctgtgaaggactttgactgctgctgcctgagcctgcagccctgccacgaccctgtggtgaccccagatggctacctgtatgagcgggaggccatcctggagtacatcctgcaccagaagaaggagatcgcccggcagatgaaggcctatgagaagcagaggggcacccggcgggaggagcagaaggagctgcagagagctgccagccaggaccacgtgcggggcttcctggagaaggagagcgccatcgtgtcccggcccctgaaccccttcaccgccaaggccctgagcggcaccagcccagatgatgtgcagcccggccccagcgtgggcccccccagcaaggacaaggacaaggtgctgcccagcttctggatccccagcctgaccccagaggccaaggccaccaagctggagaagcccagcaggacagtgacctgccccatgtctgggaagcccctgaggatgtctgacctgacccctgtgcacttcacccccctggacagctctgtggacagagtgggcctcatcaccaggagtgaaagatatgtgtgtgctgtgacccgggacagcctgagcaatgccaccccctgtgctgtgctgcggcccagcggggctgtggtgaccctggagtgtgtggagaagctgatcaggaaggacatggtggaccctgtgactggagacaagctgacagaccgggacatcatcgtgctgcagagaggaggcactggatttgctggcagcggcgtgaagctgcaggccgagaagagcaggcctgtgatgcaggcctag

SEQ ID NO: 19232 - DNA, 1509 bp, synthetic construct
  source 1..1509: mol_type = other DNA; note = Synthetic coding sequence
atgcagagctgtgagagcagcggggacagcgcagatgaccccctgagccggggcctgcggcggcggggccagccccgggtggtggtgattggagctggcctggccggcctggccgccgccaaggccctgctggagcagggcttcacagatgtgacagtgctggaggccagcagccacatcggcggccgggtgcagagcgtgaagctgggccacgccacctttgagctgggcgccacctggatccacggcagccacggcaaccccatctaccacctggccgaggccaacggcctgctggaggagaccacagatggagagaggtctgtgggccgcatcagcctgtacagcaagaatggagtggcctgctacctgaccaaccacggccgccgcatccccaaggatgtggtggaggagttcagtgacctgtacaatgaggtgtacaacctgacccaggagttcttcagacatgacaagcctgtgaatgctgagagccagaacagcgtgggcgtcttcacccgggaggaggtgaggaaccgcatcagaaatgaccctgatgatcctgaggccaccaagaggctgaagctggccatgatccagcagtacctgaaggtggagagctgtgagagcagcagccacagcatggatgaggtgtccctgagcgccttcggggagtggacagagatccctggggcccaccacatcatccccagcggcttcatgagggtggtggagctgctggccgagggcatcccagcccacgtgatccagctgggcaagcctgtgcgctgcatccactgggaccaggccagcgcccggccccggggccctgagattgagccccggggcgtgctgaagaggcagtacaccagcttcttccggcccggcctgcccacagagaaggtggccgccatccaccggctgggcatcggcaccacagacaagatcttcctggagtttgaggagcccttctggggccctgagtgcaacagcctgcagtttgtgtgggaggatgaagctgagagccacaccctgacctacccacctgagctgtggtacaggaagatctgtggctttgatgtgctgtacccacctgagagatatggccacgtgctgagcggctggatctgtggggaggaggccctggtgatggagaagtgtgatgatgaggccgtggccgagatctgcacagagatgctgcggcagttcaccggcaaccccaacatccccaagccccggcgcatcctgcggagcgcctggggcagcaacccctacttccggggcagctacagctacacccaggtgggcagcagtggagcagatgtggagaagctggccaagcccctgccctacacagagagcagcaagacagcccccatgcaggtgctcttcagcggggaggccacccacaggaagtactacagcaccacccatggagccctgctgagcggccagcgggaggccgcccggctgattgagatgtacagagacctcttccagcagggcacctag

SEQ ID NO: 19233 - DNA, 579 bp, synthetic construct
  source 1..579: mol_type = other DNA; note = Synthetic coding sequence
atgggcacctttgacctgtggacagactacctgggcctggcccacctggtgcgggccctgagcggcaaggagggccctgagacccggctgagcccccagcctgagcctgagcccatgctggagcctgtgtctgccctggagcccatgcctgcccctgagagcgtgcctgtgcccggccccaaggaccagaagaggagcctggagagcagccctgcccctgagcggctgtgcagcttctgcaagcacaatggagagagccgggccatctaccagagccacgtgctgaaggatgaagctggccgggtgctgtgccccatcctgcgggactatgtgtgcccccagtgtggggccacccgggagcgggcccacacccggcgcttctgccccctgaccggccagggctacacctctgtgtacagccacaccaccaggaacagcgctgggaagaagctggtgcggccagacaaggccaagacccaggacaccggccacagaagaggaggcggcggcggggccggcttcagaggagctgggaagtctgagcccagccccagctgcagccccagcatgagcacctag

SEQ ID NO: 19234 - DNA, 2568 bp, synthetic construct
  source 1..2568: mol_type = other DNA; note = Synthetic coding sequence
atggctgtggaggacagcaccctgcaggtggtggtgcgggtgcggccccccaccccccgggagctggacagccagaggaggcctgtggtgcaggtggtggatgagcgggtgctggtgttcaaccctgaggagccagatggcggcttccctggcctgaagtggggcggcacccatgatggccccaagaagaagggcaaggacctgacctttgtgtttgacagagtgtttggagaggccgccacccagcaggatgtgttccagcacaccacccacagcgtgctggacagcttcctgcagggctacaactgcagcgtgtttgcctacggggccactggagctgggaagacccacaccatgctgggccgggagggggaccccggcatcatgtacctgaccaccgtggagctgtaccgccgcctggaggcccggcagcaggagaagcactttgaggtgctgatctcctaccaggaggtgtacaatgagcagatccatgacctgctggagcccaagggccccctggccatcagagaagatcctgacaagggcgtggtggtgcagggcctgtccttccaccagcctgccagcgctgagcagctgctggagatcctgacccggggcaacagaaacagaacccagcaccccacagatgccaatgccaccagcagccgcagccacgccatcttccagatctttgtgaagcagcaggacagagtgcccggcctgacccaggccgtgcaggtggccaagatgagcctgattgacctggccggcagcgagcgggccagcagcacccacgccaagggggagcggctgcgggagggcgccaacatcaacagaagcctgctggccctgatcaacgtgctgaatgccctggctgatgccaagggcaggaagacccacgtgccctacagagacagcaagctgacccggctgctgaaggacagcctgggcggcaactgcaggacagtgatgattgctgccatcagccccagcagcctgacctatgaggacacctacaacaccctgaagtatgctgaccgggccaaggagatccggctgagcctgaagagcaatgtgaccagcctggactgccacatcagccagtatgccaccatctgccagcagctgcaggccgaggtggccgccctgaggaagaagctgcaggtgtatgagggcggcggccagcccccaccccaggacctgcccggcagccccaagagcggccccccacctgagcacctgcccagcagccccctgcccccccacccccccagccagccctgcaccccagagctgcctgctggcccccgggccctgcaggaggagagcctgggcatggaggcccaggtggagcgggccatggagggcaacagcagtgaccaggagcagagcccagaagatgaagatgagggccctgctgaggaggtgcccacccagatgcctgagcagaaccccacccacgccctgcctgagagcccccggctgaccctgcagcccaagcctgtggtgggccacttcagcgcccgggagctggatggagacaggagcaagcagctggccctgaaggtgctgtgtgtggcccagaggcagtacagcctgctgcaggccgccaacctgctgaccccagacatgatcacagaatttgagaccctgcagcagctggtgcaggaggagaagattgagcccggggctgaggccctgcggaccagcggcctggcccggggggcccccctggcccaggagctgtgcagcgagagcaagcccccaggctacacaggccctgtgaccaggaccatggcccggcggctgagcggccccctgcacaccctgggcatccccccaggccccaactgcaccccagcccagggcagccgctggcccatggagaagaagagaagaagacccagcgccctggaggccgacagccccatggcccccaagaggggcaccaagaggcagaggcagagcttcctgccctgcctgcggcggggcagcctgcctgacacccagcccagccagggccccagcacccccaagggggagcgggccagcagcccctgccacagcccccgggtgtgcccagccaccgtcatcaagagccgggtgcccctgggccccagcgccatgcagaactgcagcacccccctggccctgcccacccgggacctgaatgccacctttgacctgtctgaggagccccccagcaagcccagcttccatgaatgtattggctgggacaagatcccccaggagctgagccggctggaccagcccttcatcccccgggcccctgtgcccctcttcaccatgaagggccccaagcccaccagcagcctgcccggcaccagcgcctgcaagaagaagagggtggccagcagctctgtgagccacggccgcagccgcatcgcccggctgcccagcagcaccctgaagaggcctgctggccccctggtgctgcctgagctgcccctgagccccctgtgccccagcaacagaagaaatggcaaggacctgatccgggtgggccgggccctgtctgctggaaatggagtgaccaaggtgtcctag

SEQ ID NO: 19235 - DNA, 444 bp, synthetic construct
  source 1..444: mol_type = other DNA; note = Synthetic coding sequence
atgtggaagtttcctgggggcctgtctgagccagaagaagatattggagacacagctgtgcgggaggtgtttgaggagaccggcatcaagtctgagttccgctctgtgctgagcatccggcagcagcacaccaaccctggggccttcggcaagagtgacatgtacatcatctgccgcctgaagccctacagcttcaccatcaacttctgccaggaggagtgcctgcgctgtgagtggatggacctgaatgacctggccaagacagagaacaccacccccatcaccagccgggtggcccggctgctgctgtatggctaccgggagggctttgacaagattgacctgactgtggaggagctgcctgctgtgtacacaggcctcttctacaagctgtaccacaaggagctgcctgagaactacaagaccatgaagggcatcgactag

SEQ ID NO: 19236 - DNA, 3327 bp, synthetic construct
  source 1..3327: mol_type = other DNA; note = Synthetic coding sequence
atggccctgcggcctggagctggcagcggcggcggcggcgctgctggagctggagctggcagcgctgggggcggcggcttcatgtttcctgtggccggcggcatccggcccccccaggccggcctgatgcccatgcagcagcagggcttccccatggtgtctgtgatgcagcccaacatgcagggcatcatgggcatgaactacagcagccagatgagccagggccccatcgccatgcaggccggcatccccatgggccccatgcctgctgctggcatgccctacctgggccaggcccccttcctgggcatgaggcctcctggcccccagtacaccccagacatgcagaagcagtttgctgaggagcagcagaagagatttgagcagcagcagaagctgctggaggaggagaggaagaggcggcagtttgaggagcagaagcagaagctgcggctgctgagctctgtgaagcccaagacaggagagaagagcagagatgatgccctggaggccatcaagggcaacctggatggcttcagcagagatgccaagatgcaccccaccccagccagccaccccaagaagccaggagtgggcgtcttccccagccaggaccctgcccagcccaggatgccaccctggatctacaatgaaagcctggtgcctgatgcctacaagaagatcctggagaccaccatgacccccaccggcatcgacacagccaagctgtaccccatcctgatgagcagcggcctgccccgggagaccctgggccagatctgggccctggccaacagaaccaccccaggcaagctgaccaaggaggagctgtacacagtgctggccatgattgctgtgacccaggtggtgaagccagaggaggatgacttccaggacttccaggatgccagcaagagcggcagcctggatgacagcttcagtgacttccaggagctgcctgccagcagcaagaccagcaacagccagcacggcaacagcgcccccagcctgctgatgcccctgcccggcaccaaggccctgcccagcatggacaagtatgctgtgttcaagggcattgctgctgacaagagcagcgagaacacagtgcccccaggggaccccggggacaagtacagcgccttccgggagctggagcagacagctgagaacaagcccctgggggagagctttgctgagttccgctctgctggaacagatgatggcttcacagacttcaagacagctgacagcgtgagccccctggagccccccaccaaggacaagaccttccccccatccttccccagcggcaccatccagcagaagcagcagacccaggtgaagaaccccctgaacctggccgacctggacatgttcagctctgtgaactgcagcagcgagaagcccctgtccttctctgctgtgttcagcaccagcaagtctgtgtccaccccccagagcacaggcagcgctgccaccatgacagccctggccgccaccaagaccagcagcctggctgatgactttggagagttcagcctgtttggagagtacagcggcctggcccctgtgggggagcaggatgactttgctgacttcatggccttcagcaacagcagcatcagcagcgagcagaagccagatgacaagtatgatgccctgaaggaggaggccagccctgtgcccctgaccagcaatgtgggcagcacagtgaagggcggccagaacagcacagctgccagcaccaagtatgatgtgttccggcagctgagcctggagggcagcggcctgggcgtggaggacctgaaggacaacacccccagcggcaagagtgatgatgactttgctgacttccacagcagcaagttcagcagcatcaacagcgacaagagcctgggggagaaggctgtggccttccgccacaccaaggaggacagcgcctctgtgaagagcctggacctgcccagcattggaggcagctctgtgggcaaggaggacagtgaagatgccctgtctgtgcagtttgacatgaagctggctgatgtgggcggggacctgaagcacgtgatgtctgacagcagcctggacctgcccaccgtgtctggccagcaccccccagctgctgctggcagcggcagccccagcgccaccagcatcctgcagaagaaggagaccagctttggcagcagcgagaacatcaccatgaccagcctgagcaaggtgaccacctttgtgtctgaagatgccctgcctgagaccaccttccctgccctggccagcttcaaggacaccatcccccagaccagcgagcagaaggagtatgaaaatagagactacaaggacttcaccaagcaggacctgcccacagctgagaggagccaggaggccacctgccccagccctgccagcagcggggccagccaggagaccccaaatgaatgttctgatgactttggagagttccagagcgagaagcccaagatcagcaagtttgacttcctggtggccaccagccagagcaagatgaagagcagcgaggagatgatcaagtctgagctggccacctttgacctgtctgtgcagggcagccacaagaggagcctgagcctgggggacaaggagatcagccgcagcagccccagccctgccctggagcagcccttccgggacaggagcaacaccctgaatgagaagccagccctgcccgtcatccgggacaagtacaaggacctgaccggggaggtggaggagaatgaaagatatgcctatgagtggcagcgctgcctgggcagcgccctgaatgtcatcaagaaggccaatgacaccctgaatggcatcagcagcagctctgtgtgcacagaggtgatccagagcgcccagggcatggagtacctgctgggcgtggtggaggtgtacagagtgaccaagagggtggagctgggcatcaaggccacagctgtgtgcagcgagaagctgcagcagctgctgaaggacatcgacaaggtgtggaacaacctgattggcttcatgagcctggccaccctgaccccagatgagaacagcctggacttcagcagctgcatgctgcggcccggcatcaagaatgcccaggagctggcctgtggggtgtgcctgctgaatgtggacagccgcagcaggaaggaggagaagccagctgaggagcaccccaagaaggccttcaacagcgagacagacagcttcaagctggcctacggcggccaccagtaccacgccagctgtgccaacttctggatcaactgtgtggagcccaagcccccaggcctggtgctgcctgacctgctgtag

SEQ ID NO: 19237 - DNA, 1257 bp, synthetic construct
  source 1..1257: mol_type = other DNA; note = Synthetic coding sequence
atggagacccacatcagctgcctcttccctgagctgctggccatgatcttcggctacctggatgtgcgggacaagggccgggccgcccaggtgtgcacagcctggagagatgctgcctaccacaagtctgtgtggaggggcgtggaggccaagctgcacctgcggcgggccaaccccagcctcttccccagcctgcaggcccggggcatcagaagagtgcagatcctgagcctgcggcgcagcctgtcctatgtgatccagggcatggccaacatcgagagcctgaacctgagcggctgctacaacctgacagacaatggcctgggccacgcctttgtgcaggagatcggcagcctgcgggccctgaacctgagcctgtgcaagcagatcacagacagcagcctgggccgcatcgcccagtacctgaagggcctggaggtgctggagctgggcggctgcagcaacatcaccaacacaggcctgctgctgattgcctggggcctgcagaggctgaagagcctgaacctgcggagctgccgccacctgagtgatgtgggcatcggccacctggccggcatgaccaggtctgctgctgagggctgcctgggcctggagcagctgaccctgcaggactgccagaagctgacagacctgagcctgaagcacatcagccggggcctgaccggcctgcggctgctgaacctgtccttctgtggcggcatcagtgatgctggcctgctgcacctgagccacatgggcagcctgcggagcctgaacctgcggagctgtgacaacatcagtgacaccggcatcatgcacctggccatgggcagcctgcggctgagcggcctggatgtgtccttctgtgacaaggtgggggaccagagcctggcctacatcgcccagggcctggatggcctgaagagcctgagcctgtgcagctgccacatcagtgatgatggcatcaacaggatggtgcggcagatgcacggcctgcggaccctgaacatcggccagtgtgtgcgcatcacagacaagggcctggagctgattgctgagcacctgagccagctgactggaattgacctgtatggctgcacccgcatcaccaagaggggcctggagcgcatcacccagctgccctgcctgaaggtgctgaacctgggcctgtggcagatgacagacagcgagaaggaggcccggggggacttcagccccctcttcaccgtgaggacccggggcagcagcagaagatag

SEQ ID NO: 19238 - DNA, 1371 bp, synthetic construct
  source 1..1371: mol_type = other DNA; note = Synthetic coding sequence
atggctgctgccctgaagtgcctgctgaccctgggccgctggtgccccggcctgggcgtggccccccaggcccgggccctggccgccctggtgcctggggtgacccaggtggacaacaagagcggcttcctgcagaagaggccccaccggcagcaccctggcatcctgaagctgccccacgtgcggctgccccaggccctggccaatggagcccagctgctgctgctgggcagcgctggccccaccatggagaaccaggtgcagaccctgaccagctacctgtggagccgccacctgcctgtggagcctgaggagctgcagaggcgggcccggcacctggagaagaagttcctggagaacccagacctgagccagacagaggagaagctgcggggagctgtgctgcacgccctgaggaagaccacctaccactggcaggagctgagctacacagagggcctgagcctggtgtacatggccgcccggctggatggcggctttgctgctgtgtcccgggccttccacgagatccgggccaggaacccagccttccagccccagaccctgatggactttggcagcggcaccggctctgtgacctgggccgcccacagcatctggggccagagcctgcgggagtacatgtgtgtggacagatctgctgccatgctggtgctggccgagaagctgctgaagggcggcagcgagagcggggagccctacatccctggggtcttcttccggcagttcctgcctgtgagccccaaggtgcagtttgatgtggtggtgtctgccttcagcctgtctgagctgcccagcaaggctgacagaacagaggtggtgcagaccctgtggaggaagacaggccacttcctggtgctggtggagaatggcaccaaggccggccacagcctgctgatggatgcccgggacctggtgctgaagggcaaggagaagagccccctggacccccggcccggctttgtgtttgccccctgcccccatgagctgccctgcccccagctgaccaacctggcctgcagcttcagccaggcctaccaccccatccccttctcctggaacaagaagcccaaggaggagaagttctccatggtgatcctggcccggggcagccctgaggaggcccaccgctggccccgcatcacccagcctgtgctgaagaggcccaggcatgtgcactgccacctgtgctgcccagatggccacatgcagcacgctgtgctgacagcccggcggcacggccgggacctgtaccgctgtgcccgggtgtcctcctggggagacctgctgcctgtgctgaccccatctgccttcccccccagcacagcccaggaccccagcgagagctag

SEQ ID NO: 19239 - DNA, 756 bp, synthetic construct
  source 1..756: mol_type = other DNA; note = Synthetic coding sequence
atggacatgaagaggcgcatccacctggagctgaggaacagaacaccagctgctgtgcgggagctggtgctggacaactgcaagagcaatgatggcaagattgagggcctgacagctgagtttgtgaacctggagttcctgagcctcatcaacgtgggcctcatctctgtgagcaacctgcccaagctgcccaagctgaagaagctggagctgtctgaaaatcgcatctttggaggcctggacatgctggccgagaagctgcccaacctgacccacctgaacctgagcggcaacaagctgaaggacatcagcaccctggagcccctgaagaagctggagtgcctgaagagcctggacctcttcaactgtgaggtgaccaacctgaatgactaccgggagagcgtcttcaagctgctgccccagctgacctacctggatggctatgaccgggaggaccaggaggccccagacagtgatgctgaggtggatggagtggatgaggaggaggaggatgaggagggagaagatgaggaggatgaagatgatgaagatggagaggaggaggagtttgatgaagaagatgatgaagatgaagatgtggagggagatgaagatgatgatgaggtgtctgaggaggaggaggagtttggcctggatgaagaagatgaagatgaagatgaagatgaggaggaggaggagggcggcaagggggagaagaggaagcgggagacagatgatgaaggagaagatgactag

SEQ ID NO: 19240 - DNA, 510 bp, synthetic construct
  source 1..510: mol_type = other DNA; note = Synthetic coding sequence
atgtctgcccccccagccctgcagatccgggaggccaatgcccacctggccgctgtgcacagaagagctgctgagctggaggcccggctggatgctgctgagaggacagtgcacgcccaggccgagcggctggccctgcatgaccagcagctgcgggccgccctggatgagctgggccgggccaaggaccgggagatcgccaccctgcaggagcagctgatgaccagcgaggccaccgtgcacagcctgcaggccaccgtgcaccagagagatgagctgatccggcagctgcagcccagggctgagctgctgcaggacatctgcagaagaagaccacccctggccggcctgctggatgccctggccgaggccgagcggctgggccccctgcctgccagtgaccccggccaccccccacctgggggccctggcccccccctggacaacagcactggagaggaggccgaccgggaccacctgcagcctgctgtgtttggcaccaccgtgtag

SEQ ID NO: 19241 - DNA, 2079 bp, synthetic construct
  source 1..2079: mol_type = other DNA; note = Synthetic coding sequence
atgaagatcttctgcagccgggccaaccccaccaccggctctgtggagtggctggaggaggatgagcactatgactaccaccaggagatcgcccggagcagctatgctgacatgctgcatgacaaggacagaaatgtgaagtactaccagggcatccgggctgctgtgtcccgggtgaaggaccggggccagaaggccctggtgctggacattggaactggaacaggcctgctgtccatgatggctgtgacagctggagctgacttctgctacgccatcgaggtgttcaagcccatggctgatgctgctgtgaagatcgtggagaagaatggcttcagtgacaagatcaaggtgatcaacaagcacagcacagaggtgacagtgggccctgagggggacatgccctgccgggccaacatcctggtgacagagctgtttgacacagagctgattggagagggcgccctgcccagctatgaacatgcccaccgccacctggtggaggagaactgtgaggccgtgccccaccgggccaccgtgtatgcccagctggtggagagcggccgcatgtggagctggaacaagctgttccccatccacgtgcagaccagcctgggggagcaggtgattgtgccccctgtggatgtggagagctgccctggggcccccagcgtgtgtgacatccagctgaaccaggtgtccccagctgacttcaccgtgctgagtgatgtgctgcccatgttcagcattgacttcagcaagcaggtgagcagcagcgctgcctgccacagcagaagatttgagcccctgaccagcggccgggcccaggtggtgctgtcctggtgggacatcgagatggaccctgagggcaagatcaagtgcaccatggcccccttctgggcccacagcgaccctgaggagatgcagtggagggaccactggatgcagtgtgtgtacttcctgccccaggaggagcctgtggtgcagggcagcgccctgtacctggtggcccaccatgatgactactgtgtgtggtacagcctgcagaggaccagccctgagaagaatgaaagagtgcggcagatgaggcctgtgtgtgactgccaggcccacctgctgtggaaccggcccaggtttggagagatcaatgaccaggacagaacagacagatatgtgcaggccctgaggacagtgctgaagccagattctgtgtgcctgtgtgtgtctgatggcagcctgctgtctgtgctggcccaccacctgggcgtggagcaggtgttcaccgtggagagcagcgctgccagccacaagctgctgaggaagatcttcaaggccaaccacctggaggacaagatcaacatcatcgagaagaggcctgagctgctgaccaatgaagacctgcagggcaggaaggtgtccctgctgctgggggagcccttcttcaccaccagcctgctgccctggcacaacctgtacttctggtacgtgaggacagctgtggaccagcacctgggccctggggccatggtgatgccccaggccgccagcctgcatgctgtggtggtggagttccgggacctgtggaggatccgcagcccctgtggggactgtgagggctttgatgtgcacatcatggatgacatgatcaagagggccctggacttccgggagagccgggaggccgagccccaccccctgtgggagtacccctgccgcagcctgtctgagccctggcagatcctgacctttgacttccagcagcctgtgcccctgcagcccctgtgtgccgagggcaccgtggagctgcggcggcccggccagagccacgccgctgtgctgtggatggagtaccacctgaccccagagtgcaccctgagcacaggcctgctggagcctgctgaccctgagggcggctgctgctggaacccccactgcaagcaggccgtgtacttcttcagccctgccccagacccccgggccctgctgggcggccccaggacagtgtcctatgctgtggagttccacccagacaccggggacatcatcatggagttcagacatgctgacaccccagactag

SEQ ID NO: 19242 - DNA, 468 bp, synthetic construct
  source 1..468: mol_type = other DNA; note = Synthetic coding sequence
atgacagtggagggccccccacccaaggacacaggaattgcccgggtgcccctggccggggccgccggcggccctggcatcggccgggctgctggccggggcatcccagctggggtgcccatgccccaggccccagctggcctggccggccctgtgcggggcgtgggcggccccagccagcaggtgatgaccccccagggccggggcaccgtggccgctgctgctgctgctgccacagccagcattgctggggcccccacccagtacccacctggccggggcggccccccaccacccatgggccgcggggcccctcctcctggcatgatgggccccccacctggcatgaggcctcccatgggcccccccatgggcatccccccaggccggggcacccccatgggcatgcctcctcctggcatgaggcctcctcctcctggcatgaggggcaagtgcctgcagtggtag

SEQ ID NO: 19243 - DNA, 402 bp, synthetic construct
  source 1..402: mol_type = other DNA; note = Synthetic coding sequence
atgacccggggcaaccagcgggagctggcccggcagaagaacatgaagaagcagagcgacagcgtgaagggcaagagaagagatgatggcctgtctgctgctgccaggaagcagagcgcccccagcagcctgcccccaggcaccaggaggagctgcagccgcagcaggaagaggcagaccaggagaagaagaaaccccagcagctttgtggccagctgccccaccctgctgccctttgcctgtgtgcctggggccagccccaccaccctggccttcccccctgtggtgctgaccggccccagcacagatggcatcccctttgccctgagcctgcagagggtgccctttgtgctgcccagcccccaggtggccagcctgcccctgggccacagccggggctag

SEQ ID NO: 19244 - DNA, 1809 bp, synthetic construct
  source 1..1809: mol_type = other DNA; note = Synthetic coding sequence
atggccgagttccgggtgcgggtgtccactggagaggccttcggggccggcacctgggacaaggtgtctgtgtccatcgtgggcaccagaggagagagcccccccctgcccctggacaacctgggcaaggagttcaccgctggagctgaggaggacttccaggtgaccctgcctgaagatgtgggccgggtgctgctgctgcgggtgcacaaggcccctcctgtgctgcccctgctgggccccctggccccagatgcctggttctgccgctggttccagctgaccccaccccggggcggccacctgctcttcccctgctaccagtggctggagggcgccggcaccctggtgctgcaggagggcacagccaaggtgtcctgggccgaccaccaccctgtgctgcagcagcagaggcaggaggagctgcaggcccggcaggagatgtaccagtggaaggcctacaaccctggctggccccactgcctggatgagaagacagtggaggacctggagctgaacatcaagtacagcacagccaagaatgccaacttctacctgcaggccggcagcgcctttgctgagatgaagatcaagggcctgctggacaggaagggcctgtggaggagcctgaatgagatgaagaggatcttcaacttccggaggaccccagctgctgagcacgcctttgagcactggcaggaggatgccttctttgccagccagttcctgaatggcctgaaccctgtgctgatccgccgctgccactacctgcccaagaacttccctgtgacagatgccatggtggcctctgtgctgggccctggcaccagcctgcaggccgagctggagaagggcagcctcttcctggtggaccacggcatcctgagcggcatccagaccaacgtcatcaacgggaagccccagttctctgctgcccccatgaccctgctgtaccagagccctggctgcggccccctgctgcccctggccatccagctgagccagaccccaggccccaacagccccatcttcctgcccacagatgacaagtgggactggctgctggccaagacctgggtgagaaatgctgagttctccttccacgaggccctgacccacctgctgcacagccacctgctgcctgaggtgttcaccctggccaccctgcggcagctgccccactgccaccccctcttcaagagcacaggcatcggcatcgagggcttcagcgagctgatccagaggaacatgaagcagctgaactacagcctgctgtgcctgcctgaggacatccgcacccggggcgtggaggacatccctggctactactacagagatgatggcatgcagatctggggcatccccagcagcctggagacccgggaggccctggtgcagtatgtgaccatggtgatcttcacctgcagcgccaagcacgccgctgtgtctgctggccagtttgacagctgtgcctggatgcccaacctgcccccatccatgcagctgcccccacccaccagcaagggcctggccacctgtgagggcttcatcgccaccctgccccctgtgaatgccacctgtgatgtgatcctggccctgtggctgctgagcaaggagcccggggaccagaggcccctgggcacctacccagatgagcacttcacagaggaggccccccggcgcagcatcgccaccttccagagccggctggcccagatcagccggggcatccaggagaggaaccagggcctggtgctgccctacacctacctggacccccccctgattgaaaattctgtgtccatctag

SEQ ID NO: 19245 - DNA, 3123 bp, synthetic construct
  source 1..3123: mol_type = other DNA; note = Synthetic coding sequence
atggtgagcagcgcccagatgggcttcaacctgcaggccctgctggagcagctgagccaggatgagctgagcaagttcaagtacctgatcaccaccttcagcctggcccacgagctgcagaagatcccccacaaggaggtggacaaggcagatggcaagcagctggtggagatcctgaccacccactgtgacagctactgggtggagatggccagcctgcaggtgtttgagaagatgcacaggatggacctgtctgagcgggccaaggatgaggtgcgggaggccgccctgaagagcttcaacaagaggaagcccctgagcctgggcatcaccaggaaggagcggccccccctggatgtggatgagatgctggagcgcttcaagacagaggcccaggacaaggacaaccgctgccgctacatcctgaagaccaagttccgggagatgtggaagtcctggccaggggacagcaaggaggtgcaggtgatggccgagcgctacaagatgctgatccccttcagcaacccccgggtgctgcccggccccttctcctacacagtggtgctgtatggccctgctggcctgggcaagaccaccctggcccagaagctgatgctggactgggccgaggacaacctgatccacaagttcaagtatgccttctacctgagctgccgggagctgagccggctgggcccctgcagctttgctgagctggtgttccgggactggccagagctgcaggatgacatcccccacatcctggcccaggccaggaagatcctgtttgtgattgatggctttgatgagctgggcgccgcccctggggccctgattgaggacatctgtggggactgggagaagaagaagcctgtgcctgtgctgctgggcagcctgctgaacagagtgatgctgcccaaggccgccctgctggtgaccacccggccccgggccctgcgggacctgcgcatcctggccgaggagcccatctacatccgggtggagggcttcctggaggaggaccggcgggcctacttcctgcggcactttggagatgaggaccaggccatgagggcctttgagctgatgaggagcaatgctgccctcttccagctgggcagcgccccagctgtgtgctggatcgtgtgcaccaccctgaagctgcagatggagaagggggaggaccctgtgcccacctgcctgaccaggacaggcctcttcctgcgcttcctgtgcagccgcttcccccagggcgcccagctgcggggggccctgcggaccctgagcctgctggccgcccagggcctgtgggcccagacctctgtgctgcaccgggaggacctggagcggctgggcgtgcaggagagtgacctgcggctcttcctggatggagacatcctgcggcaggacagagtgtccaagggctgctacagcttcatccacctgtccttccagcagttcctgacagccctcttctacaccctggagaaggaggaggaggaggacagagatggccacacctgggacattggagatgtgcagaagctgctgagcggcgtggagcggctgaggaacccagacctgatccaggccggctactacagctttggcctggccaatgagaagagggccaaggagctggaggccaccttcggctgcaggatgagcccagacatcaagcaggagctgctgcgctgtgacatcagctgcaagggcggccacagcacagtgacagacctgcaggagctgctgggctgcctgtatgagagccaggaggaggagctggtgaaggaggtgatggcccagttcaaggagatcagcctgcacctgaatgctgtggatgtggtgcccagcagcttctgtgtgaagcactgcaggaacctgcagaagatgagcctgcaggtgatcaaggagaacctgcctgaaaatgtgacagccagcgagagtgatgctgaggtggagaggagccaggatgaccagcacatgctgcccttctggacagacctgtgcagcatcttcggcagcaacaaggacctgatgggcctggccatcaatgacagcttcctgagcgccagcctggtgcgcatcctgtgtgagcagatcgccagtgacacctgccacctgcagagggtggtgttcaagaacatcagccctgcagatgcccacaggaacctgtgcctggccctgcggggccacaagacagtgacctacctgaccctgcagggcaatgaccaggatgacatgtttcctgccctgtgtgaggtgctgcggcaccctgagtgcaacctgcgctacctgggcctggtgtcctgcagcgccaccacccagcagtgggccgacctgagcctggccctggaggtgaaccagagcctgacctgtgtgaacctgagtgacaatgagctgctggatgaaggagccaagctgctgtacaccaccctgcggcaccccaagtgcttcctgcagaggctgagcctggagaactgccacctgacagaggccaactgcaaggacctggccgctgtgctggtggtgtcccgggagctgacccacctgtgcctggccaagaaccccatcggcaacacaggagtgaagttcctgtgtgagggcctgcgctacccagagtgcaagctgcagaccctggtgctgtggaactgtgacatcaccagtgatggctgctgtgacctgaccaagctgctgcaggagaagagcagcctgctgtgcctggacctgggcctgaaccacatcggcgtgaagggcatgaagttcctgtgtgaggccctgaggaagcccctgtgcaacctgcgctgcctgtggctgtggggctgcagcatcccccccttcagctgtgaggacctgtgcagcgccctgagctgcaaccagagcctggtgaccctggacctgggccagaaccccctgggcagcagtggagtgaagatgctgtttgagaccctgacctgcagcagcggcaccctgcggaccctgcggctgaagattgatgacttcaatgatgagctgaacaagctgctggaggagattgaggagaagaacccccagctgatcatcgacacagagaagcaccacccctgggccgagcggcccagcagccatgacttcatgatctag

SEQ ID NO: 19246 - DNA, 3864 bp, synthetic construct
  source 1..3864: mol_type = other DNA; note = Synthetic coding sequence
atggtgcctggagaggagaaccagctggtgcccaaggaggcccccctggaccacaccagtgacaagagcctgctggatgccaactttgagcccgggaagaagaacttcctgcacctgacagacaaggatggagagcagccccagatcctgctggaggacagcagcgctggggaggacagcgtgcatgaccgcttcatcggccccctgccccgggagggcagcggcggcagcaccagtgactatgtgtcccagagctacagctacagcagcatcctgaacaagtcagaaacaggctacgtgggcctggtgaaccaggccatgacctgctacctgaacagcctgctgcagaccctcttcatgaccccagagttcagaaatgccctgtacaagtgggagtttgaggagagcgaggaggaccctgtgaccagcatcccctaccagctgcagaggctgtttgtgctgctgcagaccagcaagaagagggccatcgagaccacagatgtgaccaggagctttggctgggacagcagcgaggcctggcagcagcatgatgtgcaggagctgtgccgggtgatgtttgatgccctggagcagaagtggaagcagacagagcaggccgacctgatcaatgagctgtaccagggcaagctgaaggactatgtgcgctgcctggagtgtggctatgagggctggagaattgacacctacctggacatccccctggtgatccggccctacggcagcagccaggcctttgcctctgtggaggaggccctgcacgccttcatccagcctgagatcctggatggccccaaccagtacttctgtgagcgctgcaagaagaagtgtgatgccaggaagggcctgcgcttcctgcacttcccctacctgctgaccctgcagctgaagagatttgattttgactacaccaccatgcaccgcatcaagctgaatgacaggatgaccttccctgaggagctggacatgagcaccttcattgatgtggaggatgagaagagcccccagacagagagctgcacagattctggagcagaaaatgaaggcagctgccacagcgaccagatgagcaatgacttcagcaatgatgatggagtggatgagggcatctgcctggagaccaacagcggcacagagaagatcagcaagagcggcctggagaagaacagcctcatctatgagctgttctctgtgatggtgcacagcggcagcgctgctgggggccactactatgcctgcatcaagagcttcagtgatgagcagtggtacagcttcaatgaccagcacgtgagccgcatcacccaggaggacatcaagaagacccacggcggcagcagcggcagccggggctactacagcagcgcctttgccagcagcaccaatgcctacatgctgatctaccgcctgaaggaccctgccagaaatgccaagttcctggaggtggatgagtacccagagcacatcaagaacctggtgcagaaggagcgggagctggaggagcaggagaagaggcagcgggagattgaaagaaacacctgcaagatcaagctgttctgcctgcaccccaccaagcaggtgatgatggagaacaagctggaggtgcacaaggacaagaccctgaaggaggccgtggagatggcctacaagatgatggacctggaggaggtgatccccctggactgctgccgcctggtgaagtatgatgagttccatgactacctggagaggagctatgaaggagaggaggacacccccatgggcctgctgctgggcggcgtgaagagcacctacatgtttgacctgctgctggagaccaggaagccagaccaggtgttccagagctacaagccaggagaggtgatggtgaaggtgcacgtggtggacctgaaggccgagagcgtggccgcccccatcaccgtgcgggcctacctgaaccagacagtgacagagttcaagcagctgatcagcaaggccatccacctgcctgctgagaccatgagaattgtgctggagcgctgctacaatgacctgcggctgctgtctgtgagcagcaagaccctgaaggccgagggcttcttccgcagcaacaaggtgtttgtggagagcagcgagaccctggactaccagatggcctttgctgacagccacctgtggaagctgctggacagacatgccaacaccatccggctgtttgtgctgctgcctgagcagagccctgtgtcctacagcaagaggacagcctaccagaaggccggcggggacagcggaaatgtggatgatgactgtgagcgggtgaagggccctgtgggcagcctgaagtctgtggaggccatcctggaggagagcacagagaagctgaagagcctgagcctgcagcagcagcaggatggagacaatggagacagcagcaagagcacagagaccagtgactttgagaacatcgagagccccctgaatgaaagagacagcagcgcctctgtggacaaccgggagctggagcagcacatccagaccagtgaccctgagaacttccagagcgaggagaggagtgacagtgatgtgaacaatgacaggagcaccagctctgtggacagcgacatcctgagcagcagccacagcagtgacaccctgtgcaatgctgacaatgcccagatccccctggccaacggcctggacagccacagcatcaccagcagcaggaggaccaaggccaatgaaggcaagaaggagacctgggacacagcagaagaagattctggaacagattctgaatatgatgagagcggcaagagcagaggagagatgcagtacatgtacttcaaggccgagccctatgctgctgatgagggcagcggggagggccacaagtggctgatggtgcacgtggacaagaggatcaccctggccgccttcaagcagcacctggagccctttgtgggcgtgctgagcagccacttcaaggtgttccgggtgtatgccagcaaccaggagtttgagagcgtgcggctgaatgagaccctgagcagcttcagtgatgacaacaagatcaccatccggctgggccgggccctgaagaagggggagtacagagtgaaggtgtaccagctgctggtgaatgagcaggagccctgcaagttcctgctggatgctgtgtttgccaagggcatgacagtgcggcagagcaaggaggagctgatcccccagctgcgggagcagtgtggcctggagctgagcattgaccgcttccggctgaggaagaagacctggaagaaccctggcaccgtcttcctggactaccacatctatgaggaggacatcaacatcagcagcaactgggaggtgttcctggaggtgctggatggagtggagaagatgaagtccatgagccagctggccgtgctgagccgccgctggaagcccagcgagatgaagctggaccccttccaggaggtggtgctggagagcagctctgtggatgagctgcgggagaagctgtctgagatcagcggcatccccctggatgacatcgagtttgccaagggccggggcaccttcccctgtgacatctctgtgctggacatccaccaggacctggactggaaccccaaggtgtccaccctgaatgtgtggcccctgtacatctgtgatgatggagctgtgatcttctacagagacaagacagaggagctgatggagctgacagatgagcagagaaatgagctgatgaagaaggagagcagccggctgcagaagacaggccaccgggtgacctacagccccaggaaggagaaggccctgaagatctacctggatggagcccccaacaaggacctgacccaggactag

SEQ ID NO: 19247 - DNA, 420 bp, synthetic construct
  source 1..420: mol_type = other DNA; note = Synthetic coding sequence
atgccctggagggctggaaatggagtgggcctggaggcccaggccggcacccaggaggccggccctgaggagtactgccaggaggagctgggcgctgaggaggagatggccgcccgggccgcctggcctgtgctgcggtctgtgaacagccgggagctgagccgcatcatcatctgcaaccacagccccagaattgtgctgcctgtgtggctgaactactacggcaagctgctgccctacctgaccctgctgcccggccgggacttccgcatccacaacttccgcagccacccctggctgttcagagatgcccggacccatgacaagctgctggtgaaccagacagagctgtttgtgcccagcagcaatgtgaatggccagcctgtgtttgccaacatcaccctgcagtgcatcccctag

SEQ ID NO: 19248 - DNA, 582 bp, synthetic construct
  source 1..582: mol_type = other DNA; note = Synthetic coding sequence
atggagggctgtgtgagcaacctgatggtgtgcaacctggcctacagcggcaagctggaggagctgaaggagagcatcctggccgacaagagcctggccaccaggacagaccaggccggctggagccccctgcacatcgccgccagcgctggaagagatgaaattgtgaaggccctgctgggcaagggggcccaggtgaatgctgtgaaccagaatggctgcacccccctgcactacgccgccagcaagaacagacatgaaattgctgtgatgctgctggagggcggggccaacccagatgccaaggaccactatgaggccacagccatgcacagagctgctgccaagggcaacctgaagatgatccacatcctgctgtactacaaggccagcaccaacatccaggacacagagggcaacacccccctgcacctggcctgtgatgaggagcgggtggaggaggccaagctgctggtgtcccagggcgccagcatctacatcgagaacaaggaggagaagacccccctgcaggtggccaagggcggcctgggcctcatcctgaagaggatggtggagggctag

SEQ ID NO: 19249 - DNA, 612 bp, synthetic construct
  source 1..612: mol_type = other DNA; note = Synthetic coding sequence
atgtctgaaaatgctgcccctggcctcatcagcgagctgaagctggccgtgccctggggccacatcgccgccaaggcctggggcagcctgcagggcccccctgtgctgtgcctgcacggctggctggacaatgccagcagctttgacaggctcatccccctgctgccccaggacttctactacgtggccatggactttggaggccacggcctgagcagccactacagccctggggtgccctactacctgcagacctttgtgtctgagatcagaagagtggtggccgccctgaagtggaaccgcttcagcatcctgggccacagctttggaggagtggtgggcggcatgttcttctgcaccttccctgagatggtggacaagctgatcctgctggacacccccctcttcctgctggagagtgatgagatggagaacctgctgacctacaagagaagagccatcgagcacgtgctgcaggtggaggccagccaggagcccagccacgtgttcagcctgaagcagctgctgcagaggcagaggacagccctgaccagcagcgctggcagctgtgtgcgcatccccagcggcagctgccggcccatgagctgctag

SEQ ID NO: 19250 - DNA, 765 bp, synthetic construct
  source 1..765: mol_type = other DNA; note = Synthetic coding sequence
atgcctgctggctccatgagcaccaccggctacccaggagtgtgcagcaccaccagctaccgcacccactgctacatccctgtgaccagctctgtgaccctgagcagcagtgacctgagccccaccttcggccactgcctgcccagcagctaccagggcaacctgtggctgctggactactgccaggagagctatggagaggcccccacctgcaagagccccagctgtgagcccaagacctgcagcaccaccggctgtgaccccagcaacagctctgtgccctgcaacagccccagcgctggccaggtgttttctgtgtgtgagaccaccaacgtgagccccagccccagctgcagccccagcacccagaccaacggctacgtgtgcaactgccacatccccaccagaaatgccagcaaggcctgccagaccctgagaaatggcagcaactgcttcggccagctgaactgcctgagcaagagcttccagaccctgaaccactgccgcctgagcaccctgggctacaagagctaccagaacccctgcttcatccccagctatgtgagccccctgtgctacatcagcaacagctgccagccccagagctacctggtgaggaactaccactacagcagctaccggcccaccagctgccggcccctgagctacctgagccgctccttccgcagcctgagctacatccccagcaccttcccccccctgcgctacctgtgcagcggcagccggcccctgaagtgctactag

SEQ ID NO: 19251 - DNA, 1338 bp, synthetic construct
  source 1..1338: mol_type = other DNA; note = Synthetic coding sequence
atgagggagatcgtgcacctgcaggccggccagtgtggcaaccagatcggggccaagttctgggaggtgatcagtgatgagcacggcatcgaccccaccggcacctaccatggagacagcgacctgcagctggagcgcatcaacgtgtactacaatgaggccactggaggcaagtatgtgcccagggctgtgctggtggacctggagcccggcaccatggattctgtgcgcagcggccccttcggccagatcttccggccagacaactttgtgtttggccagagcggggccggcaacaactgggccaagggccactacacagaaggagctgagctggtggacagcgtgctggatgtggtgaggaaggaggccgagagctgtgactgcctgcagggcttccagctgacccacagcctgggcggcggcactggaagtggcatgggcaccctgctgatcagcaagatccgggaggagtacccagaccgcatcatgaacaccttctctgtggtgcccagccccaaggtgtctgacacagtggtggagccctacaatgccaccctgtctgtgcaccagctggtggagaacacagatgagacctactgcatcgacaatgaggccctgtatgacatctgcttccgcaccctgaagctgaccacccccacctacggggacctgaaccacctggtgtctgccaccatgtctggagtgaccacctgcctgcgcttccctggccagctgaatgctgacctgaggaagctggccgtgaacatggtgcccttcccccggctgcacttcttcatgcctggctttgcccccctgaccagccggggcagccagcagtaccgggccctgactgtgcctgagctgacccagcagatgtttgatgccaagaacatgatggccgcctgtgaccccaggcatggccgctacctgactgtggccgctgtgttccggggccgcatgtccatgaaggaggtggatgagcagatgctgaatgtgcagaacaagaacagcagctactttgtggagtggatccccaacaacgtgaagacagctgtgtgtgacatccccccccggggcctgaagatgtctgccaccttcatcggcaacagcacagccatccaggagctgttcaagaggatcagcgagcagttcaccgccatgttccggaggaaggccttcctgcactggtacacaggagagggcatggatgagatggagttcacagaagctgagagcaacatgaatgacctggtgtctgagtaccagcagtaccaggatgccacagctgaggaggagggggagtttgaggaggaggccgaggaggaggtggcctag

SEQ ID NO: 19252 - DNA, 750 bp, synthetic construct
  source 1..750: mol_type = other DNA; note = Synthetic coding sequence
atggccgagcggggggagctggacctgaccggggccaagcagaacacaggagtgtggctggtgaaggtgcccaagtacctgagccagcagtgggccaaggccagcggccgcggggaggtgggcaagctgagaattgccaagacccagggccgcacagaggtgtccttcaccctgaatgaagacctggccaacatccatgacatcggcggcaagccagcctctgtgtctgccccccgggagcacccctttgtgctgcagagcgtgggcggccagaccctgaccgtcttcacagagagcagcagtgacaagctgagcctggagggcatcgtggtgcagagagcagaatgtagacctgctgccagcgagaactacatgaggctgaagaggctgcagatcgaggagagcagcaagcctgtgcggctgagccagcagctggacaaggtggtgaccaccaactacaagcctgtggccaaccaccagtacaacattgaatatgaaaggaagaagaaggaggatggcaagagggcccgggctgacaagcagcacgtgctggacatgctgttcagcgcctttgagaagcaccagtactacaacctgaaggacctggtggacatcaccaagcagcctgtggtgtacctgaaggagatcctgaaggagattggagtgcagaatgtgaagggcatccacaagaacacctgggagctgaagccagagtaccgccactaccagggcgaggagaagagtgactag

SEQ ID NO: 19253 - DNA, 2511 bp, synthetic construct
  source 1..2511: mol_type = other DNA; note = Synthetic coding sequence
atgtggagcctgggctgtgtgattgctgagctgttcctgggctggcccctgtacccaggggcctctgaatatgaccagatccgctacatcagccagacccagggcctgcctgctgagtacctgctgtctgctggcaccaagaccacccgcttcttcaacagagaccccaacctgggctaccccctgtggaggctgaagaccccagaggagcacgagctggagaccggcatcaagagcaaggaggccaggaagtacatcttcaactgcctggatgacatggcccaggtgaacatgagcacagacctggagggcacagacatgctggccgagaaggctgaccggcgggagtacatcgacctgctgaagaagatgctgaccattgatgctgacaagaggatcacccccctgaagaccctgaaccaccagtttgtgaccatgacccacctgctggacttcccccacagcaaccacgtgaagagctgcttccagaacatggagatctgcaagagaagagtgcacatgtatgacacagtgtcccagatcaagagccccttcaccacccacgtggcccccaacaccagcaccaacctgaccatgtccttcagcaaccagctgaacacagtgcacaaccaggcctctgtgctggccagcagcagcacagctgctgctgccaccctgagcctggccaacagtgatgtgtccctgctgaactaccagagcgccctgtaccccagcagcgctgcccctgtgcctggggtggcccagcagggcgtgtccctgcagcccggcaccacccagatctgcacccagacagaccccttccagcagaccttcatcgtgtgccccccagccttccagacaggcctgcaggccaccaccaagcacagcggcttccctgtgaggatggacaatgctgtgcccatcgtgccccaggccccagctgcccagcccctgcagatccagagcggcgtgctgacccagggcagctgcacccccctgatggtggccaccctgcacccccaggtggccaccatcaccccccagtatgctgtgcccttcaccctgagctgtgccgccggccggcctgccctggtggagcagacagctgctgtgctgcaggcctggccaggcggcacccagcagatcctgctgcccagcacctggcagcagctgcccggggtggccctgcacaacagcgtgcagcccacagccatgatccctgaggccatgggcagcggccagcagctggccgactggagaaatgcccacagccacggcaaccagtacagcaccatcatgcagcagcccagcctgctgaccaaccacgtgaccctggccacagcccagcccctgaatgtgggcgtggcccacgtggtgcggcagcagcagagcagcagcctgcccagcaagaagaacaagcagagcgcccctgtgagcagcaagagcagcctggatgtgctgcccagccaggtgtacagcctggtgggcagcagccccctgcggaccaccagcagctacaacagcctggtgcctgtgcaggaccagcaccagcccatcatcatcccagacacccccagcccccctgtgtctgtcatcaccatccgcagtgacacagatgaggaggaggacaacaagtacaagcccagcagcagcggcctgaagcccaggagcaatgtcatctcctatgtgacagtgaatgacagcccagacagcgacagcagcctgagcagcccctacagcacagacaccctgagcgccctgcggggcaacagcggctctgtgctggagggccctggccgggtggtggctgatggcaccggcaccaggaccatcatcgtgccccccctgaagacccagctgggggactgcaccgtggccacccaggccagcggcctgctgagcaacaagaccaagcctgtggcctctgtgtctggccagagcagcggctgctgcatcacccccaccggctaccgggcccagaggggcggcaccagcgctgcccagcccctgaacctgagccagaaccagcagagcagcgctgcccccaccagccaggagaggagcagcaacccagccccccggcggcagcaggcctttgtggcccccctgagccaggccccctacaccttccagcacggcagccccctgcacagcacaggccacccccacctggccccagccccagcccacctgcccagccaggcccacctgtacacctatgctgcccccaccagcgctgctgccctgggcagcaccagcagcatcgcccacctgttcagcccccagggcagcagcagacatgctgctgcctacaccacccaccccagcaccctggtgcaccaggtgcctgtgtctgtgggccccagcctgctgaccagcgcctctgtggccccagcccagtaccagcaccagtttgccacccagagctacatcggcagcagccggggcagcaccatctacacaggctaccccctgagccccaccaagatcagccagtacagctacctgtag

SEQ ID NO: 19254 - DNA, 2352 bp, synthetic construct
  source 1..2352: mol_type = other DNA; note = Synthetic coding sequence
atgagccaggtgaagagcagctacagctatgatgcccccagcgacttcatcaacttcagcagcctggatgatgaaggagacacccagaacatcgacagctggtttgaggagaaggccaacctggagaacaagctgctgggcaagaatggaactggaggcctcttccagggcaagacccccctgaggaaggccaacctgcagcaggccatcgtgacccccctgaagcctgtggacaacacctactacaaggaggccgagaaggagaacctggtggagcagagcatccccagcaatgcctgcagcagcctggaggtggaggccgccatcagcaggaagaccccagcccagccccagaggaggagcctgcggctgagcgcccagaaggacctggagcagaaggagaagcaccacgtgaagatgaaggccaagagatgtgccacccctgtgatcattgatgagatcctgcccagcaagaagatgaaggtgagcaacaacaagaagaagccagaggaggagggcagcgcccaccaggacacagctgagaagaatgccagcagccctgagaaggccaagggccgccacacagtgccctgcatgcccccagccaagcagaagttcctgaagagcacagaggagcaggagctggagaagtccatgaagatgcagcaggaggtggtggagatgaggaagaagaatgaggagttcaagaagctggccctggccggcatcggccagcctgtgaagaagtctgtgtcccaggtgaccaagtctgtggacttccacttcagaacagatgagcgcatcaagcagcaccccaagaaccaggaggagtacaaggaggtgaacttcaccagcgagctgaggaagcaccccagcagccctgcccgggtgaccaagggctgcaccatcgtgaagcccttcaacctgagccagggcaagaagaggacctttgatgagaccgtgtccacctacgtgcccctggcccagcaggtggaggacttccacaagaggacccccaaccgctaccacctgcggagcaagaaggatgacatcaagacaggcagctgcagcgtgacccaggccggcgtgcagtggagggaccacggcagcctgcagtgccccaccccaggcctgaagcagagcagctgcctgagcctgcccaacctgctgcccagcaagagctctgtgaccaagatctgccgggacccccagacccctgtgctgcagaccaagcaccgggcccgggctgtgacctgcaagagcacagctgagctggaggccgaggagctggagaagctgcagcagtacaagttcaaggcccgggagctggacccccgcatcctggagggcggccccatcctgcccaagaagccccctgtgaagccacccacagagcccatcggctttgacctggagattgagaagaggatccaggagcgggagagcaagaagaagacagaagatgagcactttgagttccacagccggccctgccccaccaagatcctggaggatgtggtgggcgtgcctgagaagaaggtgctgcccatcaccgtgcccaagagccctgcctttgccctgaagaaccgcatccgcatgcccaccaaggaggatgaggaggaggatgagcctgtggtgatcaaggcccagcctgtgccccactatggagtgcccttcaagccccagatccctgaggccaggacagtggagatctgccccttctcctttgacagccgggacaaggagcggcagctgcagaaggagaagaagatcaaggagctgcagaagggggaggtgcccaagttcaaggccctgcccctgccccactttgacaccatcaacctgcctgagaagaaggtgaagaatgtgacccagatcgagcccttctgcctggagacagacagaagaggagccctgaaggcccagacctggaagcaccagctggaggaggagctgcggcagcagaaggaggccgcctgcttcaaggcccggcccaacacagtcatcagccaggagccctttgtgcccaagaaggagaagaagtctgtggccgagggcctgagcggcagcctggtgcaggagcccttccagctggccacagagaagagggccaaggagcggcaggagctggagaagaggatggccgaggtggaggcccagaaggcccagcagctggaggaggcccggctgcaggaggaggagcagaagaaggaggagctggcccggctgcggcgggagctggtgcacaaggccaaccccatcaggaagtaccagggcctggagatcaagagcagtgaccagcccctgactgtgcctgtgagccccaagttcagcacccgcttccactgctag

SEQ ID NO: 19255 - DNA, 2061 bp, synthetic construct
  source 1..2061: mol_type = other DNA; note = Synthetic coding sequence
atgggcagctacctgtctgtgcctgcctacttcaccagccgggacctcttccgctgcagcgagtgccaggacagcctgaccaactggtactatgagaaggatggcaagctgtactgccccaaggactactggggcaagtttggagagttctgccacggctgcagcctgctgatgacaggccccttcatggtggccggggagttcaagtaccacccagaatgttttgcctgcatgagctgcaaggtgatcattgaagatggagatgcctatgccctggtgcagcacgccaccctgtactgtgggaagtgccacaatgaggtggtgctggcccccatgtttgagcggctgagcacagagagcgtgcaggagcagctgccctacagcgtgaccctcatctccatgcctgccaccacagagggcagaagaggcttctctgtgtctgtggagagcgcctgcagcaactatgccaccaccgtgcaggtgaaggaggtgaacaggatgcacatcagccccaacaacagaaatgccatccaccctggggaccgcatcctggagatcaatggcacccctgtgaggaccctgcgggtggaggaggtggaggatgccatcagccagaccagccagaccctgcagctgctgattgaacatgaccctgtgtcccagaggctggaccagctgcggctggaggcccggctggccccccacatgcagaatgccggccacccccacgccctgagcaccctggacaccaaggagaacctggagggcaccctgcggcggcgcagcctgcggcgcagcaacagcatcagcaagagccctggccccagcagccccaaggagcccctgctcttcagccgggacatcagccgctctgagagcctgcgctgcagcagcagctacagccagcagatcttccggccctgtgacctgatccacggggaggtgctgggcaagggcttcttcggccaggccatcaaggtgacccacaaggccaccgggaaggtgatggtgatgaaggagctgatccgctgtgatgaggagacccagaagaccttcctgacagaggtgaaggtgatgaggagcctggaccaccccaacgtgctgaagttcatcggcgtgctgtacaaggacaagaagctgaacctgctgacagagtacattgaaggaggcaccctgaaggacttcctgcgctccatggaccccttcccctggcagcagaaggtgcgctttgccaagggcatcgccagcggcatggcctacctgcacagcatgtgcatcatccaccgggacctgaacagccacaactgcctgatcaagctggacaagacagtggtggtggccgactttggcctgagccggctgattgtggaggagaggaagagggcccccatggagaaggccaccaccaagaagaggaccctgaggaagaatgacaggaagaagcgctacacagtggtgggcaacccctactggatggcccctgagatgctgaatggcaagagctatgatgaaacagtggacatcttctcctttggaattgtgctgtgtgagatcatcggccaggtgtatgctgaccctgactgcctgcccaggaccctggactttggcctgaatgtgaagctgttctgggagaagtttgtgcccacagactgccccccagccttcttccccctggccgccatctgctgccgcctggagcctgagagccgggcccctcctggagctgctggggagggccctggctgtgctgatgatgagggccctgtgcggcggcagggcaaggtgaccatcaagtatgaccccaaggagctgaggaagcacctgaacctggaggagtggatcctggagcagctgacccggctgtatgactgccaggaggaggagatcagcgagctggagattgatgtggatgagctgctggacatggagagtgatgatgcctgggccagccgggtgaaggagctgctggtggactgctacaagcccacagaggccttcatcagcggcctgctggacaagatccgggccatgcagaagctgagcaccccccagaagaagtag

SEQ ID NO: 19256 - DNA, 840 bp, synthetic construct
  source 1..840: mol_type = other DNA; note = Synthetic coding sequence
atgagggccctgactgtgcagagggtgaagtttgccatggacctgcccctgctgaagagagctggccaggacctggccgagaagaccaagaactttgtgagccgcagcctggtgattggagaggtgctgtccatggctgacatggccaccggggtgaagtgtggcatcatctactggctgtttggaggagccatccggaacctgggcagccctgagcacgtgaccaagtggttccagcccctgcaggagcagaagtacacaggcatgtttgccatgacagagcggggccacggcagcaatgcccggggcatccagacagaggccacctttgacctgagcgcccaggagtttgtgattgacaccccctgtgaaaatgctgagaagatgtacatcggaaatgccatgtatggcaactatgctgctgtgtttgcccagctgatcattgatggccgcagccagggcccccactgcttcatcgtgcctgtgagagatgaaaatggcagcctgtacccaggagtgacagccatcgacatgatgtacaaggagggcctgcatggagtggacaatggcatcctgatctttgacaaggtgcgcatcccccgggagaacctgctggacaagtttggatctgtggccccagatggccagtaccacagccccatccggaacaagagcgcccgcttcaatgccatgctggccgccctgacccccagccggctggccgtggccttccaggccatgggcgccatgaagctgggcctgaccatcgccatccgctacagccacaggagccgcatcatcagccagaactgctgcagcgccccagctggcctgtactag

SEQ ID NO: 19257 - DNA, 597 bp, synthetic construct
  source 1..597: mol_type = other DNA; note = Synthetic coding sequence
atgaccctgcgctgcctggagcccagcggaaatggaggagagggcaccaggagccagtggggcacagctggcagcgctgaggagcccagcccccaggccgcccggctggccaaggccctgcgggagctgggccagacaggctggtactggggctccatgacagtgaatgaggccaaggagaagctgaaggaggcccctgagggcaccttcctgatccgggacagcagccacagcgactacctgctgaccatctctgtgaagaccagcgctggccccaccaacctgagaattgagtaccaggacggcaagttccggctggacagcatcatctgtgtgaagagcaagctgaagcagtttgattctgtggtgcacctgattgactactacgtgcagatgtgcaaggacaagaggacaggccctgaggcccccagaaatggaacagtgcacctgtacctgaccaagcccctgtacaccagcgcccccagcctgcagcacctgtgccgcctgaccatcaacaagtgcacaggagccatctggggcctgcccctgcccacccggctgaaggactacctggaggagtacaagttccaggtgtag

SEQ ID NO: 19258 - DNA, 570 bp, synthetic construct
  source 1..570: mol_type = other DNA; note = Synthetic coding sequence
atggaggctgatggagatggagaggagctggcccggctgcggtctgtgtttgctgcctgtgatgccaacagaagtggccgcctggagcgggaggagttccgggccctgtgcacagagctgcgggtgcggccagcagatgctgaggccgtgttccagaggctggatgctgacagagatggagccatcaccttccaggagtttgcccggggcttcctgggcagcctgcggggcggcagaagaagagactggggccccctggaccctgccccagctgtgtctgaggccggccctgagacccatgacagcgaggaggatgaaggagatgaagatgctgctgctgccctggccaccagctgtggccctgccagccctggccgggcctggcaggacttccaggcccggctgggagatgaggccaagttcatccccaggtttggctacaccatcagcaagccagcctttgtgtttgtgcgccacctgatcaccctgtgtgccctgtcctgggccaagaaggagggccgggagaccctgtggaccatcgaggagggcggggccaagatggccgagtag

SEQ ID NO: 19259 - DNA, 300 bp, synthetic construct
  source 1..300: mol_type = other DNA; note = Synthetic coding sequence
gccctggatgtggccgtgaagaccttccccccagagcggcacgtggccgtgaagtgcttcggcaagaagaaggagaagaagaacaatgccaacagccctgcctctgtgagcaaccccaccgtgaccaagcacgccttcggcatggaggaggagctgcagcgggagggcagcattgagaccctgagcaacagcagcggcagcaccagcggcagcatccccaggaactttgatggctaccgcagccccctgcccaccaatgaaagccagcccctgagcctcttccccaccggcttcccctag

SEQ ID NO: 19260 - DNA, 1170 bp, synthetic construct
  source 1..1170: mol_type = other DNA; note = Synthetic coding sequence
atggagaggaaggactttgagacctggctggacaacatctctgtgaccttcctgagcctgacagacctgcagaagaatgagaccctggaccacctgatcagcctgagcggggctgtgcagctgcggcacctgagcaacaacctggagaccctgctgaagagggacttcctgaagctgctgcccctggagctgtccttctacctgctgaagtggctggacccccagaccctgctgacctgctgcctggtgtccaagcagtggaacaaggtgatcagcgcctgcacagaggtgtggcagacagcctgcaagaacctgggctggcagattgatgacagcgtgcaggatgccctgcactggaagaaggtgtacctgaaggccatcctgaggatgaagcagctggaggaccacgaggcctttgagaccagcagcctgattggccacagcgcccgggtgtatgccctgtactacaaggatggcctgctgtgcaccgtcttctctgtggactacaatgatgagctggacatcctggtgtctggcagcgctgacttcaccgtgaaggtgtgggccctgtctgctggcacctgcctgaacaccctgaccggccacacagagtgggtgaccaaggtggtgctgcagaagtgcaaggtgaagagcctgctgcacagccctggggactacatcctgctgtctgctgacaagtatgagatcaagatctggcccatcggccgggagatcaactgcaagtgcctgaagaccctgtctgtgtctgaagatagaagcatctgcctgcagccccggctgcactttgatggcaagtacatcgtgtgcagcagcgccctgggcctgtaccagtgggactttgccagctatgacatcctgcgggtcatcaagaccccagaaattgccaacctggccctgctgggctttggagacatctttgccctgctgtttgacaaccgctacctgtacatcatggacctgaggacagagagcctcatcagccgctggcccctgcctgagtacaggaagagcaagaggggcagcagcttcctggccggggaggcctcctggctgaatggcctggatggccacaatgacaccggcctggtgtttgccacctccatgccagaccacagcatccacctggtgctgtggaaggagcacggctag

SEQ ID NO: 19261 - DNA, 2439 bp, synthetic construct
  source 1..2439: mol_type = other DNA; note = Synthetic coding sequence
atgaagaagcagttcaacaggatgaggcagctggccaaccagacagtgggccgggcagagaagacagaggtgctgtctgaggacctgctgcaggtggagaagaggctggagctggtgaagcaggtgagccacagcacccacaagaagctgacagcctgcctgcagggccagcagggcgctgaggccgacaagaggagcaagaagctgcccctgaccaccctggcccagtgcctgatggagggcagcgccatcctgggagatgacaccctgctgggcaagatgctgaagctgtgtggggagacagaggacaagctggcccaggagctgatccactttgagctgcaggtggagagagatgtgattgagcccctcttcctgctggccgaggtggagatccccaacatccagaagcagaggaagcacctggccaagctggtgctggacatggacagcagcaggacccgctggcagcagaccagcaagagcagcggcctgagcagcagcctgcagcctgctggggccaaggcagatgccctgcgggaggagatggaggaggccgccaacagagtggagatctgccgggaccagctgtctgctgacatgtacagctttgtggccaaggagattgattatgccaactacttccagaccctgattgaggtgcaggccgagtaccacaggaagagcctgaccctgctgcaggccgtgctgccccagatcaaggcccagcaggaggcctgggtggagaagcccagctttgggaagcccctggaggagcacctgaccatcagcggccgggagatcgccttccccatcgaggcctgtgtgaccatgctgctggagtgtggcatgcaggaggagggcctcttccgggtggcccccagcgccagcaagctgaagaagctgaaggccgccctggactgctgcgtggtggatgtgcaggagtacagcgctgacccccacgccatcgccggggccctgaagagctacctgcgggagctgcctgagcccctgatgacctttgagctgtatgatgagtggatccaggccagcaatgtgcaggagcaggacaagaagctgcaggccctgtggaatgcctgtgagaagctgcccaaggccaaccacaacaacatccgctacctgatcaagttcctgagcaagctgtctgagtaccaggatgtgaacaagatgacccccagcaacatggccatcgtgctgggccccaacctgctgtggccccaggccgagggcaacatcacagagatgatgaccaccgtgtccctgcagatcgtgggcatcatcgagcccatcatccagcacgccgactggttcttccctggagaaattgagttcaacatcaccggcaactacggcagccctgtgcacgtgaaccacaatgccaactacagctccatgcccagcccagacatggaccctgctgaccggcggcagcctgagcaggcccggcggcccctgtctgtggccacagacaacatgatgctggagttctacaagaaggatggcatgggcgtgcgggtgatggacaccaactgggtggcccggcggggcagcagcgctggcaggaaggtgtcctgtgccccacccagcatgcagcccccagcccccccagctgagctggccgcccccctgcccagccccctgcctgagcagcccctggacagccctgctgccccagccctgagccccagcggcctgggcctgcagcccggccctgagaggaccagcaccaccaagagcaaggagctgagccctggcagcgcccagaagggcagccctggcagcagccagggcacagcctgtgccggcacccagcccggggcccagcccggggcccagcccggggccagccccagccccagccagcccccagctgaccagagcccccacaccctgaggaaggtgtccaagaagctggcccccatcccccccaaggtgcccttcggccagcccggggccatggctgaccagagcgctggccagcccagccctgtgtccctgagccccaccccacccagcacccccagcccctacggcctgagctacccccagggctacagcctggccagcggccagctgagccctgctgctgccccacccctggccagccccagcgtcttcaccagcaccctgagcaagagccggcccacccccaagccccggcagaggcccaccctgcccccaccccagcccccaacagtgaacctgagcgccagcagcccccagagcacagaggcccccatgctggatggcatgagccctggagagagcatgagcacagacctggtgcactttgacatccccagcatccacatcgagctgggcagcaccctgcggctgagccccctggagcacatgagaagacacagcgtgacagacaagagggacagcgaggaggagagcgagagcacagccctgtag

SEQ ID NO: 19262 - DNA, 1119 bp, synthetic construct
  source 1..1119: mol_type = other DNA; note = Synthetic coding sequence
atgagcaagtctgagagccccaaggagcctgagcagctgaggaagctgttcatcggcggcctgagctttgagaccacagatgagagcctgcggagccactttgagcagtggggcaccctgacagactgtgtggtgatgagggaccccaacaccaagaggagccggggctttggatttgtgacctacgccaccgtggaggaggtggatgctgccatgaatgcccggccccacaaggtggatggccgggtggtggagcccaagagagctgtgtcccgggaggacagccagaggcctggggcccacctgactgtgaagaagatctttgtgggcggcatcaaggaggacacagaggagcaccacctgcgggactactttgagcagtatggcaagattgaagtcatcgagatcatgacagaccggggcagcggcaagaagaggggctttgcctttgtgacctttgatgaccatgacagcgtggacaagatcgtcatccagaagtaccacacagtgaatggccacaactgtgaggtgaggaaggccctgagcaagcaggagatggccagcgccagcagcagccagaggggccgcagcggcagcggcaactttggaggcggccggggcggcggctttggaggaaatgacaactttggccggggcggcaacttcagcggccggggcggctttggaggcagcagaggaggcggcggctatggaggcagcggagatggctacaatggatttggaaatgatggcggctatggaggcggcggccctggctacagcggcggcagccggggctacggcagcggcggccagggctacggcaaccagggcagcggctatggaggcagcggcagctatgacagctacaacaacggcggcggcggcggctttggaggcggcagcggcagcaactttggaggcggcggcagctacaatgactttggaaactacaacaaccagagcagcaactttggccccatgaagggcggcaactttggaggccgcagcagcggcccctatggaggcggcggccagtactttgccaagcccaggaaccagggcggctatggaggcagcagcagcagcagcagctatggcagcggccgccgcttctag

SEQ ID NO: 19263 - DNA, 1491 bp, synthetic construct
  source 1..1491: mol_type = other DNA; note = Synthetic coding sequence
atgaagctgggcaagaagcccatgtacaagcctgtggacccctacagcaggatgcagagcacctacaactacaacatgaggggcggggcctacccaccccgctacttctaccccttccctgtgccccccctgctgtaccaggtggagctgtctgtgggcggccagcagttcaacgggaagggcaagacccggcaggccgccaagcatgatgctgctgccaaggccctgcgcatcctgcagaatgagcccctgcctgagcggctggaggtgaatggccgggagagcgaggaggagaacctgaacaagtctgagatcagccaggtgtttgaaattgccctgaagaggaacctgcctgtgaactttgaggtggcccgggagagcggccccccccacatgaagaactttgtgaccaaggtgtctgtgggggagtttgtgggggagggggagggcaagagcaagaagatcagcaagaagaatgctgccatcgctgtgctggaggagctgaagaagctgccccccctgcctgctgtggagcgggtgaagccccgcatcaagaagaagaccaagcccatcgtgaagccccagaccagcccagaatatggccagggcatcaaccccatcagccggctggcccagatccagcaggccaagaaggagaaggagcctgagtacaccctgctgacagagcggggcctgcccaggagaagagaatttgtgatgcaggtgaaggtgggcaaccacacagctgagggcaccggcaccaacaagaaggtggccaagagaaatgctgctgagaacatgctggagatcctgggcttcaaggtgccccaggcccagcccaccaagccagccctgaagtctgaggagaagacccccatcaagaagccaggagatggcaggaaggtgaccttctttgagcccggcagcggagatgaaaatggcaccagcaacaaggaggatgagttcaggatgccctacctgagccaccagcagctgcctgctggcatcctgcccatggtgcctgaggtggcccaggccgtgggcgtgtcccagggccaccacaccaaggacttcaccagggctgcccccaacccagccaaggccaccgtgacagccatgattgcccgggagctgctgtatggaggcaccagccccacagctgagaccatcctgaagaacaacatcagcagcggccacgtgccccacggccccctgacccggcccagcgagcagctggactacctgagccgggtgcagggcttccaggtggagtacaaggacttccccaagaacaacaagaatgaatttgtgtccctcatcaactgcagcagccagcccccactcatcagccatggaattggcaaggatgtggagagctgccacgacatggccgccctgaacatcctgaagctgctgtctgagctggaccagcagagcacagagatgcccaggactggaaatggccccatgtctgtgtgtggccgctgctag

SEQ ID NO: 19264 - DNA, 5835 bp, synthetic construct
  source 1..5835: mol_type = other DNA; note = Synthetic coding sequence
atgagcaacttctatgaggagaggaccaccatgattgctgcccgggacctgcaggagtttgtgcccttcggccgggaccactgcaagcaccaccccaatgccctgaacctgcagctgcggcagctgcagcctgccagcgagctgtggagcagtgatggagctgctggcctggtgggcagcctgcaggaggtgaccatccacgagaagcagaaggagagctggcagctgaggaagggcgtgtctgaaattggagaagatgtggactatgatgaggagctgtatgtggccggcaacatggtgatctggagcaagggcagcaagagccaggccctggccgtgtacaaggccttcaccgtggacagccctgtgcagcaggccctgtggtgtgacttcatcatcagccaggacaagtctgagaaggcctacagcagcaatgaggtggagaagtgcatctgcatcctgcagagcagctgcatcaacatgcacagcattgagggcaaggactacatcgccagcctgcccttccaggtggccaacgtgtggcccaccaagtatggcctgctgtttgagaggtctgccagcagccatgaggtgcccccaggcagcccccgggagcccctgcccaccatgttctccatgctgcaccccctggatgagatcacccccctggtgtgcaagagcggcagcctgtttggcagcagccgggtgcagtatgtggtggaccacgccatgaagatcgtgttcctgaacacagaccccagcatcgtgatgacctatgatgctgtgcagaatgtgcacagcgtgtggaccctgcggcgggtgaagtctgaggaggagaatgtggtgctgaagttcagcgagcagggcggcaccccccagaatgtggccaccagcagcagcctgacagcccacctgcggagcctgagcaagggggacagccctgtgaccagccccttccagaactacagcagcatccacagccagagccgcagcaccagcagccccagcctgcacagccgcagccccagcatcagcaacatggccgccctgagccgggcccacagccctgccctgggcgtgcacagcttcagcggcgtgcagcgcttcaacatcagcagccacaaccagagccccaagaggcacagcatcagccacagccccaacagcaacagcaatggcagcttcctggcccctgagacagagcccatcgtgcctgagctgtgcatcgaccacctgtggacagagaccatcaccaacatccgggagaagaacagccaggccagcaaggtgttcatcaccagtgacctgtgtggccagaagttcctgtgcttcctggtggagagccagctgcagctgcgctgtgtgaagttccaggagagcaatgacaagacccagctgatcttcggctctgtgaccaacatcccagccaaggatgctgcccctgtggagaagattgacaccatgctggtgctggagggcagcggcaacctggtgctgtacacaggagtggtgcgggtgggcaaggtgttcatccctggcctgcctgcccccagcctgaccatgagcaacaccatgccccggcccagcacccccctggatggagtgtccacccccaagcccctgagcaagctgctgggcagcctggatgaggtggtgctgctgagccctgtgcctgagctgcgggacagcagcaagctgcatgacagcctgtacaatgaagactgcaccttccagcagctgggcacctacatccacagcatccgggaccctgtgcacaacagagtgaccctggagctgagcaatggctccatggtgcgcatcaccatccctgagatcgccaccagcgagctggtgcagacctgcctgcaggccatcaagttcatcctgcccaaggagattgctgtgcagatgctggtgaagtggtacaacgtgcacagcgcccctgggggccccagctaccacagcgagtggaacctgtttgtgacctgcctgatgaacatgatgggctacaacacagaccggctggcctggaccaggaactttgattttgagggcagcctgagccctgtgattgcccccaagaaggcccggcccagcgagactggaagtgatgatgactgggagtacctgctgaacagcgactaccaccagaatgtggagagccacctgctgaacagaagcctgtgcctgagccccagcgaggccagccagatgaaggatgaggacttcagccagaacctgagcctggacagcagcaccctgctcttcacccacatcccagccatcttctttgtgctgcacctggtgtatgaggagctgaagctgaacaccctgatgggagagggcatctgcagcctggtggagctgctggtgcagctggcccgggacctgaagctgggcccctacgtggaccactactacagagactaccccaccctggtgaggaccaccggccaggtgtgcaccattgatcctggccagacaggcttcatgcaccaccccagcttcttcaccagcgagcccccatccatctaccagtgggtgagcagctgcctgaagggggagggcatgccaccctacccctacctgcccggcatctgtgagaggagccggctggtggtgctgagcatcgccctgtacatcctgggagatgagagcctggtgtctgatgagagcagccagtacctgacccgcatcaccatcgccccccagaagctgcaggtggagcaggaggagaaccgcttctccttccgccacagcacctctgtgagcagcctggccgagcggctggtggtgtggatgaccaacgtgggcttcaccctgcgggacctggagaccctgccctttggaattgccctgcccatcagagatgccatctaccactgccgggagcagcctgccagtgactggccagaggccgtgtgcctgctgattggccggcaggacctgagcaagcaggcctgtgagggcaacctgcccaagggcaagtctgtgctgagcagtgatgtgcccagcggcacagaaacagaggaggaggatgatggcatgaatgacatgaaccacgaggtgatgagcctcatctggagcgaggacctgcgggtgcaggatgtgcggcggctgctgcagagcgcccaccctgtgcgggtgaatgtggtgcagtacccagagctgagtgaccacgagttcatcgaggagaaggaaaatcggctgctgcagctgtgccagaggaccatggccctgcctgtgggccggggcatgttcaccctcttctcctaccaccctgtgcccacagagcccctgcccatccccaagctgaacctgaccggccgggccccacccaggaacaccaccgtggacctgaacagcggcaacattgatgtgccccccaacatgacctcctgggccagcttccacaatggagtggccgccggcctgaagatcgccccagccagccagattgattctgcctggatcgtgtacaacaagcccaagcacgccgagctggccaatgaatatgccggcttcctgatggccctgggcctgaatggccacctgaccaagctggccaccctgaacatccatgactacctgaccaagggccacgagatgaccagcatcggcctgctgctgggcgtgtctgctgccaagctgggcaccatggacatgagcatcacccggctgctgagcatccacatcccagccctgctgccccccaccagcacagagctggatgtgccccacaacgtgcaggtggccgctgtggtgggcatcggcctggtgtaccagggcacagcccaccgccacacagctgaggtgctgctggccgagatcggccggcccccaggccctgagatggagtactgcacagaccgggagagctacagcctggccgccggcctggccctgggcatggtgtgcctgggccacggcagcaacctgattggcatgtctgacctgaatgtgcctgagcagctgtaccagtacatggtgggcggccaccggcgcttccagacaggcatgcaccgggagaagcacaagagccccagctaccagatcaaggagggggacaccatcaacgtggatgtgacctgccctggggccaccctggccctggccatgatctacctgaagaccaacaacagaagcattgctgactggctgcgggccccagacaccatgtacctgctggactttgtgaagccagagttcctgctgctgcggaccctggcccgctgcctgatcctgtgggatgacatcctgcccaacagcaagtgggtggacagcaatgtgccccagatcatccgggagaacagcatcagcctgtctgaaattgagctgccctgcagcgaggacctgaacctggagaccctgagccaggcccacgtgtacatcatcgccggggcctgcctgagcctgggcttccgctttgctggcagcgagaacctgagcgccttcaactgcctgcacaagtttgccaaggacttcatgacctacctgagcgccccaaatgcctctgtgacaggcccccacaacctggagacctgcctgtctgtggtgctgctgagcctggccatggtgatggccggcagcggcaacctgaaggtgctgcagctgtgccgcttcctgcacatgaagacaggaggagagatgaactacggcttccacctggcccaccacatggccctgggcctgctcttcctgggcggcggccgctacagcctgagcaccagcaacagcagcattgctgccctgctgtgtgccctgtacccccacttccctgcccacagcacagacaaccgctaccacctgcaggccctgcggcacctgtatgtgctggccgctgagccccggctgctggtgcctgtggatgtggacaccaacaccccctgctacgccctgctggaggtgacctacaagggcacccagtggtatgagcagaccaaggaggagctgatggcccccaccctgctgcctgagctgcacctgctgaagcagatcaaggtgaagggcccccgctactgggagctgctgattgacctgagcaagggcacccagcacctgaagagcatcctgagcaaggatggagtgctgtatgtgaagctgcgggccggccagctgagctacaaggaggaccccatgggctggcagagcctgctggcccagacagtggccaacagaaacagcgaggcccgggccttcaagccagagaccatcagcgccttcaccagtgaccctgccctgctgagctttgctgagtacttctgcaagcccaccgtgaacatgggccagaagcaggagatcctggacctcttcagctctgtgctgtatgaatgtgtgacccaggagaccccagagatgctgcctgcctacatcgccatggaccaggccatccggcggctgggccggcgggagatgtctgagaccagcgagctgtggcagatcaagctggtgctggagttcttcagcagccgcagccaccaggagcggctgcagaaccaccccaagaggggcctcttcatgaacagcgagttcctgcctgtggtgaagtgcaccatcgacaacaccctggaccagtggctgcaggtgggcggggacatgtgtgtgcacgcctacctgagcggccagcccctggaggagagccagctgtccatgctggcctgcttcctggtgtaccacagcgtgcctgccccccagcacctgccccccatcggcctggagggcagcaccagctttgctgagctgctcttcaagttcaagcagctgaagatgcctgtgcgggccctgctgcggctggcccccctgctgctgggcaacccccagcccatggtgatgtag

SEQ ID NO: 19265 - DNA, 1263 bp, synthetic construct; identical to SEQ ID NO: 18898
  source 1..1263: mol_type = other DNA; note = Synthetic coding sequence

SEQ ID NO: 19266 - DNA, 1257 bp, synthetic construct
  source 1..1257: mol_type = other DNA; note = Synthetic coding sequence
atgagggagtgcatcagcatccacgtgggccaggccggcgtgcagattggaaatgcctgctgggagctgtactgcctggagcacggcatccagccagatggccagatgcccagcgacaagaccatcggcggcggagatgacagcttcaacaccttcttcagcgagaccggggccggcaagcacgtgcccagggctgtgtttgtggacctggagcccaccgtggtggatgaggtgaggacaggcacctaccggcagctgttccaccctgagcagctgatcaccgggaaggaggatgctgccaacaactatgcccggggccactacaccatcggcaaggagatcgtggacctggtgctggaccgcatcaggaagctggccgacctgtgcaccggcctgcagggcttcctgatcttccacagctttggaggcggcactggaagtggctttgccagcctgctgatggagcggctgtctgtggactatggcaagaagagcaagctggagtttgccatctacccagccccccaggtgtccacagctgtggtggagccctacaacagcatcctgaccacccacaccaccctggagcacagcgactgtgccttcatggtggacaatgaggccatctatgacatctgcagaagaaacctggacatcgagcggcccacctacaccaacctgaaccggctgattggccagatcgtgagcagcatcacagccagcctgcgctttgatggagccctgaatgtggacctgacagagttccagaccaacctggtgccctacccccgcatccacttccccctggccacctacgcccctgtgatctctgctgagaaggcctaccacgagcagctgtctgtggccgagatcaccaatgcctgctttgagcccgccaaccagatggtgaagtgtgaccccaggcatggcaagtacatggcctgctgcatgctgtacagaggagatgtggtgcccaaggatgtgaatgctgccatcgccaccatcaagaccaagaggaccatccagtttgtggactggtgccccaccggcttcaaggtgggcatcaactaccagcccccaacagtggtgcctggaggagacctggccaaggtgcagagagctgtgtgcatgctgagcaacaccacagccatcgccgaggcctgggcccggctggacctggccgccctggagaaggactatgaggaggtgggcgtggacagcgtggaggccgaggccgaggagggggaggagtactag

SEQ ID NO: 19267 - DNA, 417 bp, synthetic construct
  source 1..417: mol_type = other DNA; note = Synthetic coding sequence
atgcagctgcccccatttgacatgtggaaggactacttcaacctgagccaggtggtgtgggccctgattgccagccggggccagaggctggagacccaggagattgaggagcccagccctggcccccccctgggccaggaccagggcctgggcgcccctggggccaacggcggcctgggcaccctgtgcaacttctgcaagcacaatggagagagccgccacgtgtacagcagccaccagctgaagaccccagatggagtggtggtgtgccccatcctgcggcactacgtgtgccctgtgtgtggggccaccggggaccaggcccacaccctgaagtactgccccctgaatggaggccagcagagcctgtacagaagaagtggaagaaattctgctggccggcgggtgaagaggtag

SEQ ID NO: 19268 - DNA, 375 bp, synthetic construct
  source 1..375: mol_type = other DNA; note = Synthetic coding sequence
atgagggccagcccctgcatcagccagcctgctgcctcctggcacccccggcccagcgccctgcggcccacagctggcagcggccctgacaccaggaccccaggcaccgtggaggatggcagcgccccctgcccagccttccgcagccctgctgtgagcccctgtggggaggagccctgctgcttccagatcagccctgctgaggagaccctggagctgggccgcctggtgtccccaggcaactgtgacaccctgagccccagggctgctggcttctacgcctgccacgtgcgcagcctcatcccctgccgcagcaccaagggccgctggcccctgacagccagcgctgctggcctgagcagcttctctggatag

SEQ ID NO: 19269 - DNA, 363 bp, synthetic construct
  source 1..363: mol_type = other DNA; note = Synthetic coding sequence
atggccgagcccagcagcgcccggcggcctgtgcccctcatcgagagcgagctgtacttcctgattgcccgctacctgtctgctggcccctgccggcgggccgcccaggtgctggtgcaggagctggagcagtaccagctgctgcccaagaggctggactgggagggcaatgagcacaacagaagctatgaggagctggtgctgagcaacaagcacgtggccccagaccacctgctgcagatctgccagagaattggccccatgctggacaaggagatcccccccagcatcagccgggtgaccagcctgctgggcgccggccggcagagcctgctgaggacagccaagggcaccctcatctag

SEQ ID NO: 19270 - DNA, 2607 bp, synthetic construct
  source 1..2607: mol_type = other DNA; note = Synthetic coding sequence
atgatccccaagagcctggtgcaggccgctgagacccagaggggcctgtgtgagcccggcggcaagggccgggagggccgcagcggcggcaaaggagagacccggccccggggcgtgggcacccaggagggcaagggcaccatccctggcagcccccgggagaagagaggagagcggggggagggggaccctgccctgctgcctgctgaggacctgtggaggctgcccggcagcaaggaccggctgcggagcagcctgctgcccccacctggcccccccagcagtgacagcggccctggcccccccagcagccacagcggcaagacagcccagggccccaggaccctgaactgggccaggaagcagagcgcccggaccagcagcaacctgtgtgcctggagcctggccatggccaccaagatggccgagatccccagcagcccctatgagcccggccagaggggcatgaaggacacccagagaggagatgccccccagaggggcagccctgagccccgcatcctgcagctggcccgggtgggcaatgtgtacctgaaggaggagagcagccgcagcggccgcctggaggccaagaagtggatccccaccaagttcctggagaacctgtctgtgccccacgtggacctgggcggcaaccagctgtggagcggcggcatggaggccctgaccacccagctgggccctggccgggagggcagcagcagccccaacagcaagcaggagctgcagccctacagcggcagcagcgccctgaagcccaaccaggtgggggagaccagcctgtatggagtgcccatcgtgtccctggtgattgatggccaggagcggctgtgcctggcccagatcagcaacaccctgctgaagaactacagctacaatgagatccacaacagaagagtggccctgggcatcacctgtgtgcagtgcacccctgtgcagctggagatcctgcggcgggccggggccatgcccatcagcagcagaagatgtggcatgatcaccaagcgggaggccgagcggctgtgcaagagcttcctgggggagcacaagccacccaagctgcctgaaaattttgcctttgatgtggtgcatgaatgtgcctggggcagccggggcagcttcatcccagcccgctacaacagcagccgggccaagtgcatcaagtgtggctactgcagcatgtacttcagccccaacaagttcatcttccacagccacaggaccccagatgccaagtacacccagccagatgctgccaacttcaacagctggaggaggcacctgaagctgagtgacaagagcgccacagatgagctgagccacgcctgggaggaccggggcctgggcctggccactggagccagcggccctgctggccctgggggccctgggggcggggccggcgtgcgcagctaccctgtgattcctgtgcccagcaaaggatttggcctgctgcagaagctgcccccacccctcttcccccacccctacggcttccccacagccttcggcctgtgccccaagaaggatgatcctgtgctgggcgctggggagcccaagggcggcagctatgtgtctgccttccggcctgtggtgaaggacacagagagcatcgccaagctgtatggcagcgcccgggaggcctacggggccggccctgcccggggccctggccctggggccggcagcggcggctacgtgtccccagacttcctgtctgagggcagcagcagctacaacagcgccagcccagatgtggacacagcagatgagcctgaggtggatgtggagagcaaccgcttcccagatgatgaagatgcccaggaggagacagagcccagcgcccccagcgctgggggcggcccagatgctggccggcctgccttcggggacctggccgctgaggacctggtgcggcggcctgagaggagcccccccagcggcggcggcggctatgagctgcgggagccctgtggccccctgggcggccctgccccagccaaggtgtttgcccctgagagagatgagcacgtgaagtctgctgctgtggccctgggccctgctgccagctatgtgtgcaccccagaggcccacgagccagacaaggaggacaaccacagccctgcagatgacctggagaccaggaagagctacccagaccagaggagcatcagccagcccagccctgccaacacagacagaggagaagatggcctgaccctggatgtgacaggcacccacctggtggagaaggacatcgagaacctggcccgggaggagctgcagaagctgctgctggagcagatggagctgaggaagaagctggagcgggagttccagagcctgaaggacaacttccaggaccagatgaagcgggagctggcctaccgggaggagatggtgcagcagctgcagatcgtgcgggacaccctgtgcaatgagctggaccaggagaggaaggcccgctatgccatccagcagaagctgaaggaggcccatgatgccctgcaccacttcagctgcaagatgctgacccccaggcactgcaccggcaactgcagcttcaagccacccctgctgccctag

SEQ ID NO: 19271 - DNA, 3585 bp, synthetic construct
  source 1..3585: mol_type = other DNA; note = Synthetic coding sequence
atgcatgacctgcccccagacagcggggccaggagaggaggccggggcctggccgaccacagcttccctgctggggcccgggcccctggccagccccccagcagaggagctgcctaccgccgggcctgccccagagatggagagcggggcggcggcggccggccccggcagcaggtgtccccacccaggagcccccagcgggagccccggggcggccagctgcggacccccaggatgaggcccagctgcagccgcagcctggagagcctgcgggtgggcgccaagcccccacccttccagcgctggcccagcgacagctggatccgctgtggggcccaccgggactgggatgagcccccaccccggggcggccgcatggatggctggagcggggaccgggcccgggctgctgcccccaccggcctgcagcccccaggctgcaaggaccacggctgcagcagcggcagccccttccgggaccctgctggcagcagcgtcatccgctctggaaaaggagaccggcaggagggccccagcttcctgcggcccccagctgtgacagtgaagaagctgcagaagtggatgtacaagggccgcctgctgagcctgggcatgaagggccgggcccggggcacagcccccaaggtgacaggcacccaggccgccagccccaacgtgggcgccctgaaggtgagagaaaatagagtgctgtctgtgcccccagaccagaggatcaccctgacagacctgtttgaaaatgcctacggcagctccatgaagggccgggagctggaggagctgaaggacaacatcgagttccggggccacaagcccctgaacagcatcaccgtgtccaagaagaggaactggctgtaccagagcaccctgcggcccctgaacctggaggaggagaacaagaagtgccaggacaggagccacctgagcatcagccctgtgtccctgcccaagcaccagctgagccagagcttcctgaagagcagcaaggagtactgcacctacgtggtgtgcaatgccaccaacagcagcctgagcaagaactgtgccctggacttcaatgaagaaaatgatgctgatgatgaaggagagatctggtacaaccccatcccagaagatgatgacctgggcatcagcagcgccctgagctttggagaggccgacagcgctgtgctgaagctgcctgctgtgaacctgtccatgctgagcggcagtgacctgatgaaggccgagcggcacacagaggacagcctgtgcagcagcgagcacgccggggacatccagaccaccaggagcaatggcatgaaccccatccacccagcccacagcacagaatttgtgcagcagtacaagcagaagctgggccacaagacccaggagggcatcatggtggaggacagccccatgctgaagagcccctttgctggcagcggcatcctggccgccaccaacagcacagagctgggcatcatggagcccagcagccccaaccccagccctgtgaagaagggcagcagcatcaactggagcctgcctgacaagatcaagagccccaggacagtgaggaagctgtccatgaagatgaagaagctgcctgagttcagcaggaagctgtctgtgaagggcaccctgaactacatcaacagcccagacaacacccccagcctgagcaagtacaactgccgggaggtgcaccacacagacatcctgcccagcggcaacaccaccacagctgccaagagaaatgtcatcagccgctaccacctggacacctctgtgagcagccagcagagctaccagaagaagaacagcatgagcagcaagtacagctgcaagggcggctacctgagtgatggagacagccctgagctgaccaccaaggccagcaagcacggcagcgagaacaagtttgggaagggcaaggagatcatcagcaacagctgcagcaagaatgaaattgatattgatgccttccgccactacagcttcagtgaccagcccaagtgcagccagtacatcagcggcctgatgtctgtgcacttctatggagctgaggacctgaagcccccaagaattgacagcaaggatgtgttctgtgccatccaggtggacagcgtgaacaaggccaggacagccctgctgacctgcaggaccaccttcctggacatggaccacaccttcaacatcgagattgaaaatgcccagcacctgaagctggtggtgttctcctgggagcccacccccaggaagaacagagtgtgctgccacggcaccgtggtgctgcccaccctcttccgggtgaccaagacccaccagctggccgtgaagctggagccccggggcctcatctacgtgaaggtgaccctgatggagcagtgggagaacagcctgcacggcctggacatcaaccaggagcccatcatcttcggcgtggacatccagaaggtggtggagaaggaaaatattggcctgatggtgcccctgctgatccagaagtgcatcatggagattgagaagaggggctgccaggtggtgggcctgtaccgcctgtgtggcagcgctgctgtgaagaaggagctgcgggaggcctttgagcgggacagcaaggctgtgggcctgtgtgagaaccagtacccagacatcaacgtcatcaccggggtgctgaaggactacctgcgggagctgcccagccccctcatcaccaagcagctgtatgaggccgtgctggatgccatggccaagagccccctgaagatgagcagcaatggctgtgaaaatgaccccggggacagcaagtacacagtggacctgctggactgcctgcctgagattgagaaggccaccctgaagatgctgctggaccacctgaagctggtggccagctaccacgaggtgaacaagatgacctgccagaacctggccgtgtgcttcggccctgtgctgctgagccagaggcaggagcccagcacccacaacaacagagtcttcacagacagcgaggagctggccagcgccctggacttcaagaagcacatcgaggtgctgcactacctgctgcagctgtggcctgtgcagaggctgactgtgaagaagagcacagacaacctcttccctgagcagaagagcagcctgaactacctgcggcagaagaaggagcggccccacatgctgaacctgtctggaacagacagcagcggcgtgctgcggccccggcagaaccggctggacagccccctgagcaacagatatgctggggactggagcagctgtggggagaactacttcctgaacaccaaggagaacctgaatgatgtggactatgatgatgtgcccagcgaggacaggaagatcggggagaactacagcaagatggatggccctgaggtgatgattgagcagcccatccccatgagcaaagaatgtaccttccagacctacctgaccatgcagacagtggagagcacagtggacaggaagaacaacctgaaggacctgcaggagagcattgacaccctcatcggcaacctggagcgggagctgaacaagaacaagctgaacatgtccttctag

SEQ ID NO: 19272 - DNA, 1353 bp, synthetic construct
  source 1..1353: mol_type = other DNA; note = Synthetic coding sequence
atggaccctggaaatgaaaacagcgccacagaggccgccgccatcatcgacctggaccctgactttgagccccagagccggcccaggagctgcacctggcccctgcccaggcctgagatcgccaaccagcccagcgagcccccagaggtggagccagacctgggggagaaggccattgaaagtgcccctgagaagaggctgaccctggcccagatctatgagtggatggtgaggacagtgccctacttcaaggacaagggggacagcaacagcagcgctggctggaagaacagcatccgccacaacctgagcctgcacagcaagttcatcaaggtgcacaatgaggccaccgggaagagctcctggtggatgctgaaccctgagggcggcaagagcggcaaggccccccggcggcgggccgcctccatggacagcagcagcaagctgctgcggggccgcagcaaggcccccaagaagaagcccagcgtgctgcctgcccctcctgagggcgccacccccaccagccctgtgggccactttgccaagtggagcggcagcccctgcagcaggaaccgggaggaggccgacatgtggaccaccttccggcccaggagcagcagcaatgccagctctgtgtccacccggctgagccccctgcggcctgagagcgaggtgctggccgaggagatcccagcctctgtgagcagctatgctgggggcgtgccccccaccctgaatgaaggcctggagctgctggatggcctgaacctgaccagcagccacagcctgctgagccgcagcggcctgagcggcttcagcctgcagcaccctggggtgacaggccccctgcacacctacagcagcagcctcttctccccagctgagggccccctgtctgctggggagggctgcttcagcagcagccaggccctggaggccctgctgaccagtgacaccccacctcctccagcagatgtgctgatgacccaggtggaccccatcctgagccaggcccccaccctgctgctgctgggcggcctgcccagcagcagcaagctggccactggagtgggcctgtgccccaagcccctggaggcccctggccccagcagcctggtgcccaccctgtccatgattgcccctcctcctgtgatggccagcgcccccatccccaaggccctgggcacccctgtgctgaccccacccacagaagctgccagccaggacaggatgccccaggacctggacctggacatgtacatggagaacctggagtgtgacatggacaacatcatcagtgacctgatggatgaaggagagggcctggacttcaactttgagccagacccctag

SEQ ID NO: 19273 - DNA, 1125 bp, synthetic construct
  source 1..1125: mol_type = other DNA; note = Synthetic coding sequence
atggccggctacctgtctgagagtgactttgtgatggtggaggagggcttcagcacccgggacctgctgaaggagctgaccctgggcgccagccaggccaccacagatgaggtggccgccttctttgtggccgacctgggcgccatcgtgaggaagcacttctgcttcctgaagtgcctgccccgggtgcggcccttctatgctgtgaagtgcaacagcagccctggggtgctgaaggtgctggcccagctgggcctgggcttcagctgtgccaacaaggccgagatggagctggtgcagcacatcggcatcccagccagcaagatcatctgtgccaacccctgcaagcagatcgcccagatcaagtatgctgccaagcacggcatccagctgctgagctttgacaatgagatggagctggccaaggtggtgaagagccaccccagcgccaagtttgtgcagcagaggggcacagcctgcctgatccgcatggtgctgtgcatcgccacagatgacagccacagcctgagctgcctgagcctgaagtttggagtgtccctgaagagctgccgccacctgctggagaatgccaagaagcaccacgtggaggtggtgggcgtgtccttccacatcggcagcggctgcccagacccccaggcctatgcccagagcattgctgatgcccggctggtgtttgagatgggcacagagctgggccacaagatgcacgtgctggacctgggcggcggcttccctggaacagagggcgccaaggtgcgctttgaggagatcgccagcgtcatcaacagcgccctggacctgtacttccctgagggctgcggcgtggacatctttgctgagctgggccgctactacgtgaccagcgccttcaccgtggccgtgtccatcatcgccaagaaggaggtgctgctggaccagcccggccgggaggaggagaatggcagcaccagcaagaccatcgtgtaccacctggatgagggcgtgtatggcatcttcaacagcgtgctgtttgacaacatctgccccacccccatcctgcagaagagcaagaaccacagcccctgctacatgagcctggagagcatccacttcatcgctgtgtag

SEQ ID NO: 19274 - DNA, 1629 bp, synthetic construct
  source 1..1629: mol_type = other DNA; note = Synthetic coding sequence
atggacaggagcaagaggaacagcattgctggcttccccccccgggtggagcggctggaggagtttgagggcggcggcggcggggagggcaatgtgtcccaggtgggccgggtgtggcccagcagctaccgggccctgatcagcgccttcagccggctgacccggctggatgacttcacctgtgagaagattggcagcggcttcttcagcgaggtgttcaaggtgcgccaccgggccagcggccaggtgatggccctgaagatgaacaccctgagcagcaacagagccaacatgctgaaggaggtgcagctgatgaaccggctgagccaccccaacatcctgcgcttcatgggcgtgtgtgtgcaccagggccagctgcacgccctgacagagtacatcaacagcggcaacctggagcagctgctggacagcaacctgcacctgccctggacagtgcgggtgaagctggcctatgacattgctgtgggcctgagctacctgcacttcaagggcatcttccaccgggacctgaccagcaagaactgcctgatcaagagagatgaaaatggctacagcgctgtggtggccgactttggcctggccgagaagatcccagatgtgtccatgggcagcgagaagctggccgtggtgggcagccccttctggatggcccctgaggtgctgagagatgagccctacaatgagaaggcagatgtgttctcctatggcatcatcctgtgtgagatcatcgcccgcatccaggccgaccctgactacctgcccaggacagagatggaccccaagctgcggcccagctttgtggagatcggcaagaccctggaggagatcctgagccggctgcaggaggaggagcaggagcgggacaggaagctgcagcccacagcccggggcctgctggagaaggcccctggggtgaagaggctgagcagcctggatgacaagatcccccacaagagcccctgccccaggaggaccatctggctgagccgcagccagagcgacatcttcagcaggaagccacccaggacagtgtctgtgctggacccctactaccggcccagagatggagctgcccggacccccaaggtgaaccccttcagcgcccggcaggacctgatgggcggcaagatcaagttctttgacctgcccagcaagagcgtcatcagcctggtgtttgacctggatgcccctggccctggcaccatgcccctggccgactggcaggagcccctggccccacccatccgccgctggaggagcctgcccggcagccctgagttcctgcaccaggaggcctgcccctttgtgggccgggaggagagcctgagtgatggccccccaccccggctgagcagcctgaagtacagagtgaaggagatcccccccttccgggccagcgccctgcctgctgcccaggcccacgaggccatggactgcagcatcctgcaggaggagaatggatttggcagccggccccagggcaccagcccctgcccagctggggccagcgaggagatggaggtggaggagaggcctgctggcagcaccccagccaccttcagcaccagcggcatcggcctgcagacccagggcaagcaggatggatag

SEQ ID NO: 19275 - DNA, 786 bp, synthetic construct
  source 1..786: mol_type = other DNA; note = Synthetic coding sequence
atgggcagcaggaagaaggagatcgccctgcaggtgaacatcagcacccaggagctgtgggaggagatgctgagcagcaagggcctgactgtggtggatgtgtaccagggctggtgtggcccctgcaagcctgtggtgtccctcttccagaagatgagaattgaggtgggcctggacctgctgcactttgccctgatcaaggatgaggccctgagtgatgaagatgaatgtgtgagccacggcaagaacaacggggaggatgaggacatggtgtcctctgagaggacctgcaccctggccatcatcaagccagatgctgtggcccacggcaagacagatgagatcatcatgaagatccaggaggccggctttgagatcctgaccaatgaggagaggaccatgacagaagctgaggtgcggctcttctaccagcacaaggccggggaggaggcctttgagaagctggtgcaccacatgtgcagcggccccagccacctgctgatcctgaccaggacagagggctttgaagatgtggtgaccacctggaggacagtgatgggcccccgggaccccaacgtggcccggcgggagcagcctgagagcctgcgggcccagtatggaacagagatgcccttcaatgctgtgcacggcagccgggaccgggaggatgctgaccgggagctggccctgctcttccccagcctgaagttcagtgacaaggacacagaggccccccagggcgagagcagcacccagccccggctgaagatcacagacctggactag

SEQ ID NO: 19276 - DNA, 1767 bp, synthetic construct
  source 1..1767: mol_type = other DNA; note = Synthetic coding sequence
atggaggccgcagatgccagccgcagcaatggcagcagccctgaggccagagatgcccggagccccagcggccccagcggcagcctggagaatggcaccaaggcagatggcaaggatgccaagaccaccaacggccacggcggggaggccgctgagggcaagagcctgggcagcgccctgaagccaggagagggccgcagcgccctgtttgctggaaatgagtggaggcggcccatcatccagtttgtggagagcggagatgacaagaacagcaactacttctccatggacagcatggagggcaagaggagcccctatgccggcctgcagctgggcgccgccaagaagccccctgtgacctttgctgagaagggggagctgaggaagagcatcttcagcgagagcaggaagcccaccgtgtccatcatggagcctggagagaccaggaggaacagctaccccagggctgacaccggcctcttcagccgcagcaagagcggcagcgaggaggtgctgtgtgacagctgcatcggcaacaagcagaaggctgtgaagagctgcctggtgtgccaggccagcttctgtgagctgcacctgaagccccacctggagggcgccgccttccgggaccaccagctgctggagcccatccgggactttgaggccaggaagtgccctgtgcacggcaagaccatggagctgttctgccagacagaccagacctgcatctgctacctgtgcatgttccaggagcacaagaaccacagcacagtgacagtggaggaggccaaggccgagaaggagacagagctgagcctgcagaaggagcagctgcagctgaagatcattgaaattgaagatgaagctgagaagtggcagaaggagaaggaccgcatcaagagcttcaccaccaatgagaaggccatcctggagcagaacttccgggacctggtgcgggacctggagaagcagaaggaggaggtgcgggccgccctggagcagcgggagcaggatgctgtggaccaggtgaaggtgatcatggatgccctggatgagcgggccaaggtgctgcacgaggacaagcagacccgggagcagctgcacagcatcagtgacagcgtgctcttcctgcaggagtttggagccctgatgagcaactacagcctgcccccacccctgcccacctaccacgtgctgctggagggggagggcctgggccagagcctgggcaacttcaaggatgacctgctgaatgtgtgcatgagacatgtggagaagatgtgcaaggctgacctgagcaggaacttcattgaaagaaaccacatggagaatggaggagaccaccgctacgtgaacaactacaccaacagctttggaggagagtggagcgccccagacaccatgaagcgctacagcatgtacctgacccccaagggcggcgtgaggaccagctaccagcccagcagccctggccgcttcaccaaggagaccacccagaagaacttcaacaacctgtatggcaccaagggcaactacaccagccgggtgtgggagtacagcagcagcatccagaacagcgacaatgacctgcctgtggtgcagggcagcagcagcttcagcctgaagggctaccccagcctgatgaggagccagagccccaaggcccagccccagacctggaagagcggcaagcagaccatgctgagccactaccggcccttctacgtgaacaagggaaatggcatcggcagcaatgaggccccctag

SEQ ID NO: 19277 - DNA, 3567 bp, synthetic construct
  source 1..3567: mol_type = other DNA; note = Synthetic coding sequence
atgaagaagaagcagacagtgcagggcaccttcagcaagctgtttgggaagaagcacaccaccacccccagcaccagcctgtatgccaccaaccccccctggatcttcacccaggaggcccctgaggagggcactggaggctttgatggcatctactatggagacaaccgcttcaacacagtgtctgagagcggcacagccaccctgaaggcccggccccgggtgcggcccctgctgaccttcctgcccctgaatgcccaggagaaccacggcctggccgtgcccacccccagcgtgcctgatgactttgctgacaaggaggtgacaggcaccagcagcctggtgaatggaaacctgcggctgtacagctctgtgggggacctgcggcccggccagtatggccaggacctgctgatccccccacctcctcctggccctgcccctggccccccccaggacatcagcgagcccccaggcggcagccccctgcccagcccccccagcacagcccctcctcctccacccctgctgctggagcccccacctcctccttccatggcccctcctcctcctcctgtgctggaggccctgagccccccccacaccctgagcagccccagcatccccaccccaccagacttcatccccccagccccacccctggccttcctggcccctcctcctcctcctgtgcctgccccagcccccccagccccagccagcccccacacagtgggcaccaggctcttccccccaggcggcgtgaccaagtggaagagtgatgtggccctgaatggccggcaggccgaggccacccgggccagcccccccaggagccctgctgagcccaagggcagcgccctgggccccaaccctgagccccacctgaccttccccaggagcttcaaggtgcccccacccacccctgtgaggaccagcagcatccctgtgcaggaggcccaggaggcccccaggaaggaggagggcgccaccaagaaggcccccagccggctgcccctgcccccatccttccacatccggcctgccagccaggtgtacccagaccgggcccctgagccagactgccctggagagctgaaggccacagccccagccagcccccggctgggccagagccagagccaggctgatgaaagagctggcaccccacctccagccccacccctgcccccaccagccccacccctgcccccaccagccccacccctgcccccagctgccccacccctgccctgtgcccagaaggccgcccaccccccagctggcttcaccaagacccccaagagcagcagccctgccctgaagcccaagcccaacccccccagcccagaaaatacagccagcagcgcccctgtggactggagggaccccagccagatggagaagctgagaaatgagctggccgcctacctgtgtggcagccggcgggaggaccgcttcctgagccaccggcccggccccaccgtggccccccagagcaaggagggcaagaagggcccccggctgcctgagaaggagaccctgctgagcctgcctgccaaggacaccccacctggggtgcctgagaagagcctgggcggcagcagcctgacagaaacagaggccgcccccagcctgaccctgcccagcgtggactacatcccccaggacagccccacccccagcgtgcggcagatcagaaatgagctggaggcccggctgagcagcgctgctgagaaggaggccaagcccagcatcggcagcctgccccccaagccccggctggagggcggccgcatctgtgaaaatggagcagatgatgacaagctgagcaagcctgtggccaagaacctgcccccccagagcaccaccctgctgcccaccaccagcctgcagcccaaggccatgctgggccctgccatcccccccaaggccaccccagagcccgccatcccccccaaggccaccctgtggccagccaccccacccaaggccaccctgggccctgccacccccctgaaggccaccagcggccccaccacccccctgaaggccaccagcggccctgccatcgccagcacagccaccaccctgcccaccaccaccagccagctgatggccgagaaggacagcggccctgctggccagcctgagaagccagccagccaggaggtgtccacccccagccaggcccggggggagggcagccccagcgaggccacccggctgcccacccagggcgcccggagcagcgctgccttcccccccaagaccagccctgggggcggggaggtgccctgcctgtacaagccccactgccaccagagcagcctgagccgggaggtggccgtggtgatgcccaccctggcccggggcggcgctgctggccctggagagcctgtggaggtgaaggagcccccaggcctgcctgccaagcccccagccagcgcccagcccacagatgagctgctgcggcaccctgtgactggagaggtggtggagcggggcagccccatggccctgctgctggccgcccggcagagggcccagaagggccgctctgtgggcgccgccctgggccgcagcagcctgcccggcagcctgcgggaccacagccaccaggccgaggccagcagtgacagcatcttccacagccagggcacccccaacagcttcaccgtggtgcccaagctgcccaaggaggccgagaaggacagccccctgaccacagagatccccaacaagtggggcccccggctgggcagagatgctgagggcacagagctgagcagaagacacaactggaccaagccagagccccaggcccctgtggcctgggagcgggtggcccccagcaacctgccccagggccaccccctgcccaagagcttcagcagcccccccagccccagcaacaagcgggaggaggaggaggaggagttcaactttgaagtcatccccccacctcctgagttcagcaatgaccctgagcccccagccccagccctgcagtacctgggccggcagagcagcccccccaggaacaactacagcgacctgcggcagctgcccaatgccggccctggggcccccccagccctgggcttcagccgcttccctgctggggcccgctatgctggggccggcggcctggagcgcttcagcggcggcggccgcagcctcatcaagaagaggctgtatgtgggggagccccaccggggccctggcctgccccatggaggcaccggccgcagcctgagcagccccaactgcttcggcccccagcccggcggccctgagatgagaagagtgaacagcgctggccgggcccctcctgggggcctgcacgccccccggctgagcctggagggcgccgcccggggagctgctgaggccaagcacaaggcccctggcagcgctgactatggctttgccccagctgctggccgcagcccctacaccaccaccaggtatggcagccccatcaacaccttcaccgtgcggcccggcaccaggcaccccatctcctatgtgtgcagcggggcccacaggaaggccaccagctag

SEQ ID NO: 19278 - DNA, 2598 bp, synthetic construct
  source 1..2598: mol_type = other DNA; note = Synthetic coding sequence
atggctgtggcccgggtggatgctgccctgcccccaggagagggctctgtggtgaactggagcggccagggcctgcagaagctgggccccaacctgccctgtgaggccgacatccacaccctcatcctggacaagaaccagatcatcaagctggagaacctggagaagtgcaagaggctcatccagctgtctgtggccaacaaccggctggtgaggatgatgggcgtggccaagctgaccctgctgcgggtgctgaacctgccccacaacagcatcggctgtgtggagggcctgaaggagctggtgcacctggagtggctgaacctggccggcaacaacctgaaggccatggagcagatcaacagctgcacagccctgcagcacctggacctgagtgacaacaacatcagccagattggagacctgagcaagctggtgtccctgaagaccctgctgctgcacggcaacatcatcaccagcctgaggatggccccagcctacctgcccaggagcctggccatcctgagcctggctgaaaatgagatccgggacctgaatgagatctccttcctggccagcctgacagagctggagcagctgagcatcatgaacaacccctgtgtgatggccacccccagcatccctggctttgactaccggccctacatcgtgtcctggtgcctgaacctgcgggtgctggatggctacgtgatcagccagaaggagagcctgaaggccgagtggctgtacagccagggcaagggccgggcctaccggcccggccagcacatccagctggtgcagtacctggccaccgtgtgccccctgaccagcaccctgggcctgcagacagcagaagatgccaagctggagaagatcctgagcaagcagcgcttccaccagaggcagctgatgaaccagagccagaatgaggagctgagccccctggtgcctgtggagacccgggccagcctcatccctgagcacagcagccctgtgcaggactgccagatcagccaggagagcgagcccgtcatccaggtgaacagctgggtgggcatcaacagcaatgatgaccagctgtttgctgtgaagaacaacttccctgcctctgtgcacaccacccgctacagcagaaatgacctgcacctggaggacatccagacagatgaggacaagctgaactgcagcctgctgagcagcgagagcaccttcatgcctgtggccagcggcctgagccccctgagccccaccgtggagctgcggctgcagggcatcaacctgggcctggaggatgatggagtggctgatgaatctgtgaagggcctggagagccaggtgctggacaaggaggaggagcagcccctgtgggccgccaatgaaaattctgtgcagatgatgaggtctgagatcaacacagaggtgaatgagaaggccggcctgctgccctgcccagagcccaccatcatcagcgccatcctgaaggatgacaaccacagcctgaccttcttccctgagagcacagagcagaagcagagcgacatcaagaagccagagaacacccagcctgagaacaaggagaccatcagccaggccaccagcgagaagctgcccatgatcctgacccagaggtctgtggccctgggccaggacaaggtggccctgcagaagctgaatgatgctgccaccaagctgcaggcctgctggaggggcttctacgccaggaactacaacccccaggccaaggatgtgcgctatgagatccggctgcggaggatgcaggagcacatcgtgtgcctgacagatgagatccggcggctgaggaaggagagagatgaggagcgcatcaagaagtttgtgcaggaggaggccttccgcttcctgtggaaccaggtgcgcagcctgcaggtgtggcagcagacagtggaccagaggctgagctcctggcacacagatgtgccccccatcagcagcaccctggtgcccagcaagcaccccctcttcacccagagccaggagagcagctgtgaccagaatgctgactggttcatcgccagtgatgtggccccccaggagaagagcctgcctgagttcccagattctggcttccacagcagcctgacagagcaggtgcacagcctgcagcacagcctggactttgagaagagcagcacagagggcagcgagagcagcatcatgggcaacagcattgacacagtgcgctatggcaaggagagtgacctgggagatgtgtctgaggagcacggggagtggaacaaggagagcagcaacaatgagcaggacaacagcctgctggagcagtacctgacctctgtgcagcagctggaggatgctgatgagaggaccaactttgacacagagacccgggacagcaagctgcacatcgcctgcttccctgtgcagctggacaccctgagtgatggagcctctgtggatgagagccacggcatcagcccccccctgcagggcgagatcagccagacccaggagaacagcaagctgaatgctgaggtgcagggccagcagccagaatgtgacagcaccttccagctgctgcacgtgggcgtgacagtgtag

SEQ ID NO: 19279 - DNA, 1275 bp, synthetic construct
  source 1..1275: mol_type = other DNA; note = Synthetic coding sequence
atgtctgtgggctgcccagagcctgagccccccaggagcctgacctgctgcggccctggaacagcccctggccctggagctggggtgcccctgctgacagaggacatgcaggccctgaccctgcggaccctggccgccagtgatgtgaccaagcactatgagctggtgcgggagctgggcaagggcacctacggcaaggtggacctggtggtgtacaagggcaccggcaccaagatggccctgaagtttgtgaacaagagcaagaccaagctgaagaacttcctgcgggaggtgtccatcaccaacagcctgagcagcagccccttcatcatcaaggtgtttgatgtggtgtttgaaacagaggactgctacgtgtttgcccaggagtatgccccagctggggacctgtttgacatcatccccccccaggtgggcctgcctgaggacacagtgaagagatgtgtgcagcagctgggcctggccctggacttcatgcacggccggcagctggtgcaccgggacatcaagccagaaaatgtgctgctgtttgaccgggagtgccggcgggtgaagctggccgactttggcatgaccaggagagtgggctgccgggtgaagagggtgtctggcaccatcccctacacagcccctgaggtgtgccaggccggccgggcagatggcctggccgtggacaccggggtggatgtgtgggcctttggagtgctgatcttctgtgtgctgaccggcaacttcccctgggaggccgccagcggggctgatgccttctttgaggagtttgtgcgctggcagaggggccgcctgcccggcctgcccagccagtggaggcgcttcacagagcccgccctgaggatgttccagaggctgctggccctggagcctgagcggcggggccctgccaaggaggtgttccgcttcctgaagcatgagctgaccagcgagctgcggcggcggcccagccaccgggccaggaagcccccaggggacaggcctcctgctgctggccccctgcggctggaggcccctggccccctgaagaggacagtgctgacagaaagtggcagcggcagcaggcctgcccctcctgctgtgggctctgtgcccctgcctgtgcctgtgcctgtgcctgtgcctgtgcctgtgcctgtgcctgagcccggcctggccccccagggccccccaggccgcacagatggccgggctgacaagagcaagggccaggtggtgctggccacagccatcgagatctgtgtgtag

SEQ ID NO: 19280 - DNA, 1632 bp, synthetic construct
  source 1..1632: mol_type = other DNA; note = Synthetic coding sequence
atggccacccggcggctgggcgtgggggagaccctgggcgccctgaatgctgccctgggccctgggggccctgtgtggatcaaggagaccaggaccaggcacctgcggagccgggacttcctggccccccaccgggccctgcaggccaggtttgatgatggccaggtgcctgagcacctgctgcacgccctggcctgcctgcagggccctggggtggcccctgtgctgcgctgtgcccccaccccagctggcctgagcctgcagctgcagaggtctgctgtgtttgagcgggtgctgtctgctgtggccgcctatgccaccccagccagccctgccagcctgggccagagggtgctgctgcactgcccagccctgcggagcagcccctgtgccctgcggctgagccagctgaggacagtgctggtggccgaccacctggcccgggccctgcgggcccatggagtgtgtgtgcggctggtgcctgctgtgcgggacccccacatgctgaccttcctgcagcagctgcgggtggactggccagctgccagcgagcgggccagcagccacaccctgcggagccacgccctggaggagctgaccagcgccaatgatggccgcaccctgagccctggcatcctgggccgcctgtgcctgaaggagctggtggaggagcagggccgcacagctggctatgaccccaacctggacaactgcctggtgacagaggacctgctgtctgtgctggccgagctgcaggaggccctgtggcactggccagaggacagccaccctggcctggccggggccagtgacaccggcaccggcggctgcctggtggtgcacgtggtgtcctgtgaggaggagttccagcagcagaagctggacctgctgtggcagaagctggtggacaaggcccccctgcggcagaagcacctgatctgtggccctgtgaaggtggccggggcccctggcaccctgatgacagcccctgagtactatgagttccgccacacccaggtgtgcaaggccagcgccctgaagcacggcggggacctggcccaggaccctgcctggacagagatcttcggcgtgctgtctgtggccaccatcaagtttgagatgctgagcacagccccccagagccagctgttcctggccctggccgacagcagcatcagcaccaagggcaccaagagcggcacctttgtgatgtacaactgtgcccggctggccaccctgtttgagagctacaagtgcagcatggagcagggcctgtaccccaccttcccccctgtgagcagcctggacttcagcctgctgcatgatgaaggagagtggctgctgctcttcaacagcatcctgcccttcccagacctgctgagcaggacagctgtgctggactgcacagcccctggcctgcacatcgctgtgaggacagagatgatctgcaagttcctggtgcagctgtccatggacttcagcagctactacaacagagtgcacatcctgggggagccccggccccacctgtttggccagatgtttgtgcggctgcagctgctgcgggctgtgcgggaggtgctgcacacaggcctggccatgctgggcctgccccccctgagccacatctag

SEQ ID NO: 19281 - DNA, 1353 bp, synthetic construct
  source 1..1353: mol_type = other DNA; note = Synthetic coding sequence
atgggcaagagctttgccaacttcatgtgcaagaaggacttccacccagccagcaagagcaacatcaagaaggtgtggatggccgagcagaagatctcctatgacaagaagaagcaggaggagctgatgcagcagtacctgaaggagcaggagagctatgacaaccggctgctgatgggagatgagcgggtgaagaatggcctgaacttcatgtatgaggcccctcctggggccaagaaggagaacaaggagaaggaggagacagaaggagaaacagagtacaagtttgagtggcagaagggggccccccgggagaagtatgccaaggatgacatgaacatccgggaccagcccttcggcatccaggtgagaaatgtgcgctgcatcaagtgccacaagtggggccacgtgaacacagaccgggagtgccccctgtttggcctgagcggcatcaatgccagctctgtgcccacagatggcagcggccccagcatgcaccccagcgagctgattgctgagatgagaaattctggctttgccctgaagagaaatgtgctgggcaggaacctgacagccaatgaccccagccaggagtatgtggccagcgagggggaggaggaccctgaggtggagttcctgaagagcctgaccaccaagcagaagcagaagctgctgaggaagctggaccggctggagaagaagaagaagaagaaggacaggaagaagaagaagttccagaagagccgcagcaagcacaagaagcacaagagcagcagcagcagcagcagcagcagcagcagcagcagcagcacagagaccagcgagagcagcagcgagagcgagagcaacaacaaggagaagaagatccagaggaagaagaggaagaagaacaagtgcagcggccacaacaacagcgacagcgaggagaaggacaagagcaagaagaggaagctgcacgaggagctgagcagcagccaccacaaccgggagaaggccaaggagaagccccgcttcctgaagcatgagagcagccgggaggacagcaagtggagccacagcgacagcgacaagaagagcaggacccacaagcacagccctgagaagaggggcagcgagaggaaggagggcagcagccgcagccacggccgggaggagaggagccgccgcagccgcagccgcagccctggcagctacaagcagcgggagaccaggaagagggcccagagaaatcctggagaggagcagagcagaagaaatgacagccgcagccacggcacagacctgtacagaggagagaagatgtaccgggagcaccctgggggcacccacaccaaggtgacccagcgggagtag

SEQ ID NO: 19282 - DNA, 1152 bp, synthetic construct
  source 1..1152: mol_type = other DNA; note = Synthetic coding sequence
atgagccctgaggtggccctgaaccgcatcagccccatgctgagccccttcatcagctctgtggtgagaaatggcaaggtgggcctggatgccaccaactgcctgcgcatcacagacctgaagagcggctgcaccagcctgaccccaggccccaactgtgaccgcttcaagctgcacatcccctatgctggggagaccctgaagtgggacatcatcttcaatgcccagtacccagagctgcccccagacttcatctttggagaagatgctgagttcctgcctgaccccagcgccctgcagaacctggcctcctggaaccccagcaacccagaatgtctgctgctggtggtgaaggagctggtgcagcagtaccaccagttccagtgcagccggctgcgggagagcagccggctgatgtttgagtaccagaccctgctggaggagccccagtatggagagaacatggagatctatgccggcaagaagaacaactggacaggagagttcagcgcccgcttcctgctgaagctgcctgtggacttcagcaacatccccacctacctgctgaaggatgtgaatgaagaccccggggaggatgtggccctgctgtctgtgtcctttgaggacacagaggccacccaggtgtaccccaagctgtacctgagccccagaattgaacatgccctgggcggcagcagcgccctgcacatcccagccttccctgggggcggctgcctgattgattatgtgccccaggtgtgccacctgctgaccaacaaggtgcagtatgtgatccagggctaccacaagagaagagagtacatcgccgccttcctgagccacttcggcaccggggtggtggagtatgatgctgagggcttcaccaagctgaccctgctgctgatgtggaaggacttctgcttcctggtgcacatcgacctgcccctcttcttcccccgggaccagcccaccctgaccttccagagcgtgtaccacttcaccaacagcggccagctgtacagccaggcccagaagaactacccctacagcccccgctgggatggaaatgagatggccaagagggccaaggcctacttcaagacctttgtgccccagttccaggaggccgcctttgccaacgggaagctgtag

SEQ ID NO: 19283 - DNA, 675 bp, synthetic construct
  source 1..675: mol_type = other DNA; note = Synthetic coding sequence
atgcccaacagatgtggcatcatccacgtgcggggccccatgccacccaaccgcatcagccatggagaggtgctggagtggcagaagacctttgaggagaagctgacccccctgctgtctgtgcgggagagcctgtctgaggaggaggcccagaagatgggcaggaaggaccctgagcaggaggtggagaagtttgtgaccagcaacacccaggagctgggcaaggacaagtggctgtgccccctgagcggcaagaagttcaagggccctgagtttgtgaggaagcacatcttcaacaagcacgccgagaagattgaggaggtgaagaaggaggtggccttcttcaacaacttcctgacagatgccaagaggcctgccctgcctgagatcaagccagcccagcccccaggccctgcccagatcctgcccccaggcctgaccccaggcctgccctacccccaccagaccccccagggcctgatgccctacggccagccccggccccccatcggcctgtggagctggtgctgccccccctgcagcccccaggaggccctgcacacccccatgcccaggatggtgctggtggagggcaccatgatgcccagcgaggcccgggaggtgatcctgggcaacctggccaccggctggtttgtggagacccagggcccctag

SEQ ID NO: 19284 - DNA, 4806 bp, synthetic construct
  source 1..4806: mol_type = other DNA; note = Synthetic coding sequence
atggaggccggctctgtggtgcgggccatctttgacttctgccccagcgtgtctgaggagctgcccctgtttgtgggggacatcatcgaggtgctggccgtggtggatgagttctggctgctgggcaagaaggaggatgtgacaggccagttccccagcagctttgtggagatcgtgaccatccccagcctgaaggagggggagcggctgtttgtgtgcatctgtgagttcaccagccaggagctggacaacctgcccctgcacagaggagacctggtgatcctggatggcatccccacagctggctggctgcagggccgcagctgctggggcgcccggggcttcttccccagcagctgtgtgcgggagctgtgcctgagcagccagagccggcagtggcacagccagagcgccctcttccagatccctgagtacagcatgggccaggcccgggccctgatgggcctgagcgcccagctggatgaggagctggacttccgggagggagatgtgatcaccatcattggagtgcctgagcccggctggtttgaaggagagctggagggccggcggggcatcttccctgagggctttgtggagctgctgggccccctgaggacagtggatgaatctgtgagcagcggcaaccaggatgactgcatcgtgaatggagaggtggacacccctgtgggggaggaggagattggaccagatgaagatgaggaggagcccggcacctatggagtggccctgtaccgcttccaggccctggagcccaatgagctggactttgaggtgggggacaagatccgcatcctggccaccctggaggatggctggctggagggcagcctgaagggccgcacaggcatcttcccctacagatttgtgaagctgtgcccagacaccagggtggaggagaccatggccctgccccaggagggcagcctggcccgcatccctgagaccagcctggactgcctggagaacaccctgggcgtggaggagcagagacatgagaccagtgaccacgaggccgaggagccagactgcatcatcagcgaggcccccaccagccccctgggccacctgaccagtgaatatgacacagacaggaacagctaccaggatgaggacacagctgggggcccccccaggagccctggggtggagtgggagatgcccctggccacagacagccccaccagtgaccccacagaggtggtgaatggcatcagcagccagccccaggtgcccttccaccccaacctgcagaagagccagtactacagcacagtgggcggcagccacccccacagcgagcagtacccagacctgctgcccctggaggcccggacccgggactatgccagcctgccccccaagaggatgtacagccagctgaagaccctgcagaagcctgtgctgcccctgtaccggggcagctctgtgtctgccagccgggtggtgaagccccggcagagcagcccccagctgcacaacctggccagctacaccaagaagcaccacaccagctctgtgtacagcatcagcgagcggctggagatgaagccaggcccccaggcccagggcctggtgatggaggccgccacccacagccagggagatggcagcacagacctggacagcaagctgacccagcagctgattgaatttgagaagagcctggccggccctggaacagagccagacaagatcctgcggcacttcagcatcatggacttcaacagcgagaaggacatcgtgcggggcagcagcaagctgatcacagagcaggagctgcctgagaggaggaaggccctgcggcccccaccaccccggccctgcacccctgtgtccaccagcccccacctgctggtggaccagaacctgaagccagccccacccctggtggtgcggcccagcaggcctgcccccctgccccccagcgcccagcagaggaccaatgctgtgagccccaagctgctgagccgccaccggcccacctgtgagaccctggagaaggagggccctggccacatgggccgcagcctggaccagaccagcccctgccccctggtgctggtgcgcatcgaggagatggagcgggacctggacatgtacagccgggcccaggaggagctgaacctgatgctggaggagaagcaggatgagagcagcagagctgagaccctggaggacctgaagttctgtgagagcaacatcgagagcctgaacatggagctgcagcagctgcgggagatgaccctgctgagcagccagagcagcagcctggtggcccccagcggctctgtgtctgcagaaaatcctgagcagaggatgctggagaagagggccaaggtgattgaggagctgctgcagacagagcgggactacatccgggacctggagatgtgcatcgagcgcatcatggtgcccatgcagcaggcccaggtgcccaacatcgactttgagggcctgtttggaaacatgcagatggtgatcaaggtgtccaagcagctgctggccgccctggagatcagtgatgctgtgggccctgtgttcctgggccacagagatgagctggagggcacctacaagatctactgccagaaccatgatgaggccatcgccctgctggagatctatgagaaggatgagaagatccagaagcacctgcaggacagcctggccgacctgaagagcctgtacaatgagtggggctgcaccaactacatcaacctgggcagcttcctgatcaagcctgtgcagagggtgatgagataccccctgctgctgatggagctgctgaacagcaccccagagagccacccagacaaggtgcccctgaccaatgctgtgctggccgtgaaggagatcaacgtgaacatcaatgagtacaagaggaggaaggacctgggcaagaacagcatcatcgccgagaaggagtatgcccatgctgaggagagcgccttcctgacctacagcctggtgctgaagtacagaaaaggagatgaggacagcctgatggagaagatcagcaagctgaacatccacagcatcatcaagaagagcaacagagtgagcagccacctgaagcacctgaccggctttgccccccagatcaaggatgaggtgtttgaggagacagagaagaacttcaggatgcaggagcggctcatcaagagcttcatccgggacctgagcctgtacctgcagcacatccgggagagcgcctgtgtgaaggtggtggccgctgtgtccatgtgggatgtgtgcatggagcggggccaccgggacctggagcagtttgagcgggtgcaccgctacatcagtgaccagctgttcaccaacttcaaggagaggacagagcggctggtgatcagccccctgaaccagctgctgtccatgttcaccggcccccacaagctggtgcagaagagatttgacaagctgctggacttctacaactgcacagagcgggcagagaagctgaaggacaagaagaccctggaggagctgcagagcgccaggaacaactatgaggccctgaatgcccagctgctggatgagctgcccaagttccaccagtatgcccagggcctcttcaccaactgtgtgcacggctatgcagaggcccactgtgactttgtgcaccaggccctggagcagctgaagcccctgctgagcctgctgaaggtggccggccgggagggcaacctgattgccatcttccacgaggagcacagccgggtgctgcagcagctgcaggtgttcaccttcttccctgagagcctgcctgccaccaagaagccctttgagaggaagaccatcgaccggcagagcgccaggaagcccctgctgggcctgcccagctacatgctgcagagcgaggagctgcgggccagcctgctggcccgctacccacctgagaagctgttccaggccgagaggaacttcaatgctgcccaggacctggatgtgtccctgctggagggggacctggtgggcgtcatcaagaagaaggaccccatgggcagccagaaccgctggctgattgacaatggagtgaccaagggctttgtgtacagcagcttcctgaagccctacaaccccaggaggagccacagtgatgcctctgtgggcagccacagcagcacagaaagtgaacatggcagcagcagcccccgcttcccccggcagaacagcggcagcaccctgaccttcaaccccagctccatggctgtgtccttcaccagcggcagctgccagaagcagccccaggatgccagccccccacccaaggaatgtgaccagggcaccctgagcgccagcctgaaccccagcaacagcgagagcagccccagccgctgccccagcgaccctgacagcaccagccagcccaggtctggggacagcgcagatgtggccagagatgtgaagcagcccacagccacccccaggagctacagaaacttccgccaccctgagatcgtgggctacagcgtgcccggcagaaatggccagagccaggacctggtgaagggctgtgccaggacagcccaggccccagaagatagaagcacagagccagatggcagcgaggccgagggcaaccaggtgtactttgctgtgtacaccttcaaggccaggaaccccaatgagctgtctgtgtctgccaaccagaagctgaagatcctggagttcaaggatgtgactggaaacacagagtggtggctggccgaggtgaatggcaagaagggctacgtgcccagcaactacatcaggaagacagagtacacctag

SEQ ID NO: 19285 - DNA, 1596 bp, synthetic construct
  source 1..1596: mol_type = other DNA; note = Synthetic coding sequence
atgaagtgccactatgaggccctgggcgtgagaagagatgccagcgaggaggagctgaagaaggcctacaggaagctggccctgaagtggcacccagacaagaacctggacaatgctgctgaggccgctgagcagttcaagctgatccaggccgcctatgatgtgctgagtgacccccaggagcgggcctggtatgacaaccaccgggaggccctgctgaagggcggctttgatggagagtaccaggatgacagcctggacctgctgcgctacttcaccgtgacctgctacagcggctatggagatgatgagaagggcttctacacagtgtacagaaatgtgtttgagatgattgccaaggaggagctggagagcgtgctggaggaggaggtggatgacttccccacctttggagacagccagagcgactatgacacagtggtgcaccccttctacgcctactggcagagcttctgcacccagaagaactttgcctggaaggaggagtatgacacccggcaggccagcaaccgctgggagaagagggccatggagaaggagaacaagaagatccgggacaaggccaggaaggagaagaatgagctggtgcggcagctggtggccttcatcaggaagagggacaagagggtgcaggcccacaggaagctggtggaggagcagaatgctgagaaggccaggaaggccgaggagatgaggcggcagcagaagctgaagcaggccaagctggtggagcagtaccgggagcagagctggatgaccatggccaacctggagaaggagctgcaggagatggaggcccgctatgagaaggagtttggagatggcagtgatgaaaatgagatggaggagcacgagctgaaggatgaagaagatggcaaggacagtgatgaagcagaagatgctgagctgtatgatgacctgtactgcccagcctgtgacaagagcttcaagacagagaaggccatgaagaaccacgagaagagcaagaagcaccgggagatggtggccctgctgaagcagcagctggaggaggaggaggagaacttcagccggccccagattgatgagaaccccctggatgacaacagcgaggaggagatggaggatgcccccaagcagaagctgagcaagaagcagaagaagaagaagcagaagccagcccagaactatgatgacaacttcaacgtgaatggacctggagaaggagtgaaggtggaccctgaggacaccaacctgaaccaggacagcgccaaggagctggaggacagcccccaggagaatgtgtctgtgacagagatcatcaagccctgtgatgaccccaagtctgaggccaagtctgtgcccaagcccaagggcaagaagaccaaggacatgaagaagcctgtgcgggtgcctgctgagccccagaccatgtctgtgctgatcagctgcaccacctgccacagcgagttccccagcaggaacaagctgtttgaccacctgaaggccaccggccacgcccgggcccccagcagcagcagcctgaacagcgccaccagcagccagagcaagaaggagaagaggaagaacagatag

SEQ ID NO: 19286 - DNA, 1353 bp, synthetic construct
  source 1..1353: mol_type = other DNA; note = Synthetic coding sequence
atggtggtgcaggccgctgtggcccccaacagaagccagaggctgctgctgaagatcccctacggcagcctgcggcggcgctctgtggagaggatgacagagggccgccgctgccaggtgcacctgctggatgacaggaagctggagctgctggtgcagcccaagctgctggccaaggagctgctggacctggtggccagccacttcaacctgaaggagaaggagtactttggaattgccttcacagatgaaacaggccacctgaactggctgcagctggacagaagagtgctggagcatgacttccccaagaagagcggccctgtggtgctgtacttctgtgtgcgcttctacatcgagagcatctcctacctgaaggacaatgccaccatcgagctgttcttcctgaatgccaagagctgcatctacaaggagctgattgatgtggacagcgaggtggtgtttgagctggccagctacatcctgcaggaggccaagggggacttcagcagcaatgaggtggtgcggagtgacctgaagaagctgcctgccctgcccacccaggccctgaaggagcaccccagcctggcctactgtgaggacagagtcatcgagcactacaagaagctgaatggccagacccggggccaggccatcgtgaactacatgagcatcgtggagagcctgcccacctacggcgtgcactactatgctgtgaaggacaagcagggcatcccctggtggctgggcctgagctacaagggcatcttccagtatgactaccatgacaaggtgaagcccaggaagatcttccagtggaggcagctggagaacctgtacttccgggagaagaagttctctgtggaggtgcatgacccccggcgggcctctgtgaccaggaggaccttcggccacagcggcattgctgtgcacacctggtacgcctgcccagccctgatcaagagcatctgggccatggccatcagccagcaccagttctacctggacaggaagcagagcaagagcaagatccacgccgcccggagcctgtctgaaattgccatcgacctgacagagaccggcaccctgaagaccagcaagctggccaacatgggcagcaagggcaagatcatcagcggcagcagcggcagcctgctgagcagcggccggcagaggcctgctgggggcaccccacctgagcacggctgggaccccaggggggaccccggccgctggggcgagctgcagctgggccgcctgcagggcaagctgctgcagagctggctgtgcttcccagaccagggctgggaccccaatgccaacctgaggaagctgctgcccggcatcaagtag

SEQ ID NO: 19287 - DNA, 1020 bp, synthetic construct
  source 1..1020: mol_type = other DNA; note = Synthetic coding sequence
atggagggggagcccccacctgtggaggagcggcggcggctgcaggaggagctgaatgaatttgtggagagcggctgcaggaccctggaggaggtgacagccagcctgggctgggacctggacagcctggaccctggagaggaggaggccgcagaagatgaggtggtgatctgcccctatgacagcaaccaccacatgcccaagagcagcctggccaagcacatggccagctgccgcctgaggaagatgggctacaccaaggaggaggaggatgagatgtacaaccctgagttcttctatgaaaatgtgaagatccccagcatcaccctgaacaaggacagccagttccagatcatcaagcaggccaggacagctgtgggcaaggacagcgactgctacaaccagaggatctacagcagcctgcctgtggaggtgcccctgaaccacaagagatttgtgtgtgacctgacccaggccgaccggctggccctgtatgactttgtggtggaggagaccaagaagaagagaagtgacagccagatcattgaaaatgacagcgacctgtttgtggacctggccgccaagatcaaccaggacaacagcaggaagagccccaagagctacctggagatcctggccgaggtgcgggactacaagagaagacggcagagctaccgggccaagaatgtgcacatcaccaagaagagctacacagaggtgatcagagatgtgatcaacgtgcacatggaggagctgagcaaccactggcaggaggagcaggagaaggccgaggatgatgctgagaagaatgaggagaggagaagtgcctctgtggacagccggcagagcggcggcagctacctggatgctgaatgtagccgccaccggcgggacaggagccgcagcccccacaagaggaagaggaacaaggacaaggacaagaactgtgagagcagaagaaggaaggagagagatggagagcggcaccacagccacaagaggaggaagcagaagatctag

SEQ ID NO: 19288 - DNA, 6810 bp, synthetic construct
  source 1..6810: mol_type = other DNA; note = Synthetic coding sequence
atggccgagcccagcagcgcccggcggcctgtgcccctcatcgagagcgagctgtacttcctgattgcccgctacctgtctgctggcccctgccggcgggccgcccaggtgctggtgcaggagctggagcagtaccagctgctgcccaagaggctggactgggagggcaatgagcacaacagaagctatgaggagctggtgctgagcaacaagcacgtggccccagaccacctgctgcagatctgccagagaattggccccatgctggacaaggagatcccccccagcatcagccgggtgaccagcctgctgggcgccggccggcagagcctgctgaggacagccaaggactgccgccacacagtgtggaagggcagcgcctttgctgccctgcaccggggccggcccccagagatgcctgtgaactacggcagcccccccaacctggtggagatccaccggggcaagcagctgaccggctgcagcaccttcagcacagccttccctggcaccatgtaccagcacatcaagatgcaccggcgcatcctgggccacctgtctgctgtgtactgtgtggcctttgacagaacaggccaccgcatcttcaccggcagtgatgactgcctggtgaagatctggagcacccacaacggccgcctgctgagcaccctgcggggccacagcgctgagatcagtgacatggctgtgaactatgagaacaccatgattgctgctggcagctgtgacaagatcatccgggtgtggtgcctgcggacctgtgcccctgtggccgtgctgcagggccacacaggcagcatcaccagcctgcagttcagccccatggccaagggcagccagcgctacatggtgtccactggagcagatggcaccgtgtgcttctggcagtgggacctggagagcctgaagttcagcccccggcccctgaagttcacagagaagcccaggcctggggtgcagatgctgtgcagcagcttctctgtgggcggcatgttcctggccaccggcagcacagaccacgtgatccgcatgtacttcctgggctttgaggcccctgagaagattgctgagctggagagccacacagacaaggtggacagcatccagttctgcaacaatggagaccgcttcctgagcggcagcagagatggaacagcccgcatctggaggtttgagcagctggagtggaggagcatcctgctggacatggccacccgcatcagcggggacctgagcagcgaggaggagcgcttcatgaagcccaaggtgaccatgattgcctggaaccagaatgacagcatcgtggtgacagctgtgaatgaccacgtgctgaaggtgtggaacagctacacaggccagctgctgcacaacctgatgggccacgcagatgaggtgtttgtgctggagacccacccctttgacagccgcatcatgctgtctgctggccatgatggcagcatcttcatctgggacatcaccaagggcaccaagatgaagcactacttcaacatgattgagggccagggccacggggctgtgtttgactgcaagttcagccaggacggccagcactttgcctgcacagacagccacggccacctgctgatctttggatttggctgcagcaagccctatgagaagatcccagaccagatgttcttccacacagactaccggcccctcatccgggacagcaacaactacgtgctggatgagcagacccagcaggccccccacctgatgcccccacccttcctggtggatgtggatggcaacccccaccccaccaagtaccagaggctggtgcccggccgggagaacagcgcagatgagcacctgatcccccagctgggctacgtggccaccagtgatggagaggtgattgagcagatcatcagcctgcagaccaatgacaatgatgagaggagccctgagagcagcatcctggatggcatgatccggcagctgcagcagcagcaggaccagaggatgggcgctgaccaggacaccatcccccggggcctgagcaatggagaggagaccccaagaagaggcttccggcggctgagcctggacatccagagcccccccaacatcggcctgcggcgcagcggccaggtggagggcgtgcggcagatgcaccagaatgcccccaggagccagatcgccacagagcgggacctgcaggcctggaagagaagagtggtggtgcctgaggtgcccctgggcatcttcaggaagctggaggacttccggctggagaagggggaggaggagaggaacctgtacatcattggaaggaagaggaagaccctgcagctgagccacaagagtgacagcgtggtgctggtgtcccagagccggcagaggacctgcaggaggaagtaccccaactatggaagaagaaacagatcctggagggagctgagcagtggaaatgaaagcagcagctctgtgagacatgagaccagctgtgaccagagcgagggcagcggcagcagcgaggaggatgagtggaggagtgacaggaagtctgagagctacagcgagagcagcagtgacagcagcagccgctacagcgactggacagcagatgctggcatcaacctgcagccccccctgcggaccagctgcagaagacgcatcacccgcttctgcagcagcagtgaagatgagatcagcacagagaacctgagcccccccaagagaagaaggaagaggaagaaggagaacaagcccaagaaggagaacctgcggaggatgaccccagctgagctggccaacatggagcacctgtatgagttccacccccctgtgtggatcacagacaccaccctgaggaagagcccctttgtgccccagatgggagatgaagtcatctacttccggcagggccacgaggcctacatcgaggccgtgagaagaaacaacatctatgagctgaaccccaacaaggagccctggaggaagatggacctgcgggaccaggagctggtgaagatcgtgggcatccgctatgaggtgggcccccccaccctgtgctgcctgaagctggccttcattgatcctgccaccgggaagctgatggacaagagcttcagcatccgctaccatgacatgccagatgtgattgacttcctggtgctgcggcagttctatgatgaggcccggcagaggaactggcagagctgtgaccgcttccgcagcatcattgatgatgcctggtggtttggaacagtgctgagccaggagccctaccagccccagtacccagacagccacttccagtgctacatcgtgcgctgggacaacacagaaattgagaagctgagcccctgggacatggagcccatcccagacaacgtggaccccccagaggagctgggcgccagcatctctgtgaccacagatgagctggagaagctgctgtacaagccccaggccggggagtggggccagaagagcagagatgaagaatgtgaccgcatcatctctggaattgaccagctgctgaacctggacattgctgctgcctttgctggccctgtggacctgtgcacctaccccaagtactgcaccgtggtggcctaccccacagacctgtacaccatccgcatgaggctggtgaaccgcttctaccgccgcctgagcgccctggtgtgggaggtgcgctacatcgagcacaatgcccggaccttcaatgaacctgagagcgtcatcgcccggagcgccaagaagatcacagaccagctgctgaagttcatcaagaaccagcactgcaccaacatcagcgagctgagcaacaccagtgaaaatgatgagcagaatgctgaggacctggatgacagcgacctgcccaagaccagcagcggcagaagaagagtgcatgatggcaagaagagcatccgggccaccaactacgtggagagcaactggaagaagcagtgcaaggagctggtgaacctgatcttccagtgtgaagattctgagcccttccggcagcctgtggacctggtggagtacccagactacagagacatcatcgacacccccatggactttggcaccgtgcgggagaccctggatgctggcaactatgacagccccctggagttctgcaaggacatccgcctcatcttcagcaatgccaaggcctacacccccaacaagaggagcaagatctacagcatgaccctgcggctgagcgccctgtttgaggagaagatgaagaagatcagcagtgacttcaagattggccagaagttcaatgagaagctgcggcgcagccagcgcttcaagcagaggcagaactgcaagggggacagccagcccaacaagagcatccggaacctgaagcccaagaggctgaagagccagaccaagatcatccctgagctggtgggcagccccacccagagcaccagcagcaggacagcctacctgggcacccacaagaccagcgctggcatcagcagcggcgtgaccagcggggacagcagtgacagcgctgagagcagcgagaggaggaagaggaaccggcccatcaccaacggcagcaccctgtctgagagcgaggtggaggacagcctggccaccagcctgagcagcagcgccagcagcagcagcgaggagagcaaggagagcagccgggcccgggagagcagcagccgcagcggcctgagccgcagcagcaacctgcgggtgaccaggaccagggctgcccagaggaagacaggccctgtgtccctggccaacggctgcggcaggaaggccaccaggaagagggtgtacctgagtgacagcgacaacaacagcctggagaccggggagatcctgaaggcccgggccggcaacaacaggaaggtgctgaggaaatgtgccgctgtggccgccaacaagatcaagctgatgtctgatgtggaggagaacagcagcagcgagagcgtgtgcagcggcaggaagctgccccacagaaatgccagcgctgtggccaggaagaagctgctgcacaacagtgaagatgagcagagcctgaagtcagaaattgaggaggaggagctgaaggatgagaaccagctgctgcctgtgagcagcagccacacagcccagagcaatgtggatgaaagtgagaacagagacagcgagagcgagagtgacctgcgggtggccaggaagaactggcacgccaacggctacaagagccacaccccagcccccagcaagaccaagttcctgaagattgagagcagcgaggaggacagcaagagccatgacagcgaccacgcctgcaacagaacagctggccccagcacctctgtgcagaagctgaaggccgagagcatcagcgaggaggccgacagcgagcccggccgcagcggcggcaggaagtacaacaccttccacaagaatgccagcttcttcaagaagaccaagatcctgagtgacagtgaagattctgagagcgaggagcaggacagagaagatggcaagtgccacaagatggagatgaaccccatcagcggcaacctgaactgtgaccccatcgccatgagccagtgcagcagtgaccacggctgtgaaacagacctggacagtgatgatgacaagattgagaagcccaacaacttcatgaaggacagcgccagccaggacaatggcctgagcaggaagatcagcaggaagagggtgtgcagcagtgacagcgacagcagcctgcaggtggtgaagaagagcagcaaggccaggacaggcctgctgcgcatcacccggcgctgtgccgccacagctgccaacaagatcaagctgatgtctgatgtggaggatgtgtccctggagaatgtgcacaccaggagcaagaatggaaggaagaagcccctgcacctggcctgcaccacagccaagaagaagctgagtgactgtgagggctctgtgcactgtgaggtgcccagcgagcagtatgcctgtgagggcaagcccccagaccctgattctgagggcagcaccaaggtgctgagccaggccctgaatggagacagcgacagcgaggacatgctgaacagcgagcacaagcaccgccacaccaacatccacaagattgatgcccccagcaagaggaagagcagctctgtgaccagcagcggggaggacagcaagagccacatccctggcagcgagacagacaggaccttcagcagcgagagcaccctggcccagaaggccacagctgagaacaactttgaggtggagctgaactacggcctgcggcgctggaatggaagaaggctgcggacctacggcaaggcccccttcagcaagaccaaggtgattcatgacagccaggagacagctgagaaggaggtgaagaggaagaggagccaccctgagctggagaatgtgaagatcagcgagaccaccggcaacagcaagttccggccagacaccagcagcaagagcagtgacctgggctctgtgacagaaagtgacatcgactgcacagacaacaccaagaccaagaggaggaagaccaagggcaaggccaaggtggtgaggaagggcaagaccttcaccgccaacatcagcaagacagtgcggcggcagaggcagagcaagaggccccggctgtctgtggatgacaatgactgggaggacctggactatgccaagagcaagagggtgctgcggcgcagcaagatcaagaccaggaaccagggccgcaggacagtgcgctaccatgatggagatgatgacaggagcctggagaatgtgctggacttcaacggctgcaccctgtag

SEQ ID NO: 19289 - DNA, 492 bp, synthetic construct
  source 1..492: mol_type = other DNA; note = Synthetic coding sequence
atgacagcccccagctgtgccttccctgtgcagttccggcagcccagcgtgtctggcctgagccagatcaccaagagcctgtacatcagcaatggagtggccgccaacaacaagctgatgctgagcagcaaccagatcaccatggtgatcaacgtgtctgtggaggtggtgaacaccctgtatgaggacatccagtacatgcaggtgcctgtggccgacagccccaacagccggctgtgtgacttctttgaccccatcgctgaccacatccacagcgtggagatgaagcagggccgcaccctgctgcactgtgccgccggcgtgagccgctctgctgccctgtgcctggcctacctgatgaagtaccacgccatgagcctgctggatgcccacacctggaccaagagctgccggcccatcatccggcccaacagcggcttctgggagcagctgatccactatgagttccagctgtttgggaagaacacctag

SEQ ID NO: 19290 - DNA, 756 bp, synthetic construct
  source 1..756: mol_type = other DNA; note = Synthetic coding sequence
atgatcagcaccaccagcaaggagaccaagaaggacaccaagctgtactgcatctgcaagaccccctatgatgagagcaagttctacatcggctgtgacctgtgcaccaactggtaccacggggagtgtgtgggcatcacagagaaggaggccaagaagatggatgtgtacatctgcaatgactgcaagagggcccaggagggcagcagcgaggagctgtactgcatctgcaggaccccctatgatgagagccagttctacatcggctgtgaccgctgccagaactggtaccacggccgctgtgtgggcatcctgcagagcgaggccgagctgattgatgaatatgtgtgcccccagtgccagagcacagaagatgccatgacagtgctgacccccctgacagagaaggactatgagggcctgaagagggtgctgcggagcctgcaggcccacaagatggcctggcccttcctggagcctgtggaccccaatgatgccccagactactacggcgtcatcaaggagcccatggacctggccaccatggaggagcgggtgcagaggcgctactatgagaagctgacagaatttgtggccgacatgaccaagatctttgacaactgccgctactacaaccccagcgacagccccttctaccagtgtgccgaggtgctggagagcttctttgtgcagaagctgaagggcttcaaggccagccgcagccacaacaacaagctgcagagcacagccagctag

SEQ ID NO: 19291 - DNA, 501 bp, synthetic construct
  source 1..501: mol_type = other DNA; note = Synthetic coding sequence
atgtacagcctgaaccaggagatcaaggccttcagcaggaacaacctgaggaagcagtgcaccagggtgaccaccctgaccgggaagaagatcatcgagacctggaaggatgcccgcatccacgtggtggaggaggtggagcccagcagcggcggcggctgcggctacgtgcaggacctgagcagtgacctgcaggtgggcgtcatcaagccctggctgctgctgggcagccaggatgctgcccatgacctggacaccctgaagaagaacaaggatggagtggtgctggtgcactgcaatgccggcgtgtccagagctgctgccatcgtgattggcttcctgatgaacagcgagcagaccagcttcaccagcgccttcagcctggtgaagaatgcccggcccagcatctgccccaacagcggcttcatggagcagctgcggacctaccaggagggcaaggagagcaacaagtgtgaccgcatccaggagaacagcagctag

SEQ ID NO: 19292 - DNA, 963 bp, synthetic construct
  source 1..963: mol_type = other DNA; note = Synthetic coding sequence
atgagcaagagcgccagccccaaggagcctgagcagctgaggaagctgttcatcggcggcctgagctttgagaccacagatgagagcctgcggagccactttgagcagtggggcaccctgacagactgtgtggtgatgagggaccccaacaccaagaggagccggggctttggatttgtgacctacgccaccgtggaggaggtggatgctgccatgaacaccaccccccacaaggtggatggccgggtggtggagcccaagagagctgtgtcccgggaggacagccagaggcctggggcccacctgactgtgaagaagatctttgtgggcggcatcaaggaggacacagaggagcaccacctgcgggactactttgagcagtatggcaagattgaagtcatcgagatcatgacagaccggggcagcggcaagaagaggggctttgcctttgtgacctttgatgaccatgacagcgtggacaagatcgtcatccagaagtaccacacagtgaagggccacaactgtgaggtgaggaaggccctgcccaagcaggagatggccagcgccagcagcagccagaggggccggcggggcagcggcaactttggaggcggcagaggagatggctttggaggaaatgacaactttggccggggcggcaacttcagcggccggggcggctttggaggcagctgtggcggcggcggctatggaggcagcggagatggctacaatggatttggaaatgatggcagcaactttggaggcggcggcagctacaatgactttggaaactacaacaaccagagcagcaactttggccccatgaagggcggcaactttggaggccgcagcagcggcccctatggaggcggcggccagtactttgccaagccccagaaccagggcggctatggagtgagcagcagcagcagcagctatggcagcggccgccgcttctag

SEQ ID NO: 19293 - DNA, 357 bp, synthetic construct
  source 1..357: mol_type = other DNA; note = Synthetic coding sequence
atgagcctgctgaacaagcccaagtctgagatgaccccagaggagctgcagaagcgggaggaggaggagttcaacacaggccccctgtctgtgctgacccagagcgtgaagaacaacacccaggtgctgatcaactgcaggaacaacaagaagctgctgggccgggtgaaggcctttgacagacactgcaacatggtgctggagaatgtgaaggagatgtggacagaggtgcccaagagcggcaagggcaagaagaagagcaagcctgtgaacaaggaccgctacatcagcaagatgttcctgcggggggacagcgtgattgtggtgctgaggaaccccctgattgctgggaagtag

SEQ ID NO: 19294 - DNA, 1179 bp, synthetic construct
  source 1..1179: mol_type = other DNA; note = Synthetic coding sequence
atgaaggacaccctgggccaggcccagcagagggtggccgagctggagcccctgaaggagcagctgcggggggcccaggagctggccgccagcagccagcagaaggccaccctgctgggggaggagctggccagcgctgctgctgcccgggacaggaccatcgccgagctgcacaggagccggctggaggtggccgaggtgaatggccgcctggccgagctgggcctgcacctgaaggaggagaagtgccagtggagcaaggagcgggccggcctgctgcagagcgtggaggccgagaaggacaagatcctgaagctgtctgctgagatcctgcggctggagaaggctgtgcaggaggagaggacccagaaccaggtgttcaagacagagctggcccgggagaaggacagcagcctggtgcagctgtctgagagcaagcgggagctgacagagctgcggagcgccctgcgggtgctgcagaaggagaaggagcagctgcaggaggagaagcaggagctgctggagtacatgaggaagctggaggcccggctggagaaggtggctgatgagaagtggaatgaagatgccaccacagaagatgaggaggccgctgtgggcctgagctgcccagctgccctgacagacagtgaagatgagagccctgaggacatgaggctgcccccctacggcctgtgtgagcggggggaccccggcagcagccctgctggcccccgggaggccagccccctggtggtgatcagccagcctgcccccatcagcccccacctgagcggccctgctgaggacagcagcagtgacagcgaggctgaagatgagaagtctgtgctgatggctgctgtgcagagcggcggggaggaggccaacctgctgctgcctgagctgggcagcgccttctatgacatggccagcaccatcttctgccgggcccagatcgccctgctgcccctgagccctgccagcacccccagccccaccaccagcggcttcaccgtgggcaccctgtctgagaccagcactggaggccctgccacccccacctggaaggagtgccccatctgcaaggagcgcttccctgctgagagtgacaaggatgccctggaggaccacatggatggccacttcttcttcagcacccaggaccccttcacctttgaatag

SEQ ID NO: 19295 - DNA, 600 bp, synthetic construct
  source 1..600: mol_type = other DNA; note = Synthetic coding sequence
atgacccccctggccccctgggaccccaagtatgaggccaaggccggccccaggcctgtgtggggcgccaactgcagcagcggggccagcttcagcggccgcaccctgtgccaccccagcttctggcccctgtatgaagctgccagcggccggggcctgcggcctgtggccccagccaccggccactggaatggccagcaggcccccccagatgctggcttccctgtggtgtgctgtgaagatgtgttcctgagtgaccccctgctgccccggggccagagggtgcccctgtacctgagcaaggccccccagcagatgatgggcagcctgaagctgctgcccccaccacccatcatgtctgcccgggtgctgccccggcccagccccagccggggccccagcacagcctggctgagcggccctgagctgattgccctgaccggcctgctgcagatgagccagggcgagccccggcccagcagcagcgctgtgggccccccagaccacaccagtgacccccccagcccctgtggcagccccagcagcagccagggcgctgacctgagcctgccccagaccccagacacccactgcccctag

SEQ ID NO: 19296 - DNA, 1155 bp, synthetic construct
  source 1..1155: mol_type = other DNA; note = Synthetic coding sequence
atggagggcctgggccgcagctgcctgtggctgcggcgggagctgagccccccccggccccggctgctgctgctggactgccgcagccgggagctgtatgaaagtgcccgcatcggcggggccctgtctgtggccctgcctgccctgctgctgcggcggctgcggcggggcagcctgtctgtgcgggccctgctgcccggcccccccctgcagcccccacctccagcccctgtgctgctgtatgaccagggcggcggcagaagaagaagaggagaggccgaggccgaggccgaggagtgggaggccgagagcgtgctgggcaccctgctgcagaagctgcgggaggagggctacctggcctactacctgcagggcggcttcagccgcttccaggctgaatgtccccacctgtgtgagaccagcctggccggccgggccggcagctccatggcccctgtgcccggccctgtgcctgtggtgggcctgggcagcctgtgcctgggcagtgactgcagtgatgctgagagcgaggccgaccgggacagcatgagctgtggcctggacagcgagggcgccaccccacctcctgtgggcctgcgggccagcttccctgtgcagatcctgcccaacctgtacctgggcagcgcccgggacagcgccaacctggagagcctggccaagctgggcatccgctacatcctgaatgtgacccccaacctgcccaacttctttgagaagaatggagacttccactacaagcagatccccatcagtgaccactggagccagaacctgagccgcttcttccctgaggccatcgagttcattgatgaggccctgagccagaactgtggggtgctggtgcactgcctggccggcgtgagccgctctgtgacagtgacagtggcctacctgatgcagaagctgcacctgagcctgaatgatgcctatgacctggtgaagaggaagaagagcaacatcagccccaacttcaacttcatgggccagctgctggactttgagaggagcctgcggctggaggagcggcacagccaggagcagggcagcggcggccaggccagcgctgccagcaacccccccagcttcttcaccacccccaccagtgatggagcctttgagctggcccccacctag

SEQ ID NO: 19297 - DNA, 2208 bp, synthetic construct
  source 1..2208: mol_type = other DNA; note = Synthetic coding sequence
atggccgagcccctgctgaggaagaccttcagccggctgcggggccgggagaagctgcccaggaagaagagtgatgccaaggagcggggccacccagcccagaggcctgagcccagccccccagagcctgagccccaggcccctgagggcagccaggccggggctgagggccccagcagccctgaggccagccgcagccctgcccggggggcctacctgcagagcctggagcccagcagccgccgctgggtgctgggcggggccaagccagctgaggacaccagcctgggccctggggtgcccggcactggagagcctgctggggagatctggtacaaccccatccctgaggaggacccccggcccccagcccctgagcccccaggcccccagcccggcagcgctgagagcgagggcctggccccccagggcgccgccccagccagcccccccaccaaggccagcaggaccaagagccctggccctgcccggcggctgagcatcaagatgaagaagctgcctgagctgcggcggcggctgagcctgcggggccccagggctggccgggagcgggagcgggccgccccagctggcagcgtcatcagccgctaccacctggacagctctgtgggcggccctggccctgctgctggccctgggggcaccaggagccccagggctggctacctgagtgatggagacagccctgagaggcctgctggcccccccagccccaccagcttccggccctatgaggtgggccctgctgcccgggcccccccagctgccctgtggggccgcctgagcctgcacctgtatggcctgggcggcctgcggcctgcccctggggccaccccccgggacctgtgctgcctgctgcaggtggatggagaggcccgggccaggacaggccccctgcggggcggccctgacttcctgcggctggaccacaccttccacctggagctggaggccgcccggctgctgcgggccctggtgctggcctgggaccccggggtgagaagacaccggccctgtgcccagggcaccgtgctgctgcccaccgtcttccggggctgccaggcccagcagctggccgtgcggctggagccccagggcctgctgtatgccaagctgaccctgtctgagcagcaggaggccccagccacagctgagccccgggtgtttggcctgcccctgcccctgctggtggagcgggagaggcctcctggccaggtgcccctcatcatccagaagtgtgtgggccagatcgagcggcggggcctgcgggtggtgggcctgtaccgcctgtgtggcagcgctgctgtgaagaaggagctgagagatgcctttgagcgggacagcgctgctgtgtgcctgtctgaggacctgtacccagacatcaacgtcatcaccggcatcctgaaggactacctgcgggagctgcccacccccctcatcacccagcccctgtacaaggtggtgctggaggccatggcccgggacccccccaacagagtgccccccaccacagagggcacccggggcctgctgagctgcctgcctgatgtggagcgggccaccctgaccctgctgctggaccacctgcggctggtgtcctccttccacgcctacaacaggatgaccccccagaacctggccgtgtgctttggacctgtgctgctgcctgcccggcaggcccccacccggccccgggcccggagcagcggccctggcctggccagcgctgtggacttcaagcaccacatcgaggtgctgcactacctgctgcagagctggccagacccccggctgccccggcagagcccagatgtggccccctacctgcggcccaagaggcagccccccctgcacctgcccctggccgaccctgaggtggtgacccggccccggggccggggcggccctgagagcccccccagcaacagatatgctggggactggagcgtgtgtggccgggacttcctgccctgtggccgggacttcctgagcggccctgactatgaccacgtgactggaagtgacagtgaagatgaagatgaggaggtgggggagccccgggtgactggagactttgaagatgactttgatgcccccttcaacccccacctgaacctgaaggactttgatgccctgatcctggacctggagcgggagctgagcaagcagatcaacgtgtgcctgtag

SEQ ID NO: 19298 - DNA, 660 bp, synthetic construct
  source 1..660: mol_type = other DNA; note = Synthetic coding sequence
atgccccggggcaggaagagcagaagaagaagaaatgcccgggctgctgaggagaacagaaacaacaggaagatccaggccagcgaggccagcgagacccccatggccgcctctgtggtggccagcaccccagaagatgacctgagcggccctgaggaggaccccagcaccccagaggaggccagcaccaccccagaggaggccagcagcacagcccaggcccagaagcccagcgtgcccaggagcaacttccagggcaccaagaagagcctgctgatgagcatcctggccctgatcttcatcatgggcaacagcgccaaggaggccctggtgtggaaggtgctgggcaagctgggcatgcagcccggccggcagcacagcatctttggagaccccaagaagatcgtgacagaggagtttgtgcggcggggctacctgatctacaagcctgtgcccaggagcagccctgtggagtatgagttcttctggggcccccgggcccacgtggagagcagcaagctgaaggtgatgcactttgtggcccgggtgaggaaccgctgcagcaaggactggccctgcaactatgactgggacagtgatgatgatgctgaggtggaggccatcctgaacagcggggcccggggctacagcgccccctag

SEQ ID NO: 19299 - DNA, 702 bp, synthetic construct
  source 1..702: mol_type = other DNA; note = Synthetic coding sequence
atgaacctgaacttcaccagccccctgcacccagccagcagccagaggcccaccagcttcttcatcgaggacatcctgctgcacaagcccaagcccctgcgggaggtggccccagaccactttgccagcagcctggccagccgggtgcccctgctggactatggctaccccctgatgcccacccccaccctgctggccccccacgcccaccaccccctgcacaagggggaccaccaccacccctacttcctgaccaccagcggcatgcctgtgcctgccctcttcccccacccccagcacgccgagctgcccgggaagcactgcagaagaaggaaggccaggacagtgttcagtgacagccagctgagcggcctggagaagagatttgagatccagcgctacctgagcaccccagagcgggtggagctggccacagccctgagcctgtctgagacccaggtgaagacctggttccagaacagaaggatgaagcacaagaagcagctgaggaagagccaggatgagcccaaggccccagatggccctgagagccctgagggcagcccccggggcagcgaggccgccacagctgctgaggcccggctgagcctgcctgctggcccctttgtgctgacagagccagaagatgaggtggacattggagatgaaggagagctgggcagcggcccccacgtgctgtag

SEQ ID NO: 19300 - DNA, 873 bp, synthetic construct
  source 1..873: mol_type = other DNA; note = Synthetic coding sequence
atggagctgcctgctgtgggggagcacgtgtttgctgtggagagcattgagaagaagaggatcaggaagggccgggtggagtacctggtgaagtggaggggctggagccccaagtacaacacctgggagcctgaggagaacatcctggacccccggctgctgattgccttccagaaccgggagcggcaggagcagctgatgggctacaggaagaggggccccaagcccaagcccctggtggtgcaggtgcccacctttgcccggcgcagcaatgtgctgaccggcctgcaggacagcagcacagacaacagagccaagctggacctgggcgcccagggcaagggccagggccaccagtatgagctgaacagcaagaagcaccaccaccacgctgtgggcctgaacctgagccacgtgaggaagcgctgcctgtctgagacccacggggagcgggagccctgcaagaagaggctgacagcccggagcatcagcacccccacctgcctgggcggcagccctgctgctgagaggcctgctgacctgcccccagctgctgccctgccccagcctgaggtgatcctgctggacagcgacctggatgagcccatcgacctgcgctgtgtgaagaccaggtctgaggccggggagccccccagcagcctgcaggtgaagccagagaccccagccagcgctgctgtggccgtggccgctgctgctgcccccaccaccacagctgagaagcccccagctgaggcccaggatgagcctgctgagagcctgtctgagttcaagcccttctttggaaacatcatcatcacagatgtgacagccaactgcctgactgtgaccttcaaggagtatgtgacagtgtag

SEQ ID NO: 19301 - DNA, 744 bp, synthetic construct
  source 1..744: mol_type = other DNA; note = Synthetic coding sequence
atgacagaggacagccagaggaacttccgctctgtgtactatgagaaggtgggcttccggggcgtggaggagaagaagagcctggagatcctgctgaaggatgaccggctggacacagagaagctgtgcaccttcagccagcgcttccccctgcccagcatgtaccgggccctggtgtggaaggtgctgctgggcatcctgcccccccaccacgagagccacgccaaggtgatgatgtacaggaaggagcagtacctggatgtgctgcacgccctgaaggtggtgcgctttgtgtctgatgccaccccccaggccgaggtgtacctgaggatgtaccagctggagagcggcaagctgcccaggagccccagcttccccctgcccaaggcctttgagcagtacctgaacctggaggatggccgcctgctgacccacctgaggatgtgcagcgctgcccccaagctgccctatgacctgtggttcaagcgctgctttgctggctgcctgcctgagagcagcctgcagagggtgtgggacaaggtggtgtctggcagctgcaagatcctggtgtttgtggccgtggagatcctgctgaccttcaagatcaaggtgatggccctgaacagcgctgagaagatcaccaagttcctggagaacatcccccaggacagcagtgatgccatcgtgtccaaggccatcgacctgtggcacaagcactgcggcacccctgtgcacagcagctag

SEQ ID NO: 19302 - DNA, 546 bp, synthetic construct
  source 1..546: mol_type = other DNA; note = Synthetic coding sequence
atggtgagcagctgctgcggctctgtgtcctctgagcagagctgtggcctggagaactgctgccggcccagctgctgccagaccacctgctgcaggaccacctgctgccggcccagctgctgcaagccccagtgctgccagagcgtgtgctaccagcccacctgctgccaccccagctgctgcatcagcagctgctgccggccctactgctgtgagagcagctgctgccggccctgctgctgccagaccacctgctgcaggaccacctgctgcaggaccacctgctgctgccccagctgctgcgtgagcagctgctgccggccccagtgctgccagagcgtgtgctgccagcccacctgctgccggcccagctgctgcatcagcagctgctgccaccccagctgctgtgagagcagctgctgccggccctgctgctgcgtgcggcctgtgtgtggccgggtgtcctgccacaccacctgctaccggcccacctgtgtgatcagcacctgcccccggcccctgtgctgtgccagcagctgctgctag

SEQ ID NO: 19303 - DNA, 1086 bp, synthetic construct
  source 1..1086: mol_type = other DNA; note = Synthetic coding sequence
atggccctgaatgtggcccctgtgcgggacaccaagtggctgaccctggaggtgtgccggcagttccagaggggcacctgcagcagaagtgatgaggagtgcaagtttgcccacccccccaagagctgccaggtggagaatggccgggtgattgcctgctttgacagcctgaagggccgctgcagccgggagaactgcaagtacctgcacccccccacccacctgaagacccagctggagatcaatggaagaaacaacctgatccagcagaagacagctgctgccatgctggcccagcagatgcagttcatgtttcctggcacccccctgcaccctgtgcccaccttccctgtgggccctgccatcggcaccaacacagccatcagctttgccccctacctggcccctgtgaccccaggagtgggcctggtgcccacagagatcctgcccaccacccctgtgattgtgcccggcagcccccctgtgacagtgcccggcagcacagccacccagaagctgctgaggacagacaagctggaggtgtgccgggagttccagaggggcaactgtgcccggggggagacagactgccgctttgcccaccctgctgacagcaccatgattgacaccagtgacaacacagtgacagtgtgcatggactacatcaagggccgctgcatgagggagaagtgcaagtacttccaccccccagcccacctgcaggccaagatcaaggccgcccagcaccaggccaaccaggccgctgtggccgcccaggccgctgctgctgctgccaccgtgatggccttccccccaggggccctgcaccccctgcccaagaggcaggccctggagaagagcaatggcaccagcgctgtgttcaaccccagcgtgctgcactaccagcaggccctgaccagcgcccagctgcagcagcacgccgccttcatccccacagacaacagcgagatcatcagcagaaatggcatggagtgccaggagagcgccctgcgcatcaccaagcactgctactgcacctactaccctgtgagcagcagcattgagctgccccagacagcctgctag

SEQ ID NO: 19304 - DNA, 1017 bp, synthetic construct
  source 1..1017: mol_type = other DNA; note = Synthetic coding sequence
atgctgaagaacaagggccacagcagcaagaaggacaacctggccgtgaatgctgtggccctgcaggaccacatcctgcatgacctgcagctgaggaacctgtctgtggccgaccacagcaagacccaggtgcagaagaaggagaacaagagcctgaagagggacaccaaggccatcatcgacaccggcctgaagaagaccacccagtgccccaagctggaggacagcgagaaggagtatgtgctggaccccaagcccccacccctgaccctggcccagaagctgggcctcatcggccccccacctccacccctgagcagtgatgagtgggagaaggtgaagcagaggagcctgctgcagggcgacagcgtgcagccctgccccatctgcaaggaggagtttgagctgcggccccaggtgttcagcatccggggcaagaaccagtaccagaccagggtcatccatgatggagcccggctcttccgcatcaagtgtgtgacccgcatccaggcctactggaggggctgtgtggtgaggaagtggtacagaaacctgaggaagacagtgcccccaacagatgccaagctgaggaagaagttctttgagaagaagttcacagagatcagccaccgcatcctgtgcagctacaacaccaacatcgaggagctgtttgctgagattgaccagtgcctggccatcaacagatctgtgctgcagcagctggaggagaagtgtggccacgagatcacagaggaggagtgggagaagatccaggtgcaggccctgcggcgggagacccatgagtgcagcatctgcctggcccccctgtctgctgctgggggccagagggtgggcgccggccgccgcagccgggagatggccctgctgagctgcagccacgtgttccaccacgcctgcctgctggccctggaggagttctctgtgggggacaggcctcccttccacgcctgccccctgtgccgcagctgctaccagaagaagatcctggagtgctag

SEQ ID NO: 19305 - DNA, 1098 bp, synthetic construct
  source 1..1098: mol_type = other DNA; note = Synthetic coding sequence
atggctgctgctgctgctggaacagccaccagccagcgcttcttccagagcttcagtgatgccctgattgatgaggacccccaggccgccctggaggagctgaccaaggccctggagcagaagccagatgatgcccagtactactgccagagggcctactgccacatcctgctgggcaactactgtgtggccgtggctgatgccaagaagagcctggagctgaaccccaacaacagcacagccatgctgaggaagggcatctgtgagtaccacgagaagaactatgctgctgccctggagaccttcacagagggccagaagctggacatcgagaccggcttccaccgggtgggccaggccggcctgcagctgctgaccagcagtgaccccccagccctggacagccagagcgctggcatcactggagcagatgccaacttctctgtgtggatcaagcgctgccaggaggcccagaatggaagtgaaagtgaggtgtggacccaccagagcaagatcaagtatgactggtaccagacagagagccaggtggtgatcaccctgatgatcaagaatgtgcagaagaatgatgtgaatgtggagttcagcgagaaggagctgagcgccctggtgaagctgcccagcggggaggactacaacctgaagctggagctgctgcaccccatcatccctgagcagagcaccttcaaggtgctgagcaccaagattgagatcaagctgaagaagccagaggccgtgcgctgggagaagctggagggccagggagatgtgcccacccccaagcagtttgtggctgatgtgaagaacctgtaccccagcagcagcccctacaccaggaactgggacaagctggtgggggagatcaaggaggaggagaagaatgagaagctggagggagatgctgccctgaacagactcttccagcagatctacagtgatggcagtgatgaggtgaagagggccatgaacaagagcttcatggagagcggcggcaccgtgctgagcaccaactggagcgatgtgggcaagaggaaggtggagatcaaccccccagatgacatggagtggaagaagtactag

SEQ ID NO: 19306 - DNA, 1389 bp, synthetic construct
  source 1..1389: mol_type = other DNA; note = Synthetic coding sequence
atggacaaggacagccagggcctgctggacagcagcctgatggccagcggcacagccagccgctcagaagatgaggagagcctggccggccagaagagggccagcagccaggccctgggcaccatccccaagagaagaagcagcagccgcttcatcaagaggaagaagtttgatgatgagctggtggagagcagcctggccaagagcagcacccgggccaagggggccagcggcgtggagcccggccgctgcagcggcagcgagcccagcagcagcgagaagaagaaggtgtccaaggcccccagcacccctgtgccccccagccctgccccagcccctggcctgaccaagagggtgaagaagagcaagcagcccctgcaggtgaccaaggacctgggccgctggaagccagcagatgacctgctgctgatcaatgctgtgctgcagaccaatgacctgacctctgtgcacctgggcgtgaagttcagctgccgcttcaccctgcgggaggtgcaggagcgctggtacgccctgctgtatgaccccgtcatcagcaagctggcctgccaggccatgaggcagctgcaccctgaggccatcgccgccatccagagcaaggccctcttcagcaaggccgaggagcagctgctgagcaaggtgggcagcaccagccagcccaccctggagaccttccaggacctgctgcaccgccacccagatgccttctacctggccaggacagccaaggccctgcaggcccactggcagctgatgaagcagtactacctgctggaggaccagacagtgcagcccctgcccaagggggaccaggtgctgaacttcagtgatgctgaggacctgattgatgacagcaagctgaaggacatgagagatgaggtgctggagcacgagctgatggtggccgaccggcggcagaagcgggagatccggcagctggagcaggagctgcacaagtggcaggtgctggtggacagcatcaccggcatgagcagcccagactttgacaaccagaccctggccgtgctgcggggccgcatggtgcgctacctgatgaggagccgggagatcaccctgggccgggccaccaaggacaaccagattgatgtggacctgagcctggagggccctgcctggaagatcagcaggaagcagggcgtcatcaagctgaagaacaatggagacttcttcatcgccaatgaaggaagaagacccatctacattgatggccggcctgtgctgtgtggcagcaagtggaggctgagcaacaacagcgtggtggagatcgccagcctgcgctttgtgttcctgatcaaccaggacctgattgccctgatccgggcagaggccgccaagatcaccccccagtag

SEQ ID NO: 19307 - DNA, 963 bp, synthetic construct
  source 1..963: mol_type = other DNA; note = Synthetic coding sequence
atgtctgtgggcttcatcggggccggccagctggcctatgccctggcccggggcttcaccgctgctggcatcctgagcgcccacaagatcatcgccagcagccctgagatgaacctgcccaccgtgtctgccctgaggaagatgggcgtgaacctgaccaggagcaacaaggagaccgtgaagcacagtgatgtgctcttcctggccgtgaagccccacatcatccccttcatcctggatgagatcggggctgatgtgcaggcccggcacatcgtggtgtcctgtgccgccggcgtgaccatcagctctgtggagaagaagctgatggccttccagcctgcccccaaggtgatccgctgcatgaccaacacccctgtggtggtgcaggagggcgccaccgtgtatgccaccggcacccacgccctggtggaggatggccagctgctggagcagctgatgagctctgtgggcttctgcacagaggtggaggaggacctgattgatgctgtgacaggcctgagcggcagcggccctgcctatgccttcatggccctggatgccctggctgatggcggcgtgaagatgggcctgccccggcggctggccatccagctgggcgcccaggccctgctgggcgccgccaagatgctgctggacagcgagcagcacccctgccagctgaaggacaacgtgtgcagccctgggggcgccaccatccacgccctgcacttcctggagagcggcggcttccgcagcctgctgatcaatgctgtggaggccagctgcatccgcacccgggagctgcagagcatggctgaccaggagaagatcagccctgctgccctgaagaagaccctgctggacagagtgaagctggagagccccaccgtgtccaccctgacccccagcagccctgggaagctgctgaccaggagcctggccctgggcggcaagaaggactag

SEQ ID NO: 19308 - DNA, 2370 bp, synthetic construct
  source 1..2370: mol_type = other DNA; note = Synthetic coding sequence
atggaggatggccccagcaacaatgccagctgcttccggcggctgacagagtgcttcctgagccccagcctgacagatgagaaggtgaaggcctacctgagcctgcacccccaggtgctggatgaatttgtgtctgagagcgtgtctgctgagaccgtggagaagtggctgaagaggaagaacaacaagtcagaagatgagagcgcccccaaggaggtgagccgctaccaggacaccaacatgcagggcgtggtgtatgagctgaacagctacatcgagcagaggctggacaccggcggggacaaccagctgctgctgtatgagctgagcagcatcatcaagatcgccaccaaggcagatggctttgccctgtacttcctgggggagtgcaacaacagcctgtgcatcttcaccccacctggcatcaaggagggcaagcccaggctcatcccagctggccccatcacccagggcaccaccgtgtctgcctacgtggccaagagcaggaagaccctgctggtggaggacatcctgggagatgagcgcttcccccggggcaccggcctggagagcggcacccgcatccagagcgtgctgtgcctgcccatcgtgacagccatcggggacctgattggcatcctggagctgtaccgccactggggcaaggaggccttctgcctgagccaccaggaggtggccacagccaacctggcctgggcctctgtggccatccaccaggtgcaggtgtgccggggcctggccaagcagacagagctgaatgacttcctgctggatgtgtccaagacctactttgacaacatcgtggccatcgacagcctgctggagcacatcatgatctatgccaagaacctggtgaatgctgacagatgtgccctcttccaggtggaccacaagaacaaggagctgtacagcgacctgtttgacatcggggaggagaaggagggcaagcctgtgttcaagaagaccaaggagatccgcttcagcattgagaagggcattgctggccaggtggccaggactggagaggtgctgaacatcccagatgcctatgctgacccccgcttcaaccgggaggtggacctgtacacaggctacaccaccaggaacatcctgtgcatgcccatcgtgtcccggggctctgtgattggagtggtgcagatggtgaacaagatcagcggcagcgccttcagcaagacagatgagaacaacttcaagatgtttgctgtgttctgtgccctggccctgcactgtgccaacatgtaccaccgcatccgccacagcgagtgcatctacagagtgaccatggagaagctgagctaccacagcatctgcaccagcgaggagtggcagggcctgatgcagttcaccctgcctgtgcggctgtgcaaggagattgagctgttccactttgatattggcccctttgagaacatgtggccaggcatctttgtgtacatggtgcacaggagctgtggcaccagctgctttgagctggagaagctgtgccgcttcatcatgtctgtgaagaagaactaccgccgggtgccctaccacaactggaagcatgctgtgacagtggcccactgcatgtatgccatcctgcagaacaaccacaccctcttcacagacctggagaggaagggcctgctgattgcctgcctgtgccacgacctggaccaccggggcttcagcaacagctacctgcagaagtttgaccaccccctggccgccctgtacagcaccagcaccatggagcagcaccacttcagccagacagtgtccatcctgcagctggagggccacaacatcttcagcaccctgagcagcagtgaatatgagcaggtgctggagatcatcaggaaggccatcatcgccacagacctggccctgtactttggaaacaggaagcagctggaggagatgtaccagacaggcagcctgaacctgaacaaccagagccaccgggacagagtcatcggcctgatgatgacagcctgtgacctgtgcagcgtgaccaagctgtggcctgtgaccaagctgacagccaatgacatctatgcagagttctgggccgagggagatgagatgaagaagctgggcatccagcccatccccatgatggaccgggacaagaaggatgaggtgccccagggccagctgggcttctacaatgctgtggccatcccctgctacaccaccctgacccagatcctgcccccaacagagcccctgctgaaggcctgccgggacaacctgagccagtgggagaaggtgatccggggggaggagacagccacctggatcagcagccccagcgtggcccagaaggctgctgccagcgaggactag

SEQ ID NO: 19309 - DNA, 645 bp, synthetic construct
  source 1..645: mol_type = other DNA; note = Synthetic coding sequence
atggatgacagcgagaccggcttcaacctgaaggtggtgctggtgtccttcaagcagtgcctggatgagaaggaggaggtgctgctggacccctacatcgcctcctggaagggcctggtgcgcttcctgaacagcctgggcaccatcttctccttcatcagcaaggatgtggtgtccaagctgcgcatcatggagcggctgcggggcggcccccagagcgagcactaccgcagcctgcaggccatggtggcccacgagctgagcaaccggctggtggacctggagcggcgcagccaccaccctgagagcggctgcaggacagtgctgcggctgcaccgggccctgcactggctgcagctgttcctggagggcctgcggaccagcccagaagatgcccggaccagcgccctgtgtgccgacagctacaatgccagcctggccgcctaccacccctgggtggtgagaagagctgtgacagtggccttctgcaccctgcccacccgggaggtgttcctggaggccatgaatgtgggccccccagagcaggccgtgcagatgctgggggaggccctgcccttcatccagagggtgtacaacgtgtcccagaagctgtatgcagagcacagcctgctggacctgccctag

SEQ ID NO: 19310 - DNA, 4293 bp, synthetic construct
  source 1..4293: mol_type = other DNA; note = Synthetic coding sequence
atgaccagcgctgctgagatcaagaagccccctgtggcccccaagcccaagtttgtggtggccaacaacaagccagcccccccacccatcgcccccaagccagacatcgtcatcagctctgtgccccagagcaccaagaagatgaagccagccatcgcccccaagcccaaggtgctgaagaccagccctgtgcgggagatcggccagagccccagcaggaagatcatgctgaacctggagggccacaagcaggagctggccgagagcacagacaacttcaactgcaagtatgagggcaaccagagcaatgactacatcagccccatgtgcagctgcagcagcgagtgcatccacaagctgggccaccgggagaacctgtgtgtgaagcagctggtgctggagcccctggagatgaatgaaaacctggagaacagcaagattgatgagaccctgaccatcaagaccaggagcaaatgtgacctgtatggagagaaggccaagaaccagggcggcgtggtgctgaaggcctctgtgctggaggaggagctgaaggatgccctgatccaccagatgccacccttcatcagcgcccagaagcaccggcccacagacagccctgagatgaatggaggctgcaacagcaatggccagttccgcatcgagtttgctgacctgagccccagccccagcagctttgagaaggtgcctgaccaccacagctgccacctgcagctgcccagtgatgaatgtgagcactttgagacctgccaggatgacagcgagaagagcaacaactgcttccagagcagcgagctggaggccctggagaatggcaagaggagcaccctcatcagcagtgatggagtgtccaagaagtctgaggtgaaggacctgggccccctggagatccacctggtgccctacacccccaagttccccacccccaagcccaggaagaccaggacagcccggctgctgcggcagaagtgtgtggacaccccatctgagagcacagaggagcccggcaacagcgacagcagcagcagctgcctgacagagaacagcctgaagatcaacaagatctctgtgctgcaccagaatgtgctgtgcaagcaggagcaggtggacaagatgaagctgggcaacaagtctgagctgaacatggagagcaacagtgatgcccaggacctggtgaacagccagaaggccatgtgcaatgagaccaccagctttgagaagatggcccccagctttgacaaggacagcaacctgagcagtgacagcaccaccgtggatggcagctccatgagcctggccgtggatgagggcaccggcttcatccgctgcaccgtgtccatgagcctgcccaagcagctgaagctgacctgcaatgagcacctgcagagcggcaggaacctgggcgtgtctgccccccagatgcagaaggagagcgtcatcaaggaggagaacagcctgcgcatcgtgcccaagaagccccagaggcacagcctgcctgccactggagtgctgaagaaggccgccagcgaggagctgctggagaagagcagctaccccagcagcgaggagaagagcagcgagaagagcctggagaggaaccacctgcagcacctgtgtgcccagaacagaggagtgagcagcagctttgacatgcccaagagggccagcgagaagcctgtgtggaagctgccccaccccatcctgcccttcagcggcaaccctgagttcctgaagtctgtgacagtgagcagcaacagcgagcccagcacagccctgaccaagccccgggccaagagcctgagcgccatggatgtggagaagtgcaccaagccctgcaaggacagcaccaagaagaacagcttcaagaagctgctgtccatgaagctgagcatctgcttcatgaagagtgacttccagaagttctggagcaagagcagccagctgggggacaccaccaccggccacctgagcagcggggagcagaagggcatcgagagtgactggcagggcctgctggtgggggaggagaagaggagcaagcccatcaaggcctacagcacagagaactacagcctggagagccagaagaagaggaagaagagccggggccagaccagcgctgccaacggcctgcgggcagagagcctggatgaccagatgctgagccgggagagcagcagccaggccccctacaagtctgtgaccagcctgtgtgccccagaatatgagaacatccgccactatgaggagatcccagaatatgagaacctgcccttcatcatggccatcaggaagacccaggagctggagtggcagaacagcagctccatggaggatgctgatgccaacgtgtatgaggtggaggagccctatgaggccccagatggccagctgcagctgggccccaggcaccagcacagcagcagcggggccagccaggaggagcagaatgacctgggcctgggggacctgcccagtgatgaggaggagatcatcaacagcagtgatgaagatgatgtgagcagcgagagcagcaagggggagccagaccccctggaggacaagcaggatgaggacaatggcatgaagagcaaggtgcaccacatcgccaaggagatcatgagcagcgagaaggtgtttgtggatgtgctgaagctgctgcacatcgacttcagagatgctgtggcccacgccagccggcagctgggcaagcctgtgattgaggaccgcatcctgaaccagatcctgtactacctgccccagctgtatgagctgaacagagacctgctgaaggagctggaggagaggatgctgcactggacagagcagcagagaattgctgacatctttgtgaagaagggcccctacctgaagatgtacagcacctacatcaaggagtttgacaagaacatcgccctgctggatgagcagtgcaagaagaaccctggctttgctgctgtggtgcgggagtttgagatgagcccccgctgtgccaacctggccctgaagcactacctgctgaagcctgtgcagaggatcccccagtaccgcctgctgctgacagactacctgaagaacctgattgaagatgctggggactacagagacacccaggatgccctggccgtggtgattgaggtggccaaccacgccaatgacaccatgaagcagggcgacaacttccagaagctgatgcagatccagtacagcctgaatggccaccatgaaattgtgcagcccggccgggtcttcctgaaggagggcatcctgatgaagctgagcaggaaggtgatgcagcccaggatgttcttcctgttcaatgatgccctgctgtacaccacccctgtgcagagcggcatgtacaagctgaacaacatgctgagcctggccggcatgaaggtgaggaagcccacccaggaggcctaccagaatgagctgaagattgagagcgtggagaggagcttcatcctgagcgccagcagcgccacagaaagagatgagtggctggaggccatcagccgggccatcgaggagtatgccaagaagaggatcaccttctgccccagccgcagcctggatgaagctgacagcgagaacaaggaggaggtgagccccctgggcagcaaggcccccatctggatcccagacacccgggccaccatgtgcatgatctgcaccagcgagttcaccctgacctggaggaggcaccactgccgggcctgtgggaagatcgtgtgccaggcctgcagcagcaacaagtatggcctggactacctgaagaaccagcctgcccgggtgtgtgagcactgcttccaggagctgcagaagctggaccaccagcacagccccagaattggcagccctggcaaccacaagagccccagcagcgccctgagctctgtgctgcacagcatccccagcggcaggaagcagaagaagatcccagctgccctgaaggaggtgtctgccaacacagaggacagctccatgagcggctacctgtaccgcagcaagggcaacaagaagccctggaagcacttctggtttgtgatcaagaacaaggtgctgtacacctacgccgcctctgaagatgtggccgccctggagagccagcccctgctgggcttcaccgtcatccaggtgaaggatgagaacagcgagagcaaggtgttccagctgctgcacaagaacatgctgttctacgtgttcaaggccgaggatgcccacagcgcccagaagtggattgaggccttccaggagggcaccatcctgtag

SEQ ID NO: 19311 - DNA, 1641 bp, synthetic construct
  source 1..1641: mol_type = other DNA; note = Synthetic coding sequence
atgggcgcctacctgagccagcccaacacagtgaagtgcagcggagatggagtgggcgccccccggctgcccctgccctacggcttcagcgccatgcagggctggagggtgtccatggaggatgcccacaactgcatccctgagctggacagcgagacagccatgttttctgtgtatgatggccacggcggggaggaggtggccctgtactgtgccaagtacctgcctgacatcatcaaggaccagaaggcctacaaggagggcaagctgcagaaggccctggaggatgccttcctggccattgatgccaagctgaccacagaggaggtgatcaaggagctggcccagattgctggccggcccacagaagatgaagatgagaaggagaaggtggctgatgaagatgatgtggacaatgaggaggccgccctgctgcacgaggaggccaccatgaccatcgaggagctgctgaccaggtatggccagaactgccacaagggccccccccacagcaagagcggcggcggcactggagaggagcccggcagccagggcctgaatggagaggccggccctgaggacagcacccgggagacccccagccaggagaatggccccacagccaaggcctacacaggcttcagcagcaacagcgagcggggcacagaggccggccaggtgggggagcccggcatccccaccggggaggccggccccagctgcagcagcgccagtgacaagctgccccgggtggccaagagcaagttctttgaggacagtgaagatgaaagtgatgaagctgaggaggaggaggaggacagcgaggagtgcagcgaggaggaggatggctacagcagcgaggaggccgagaatgaagaagatgaagatgacacagaggaggccgaggaggatgatgaggaggaggaggaggagatgatggtgcccggcatggagggcaaggaggagcccggcagtgacagcggcaccacagctgtggtggccctgatccggggcaagcagctgattgtggccaatgctggggacagccgctgtgtggtgtctgaggccggcaaggccctggacatgtcctatgaccacaagccagaagatgaggtggagctggcccgcatcaagaatgctgggggcaaggtgaccatggatggccgggtgaatggaggcctgaacctgagccgggccatcggggaccacttctacaagaggaacaagaacctgcccccagaggagcagatgatcagcgccctgcctgacatcaaggtgctgaccctgacagatgaccacgagttcatggtgattgcctgtgatggcatctggaatgtgatgagcagccaggaggtggtggacttcatccagagcaagatcagccagagagatgaaaatggagagctgcggctgctgagcagcatcgtggaggagctgctggaccagtgcctggccccagacaccagcggagatggcaccggctgtgacaacatgacctgcatcatcatctgcttcaagcccaggaacacagctgagctgcagcctgagagcggcaagaggaagctggaggaggtgctgagcacagagggcgcagaagaaaatggaaacagcgacaagaagaagaaggccaagagggactag

SEQ ID NO: 19312 - DNA, 273 bp, synthetic construct
  source 1..273: mol_type = other DNA; note = Synthetic coding sequence
atgagcacagccatgaactttggcaccaagagcttccagccccggcccccagacaagggcagcttccccctggaccacctgggggagtgcaagagcttcaaggagaagttcatgaagtgcctgcacaacaacaactttgaaaatgccctgtgcaggaaggagagcaaggagtacctggagtgcaggatggagaggaagctgatgctgcaggagcccctggagaagctgggctttggagacctgaccagcggcaagtctgaggccaagaagtag

SEQ ID NO: 19313 - DNA, 726 bp, synthetic construct
  source 1..726: mol_type = other DNA; note = Synthetic coding sequence
atgaacagcggccggcctgagaccatggagaacctgcctgccctgtacaccatcttccagggcgaggtggccatggtgacagattatggagccttcatcaagatccctggctgcaggaagcagggcctggtgcacaggacccacatgagcagctgccgggtggacaagcccagcgagatcgtggatgtgggggacaaggtgtgggtgaagctgattggccgggagatgaagaatgaccgcatcaaggtgtccctgtccatgaaggtggtgaaccagggcaccgggaaggacctggaccccaacaacgtcatcatcgagcaggaggagaggagaagaagaagcttccaggactacacaggccagaagatcaccctggaggccgtgctgaacaccacctgcaagaagtgtggctgcaagggccactttgccaaggactgcttcatgcagcccggcggcaccaagtacagcctcatcccagatgaggaggaggagaaggaggaggccaagtctgctgagtttgagaagccagaccccaccaggaaccccagcaggaagaggaagaaggagaagaagaagaagaagcaccgggacaggaagagcagtgacagcgacagcagtgacagcgagagtgacaccgggaagagggcccggcacaccagcaaggacagcaaggccgccaagaagaagaagaagaagaagaagcacaagaagaagcacaaggagtag

SEQ ID NO: 19314 - DNA, 1758 bp, synthetic construct
  source 1..1758: mol_type = other DNA; note = Synthetic coding sequence
atggctgctgctgctgctgctgtgggccctggggccggcggggccggcagcgctgtgcctgggggcgccggcccctgtgccaccgtgtctgtgtttcctggggcccggctgctgaccatcggagatgccaacggggagatccagagacatgctgagcagcaggccctgcggctggaggtgcgggccggccctgacagcgctggcatcgccctgtacagccatgaagatgtgtgtgtgttcaagtgcagcgtgtcccgggagacagaatgttcccgggtgggcaagcagagcttcatcatcaccctgggctgcaacagcgtgctgatccagtttgccaccccaaatgacttctgcagcttctacaacatcctgaagacctgccggggccacaccctggagaggtctgtgttcagcgagaggacagaggagagcagcgctgtgcagtacttccagttctacggctacctgagccagcagcagaacatgatgcaggactatgtgaggacaggcacctaccagagggccatcctgcagaaccacacagacttcaaggacaagatcgtgctggatgtgggctgcggcagcggcatcctgtccttctttgctgcccaggccggggccaggaagatctatgctgtggaggccagcaccatggcccagcacgccgaggtgctggtgaagagcaacaacctgacagacagaattgtggtgattcctgggaaggtggaggaggtgtccctgcctgagcaggtggacatcatcatcagcgagcccatgggctacatgctgttcaatgaaagaatgctggagagctacctgcacgccaagaagtacctgaagcccagcggcaacatgttccccaccatcggagatgtgcacctggcccccttcacagatgagcagctgtacatggagcagttcaccaaggccaacttctggtaccagcccagcttccatggagtggacctgagcgccctgcggggagctgctgtggatgagtacttccggcagcctgtggtggacacctttgacatccgcatcctgatggccaagtctgtgaagtacacagtgaacttcctggaggccaaggagggggacctgcaccgcatcgagatccccttcaagttccacatgctgcacagcggcctggtgcacggcctggccttctggtttgatgtggccttcatcggcagcatcatgacagtgtggctgagcacagcccccacagagcccctgacccactggtaccaggtgcgctgcctcttccagagccccctgtttgccaaggccggggacaccctgagcggcacctgcctgctgattgccaacaagaggcagagctatgacatcagcatcgtggcccaggtggaccagacaggcagcaagagcagcaacctgctggacctgaagaaccccttcttccgctacacaggcaccacccccagccccccacctggcagccactacaccagccccagcgagaacatgtggaacacaggcagcacctacaacctgagcagcggcatggctgtggccggcatgcccacagcctatgacctgagcagcgtcatcgccagcggcagctctgtgggccacaacaacctgatccccctgggcagcagcggggcccagggcagcggcggcggcagcaccagcgcccactatgctgtgaacagccagttcaccatgggcggccctgccatctccatggccagccccatgagcatccccaccaacaccatgcactacggcagctag

SEQ ID NO: 19315 - DNA, 771 bp, synthetic construct
  source 1..771: mol_type = other DNA; note = Synthetic coding sequence
atggccagcggccggcctgaggagctgtgggaggccgtggtgggcgctgctgagcgcttccgggccaggactggaacagagctggtgctgctgacagctgcccctcctcctccacccaggcctggcccctgtgcctatgctgcccacggccgcggggccctggccgaggccgcccggcgctgcctgcatgacatcgccctggcccacagagctgccacagctgcccggcccccagcccctcctccagccccccagccccccagccccacccccagccccccccggcccaccctggccagagaagataatgaagaagatgaagatgagcccacagaaacagagaccagcggggagcagctgggcatcagtgacaatggaggcctgtttgtgatggatgaagatgccaccctgcaggacctgccccccttctgtgagagtgaccctgagagcacagatgatggcagcctgtctgaggagaccccagctggcccccccacctgcagcgtgcccccagccagcgccctgcccacccagcagtatgccaagagcctgcctgtgtctgtgcctgtgtggggcttcaaggagaagaggacagaggcccggagcagtgatgaggagaatggaccacccagcagcccagacctggacagaattgctgcctccatgagggccctggtgctgcgggaggccgaggacacccaggtgtttggagacctgccccggccccggctgaacaccagtgacttccagaagctgaagaggaagtactag

SEQ ID NO: 19316 - DNA, 4293 bp, synthetic construct
  source 1..4293: mol_type = other DNA; note = Synthetic coding sequence
atgtgcctggagagcaacctgagcagctgcaagcacctgccctgctgcggcaagctgcacttccagagctgccacggcaatgtgcacaagctgcaccagttccccagcctgcagggctgcaccagcgctggctacttcccctgcagcgacttcaccagcggggcccctggccacctggaggagcacatcagccagagcgagctgaccccccacctgtgcaccaacagcctgcacctgaatgtggtgccccctgtgtgcctgaagggcagcctgtactgtgaggactgcctgaacaagccagccaggaacagcatcattgatgctgccaaggtgtggcccaacatccccccacccaacacccagcctgcccccctggccgtgcccctgtgcaatggctgcggcaccaagggcaccgggaaggagaccaccctgctgctggccaccagcctgggcaaggccgccagcaagtttggcagccctgaggtggccgtggccggccaggtgctggagaacctgccccccatcggggtcttctgggacatcgagaactgcagcgtgcccagcggccgcagcgccacagctgtggtgcagaggatccgggagaagttcttcaagggccaccgggaggccgagttcatctgtgtgtgtgacatcagcaaagaaaacaaggaggtgatccaggagctgaacaactgccaggtgacagtggcccacatcaatgccacagccaagaatgctgctgatgacaagctgcggcagagcctgcggagatttgccaacacccacacagccccagccaccgtggtgctggtgtccacagatgtgaactttgccctggagctgagtgacctgcggcaccgccacggcttccacatcatcctggtgcacaagaaccaggccagcgaggccctgctgcaccacgccaatgaactcatccgctttgaggagttcatcagtgacctgcccccccggctgcccctgaagatgccccagtgccacaccctgctgtatgtgtacaacctgcctgccaacaaggatggcaagtctgtgagcaaccggctgcggcggctgagtgacaactgtggcggcaaggtgctgagcatcaccggctgcagcgccatcctgcgcttcatcaaccaggacagcgctgagcgggcccagaagaggatggagaatgaagatgtgtttgagaagaaggacaaggaggagaccgtcttccaggtgtcctaccccagcgccttcagcaagctggtggccagccggcaggtgagccccctgctggccagccagagctggagcagccgggccagccccctggccttcaacatcgccaacagcagcagcgaggccgactgcccagacccctttgccaacggggctgatgtgcaggtgagcaacatcgactaccgcctgagcaggaaggagctgcagcagctgctgcaggaggcctttgcccggcacggcaaggtgaagtctgtggagctgagcccccacacagactaccagctgaaggctgtggtgcagatggagaacctgcaggatgccatcggggctgtgaacagcctgcaccgctacaagattggcagcaagaagatcctggtgtccctggccaccggggccgccagcaagagcctgagcctgctgcgcttcggccacaagctgaatgtgtctgacctgtacaagctgacagacacagtggccatccgggagcagggcaatggccgcctggtgtgcctgctgcccagcagccaggcccggcagagccccctgggcagcagccagagccatgatggcagcagcaccaactgcagccccatcatctttgaggagctggagtaccacgagcctgtgtgccggcagcactgcagcaacaaggacttctccttcccagactgctacatcgccgagtttggagacctggaggtggtgcaggagaaccagggcggcgtgcccctggagcacttcatcacctgtgtgcctggggtgaacatcgccacagcccagaatggcatcaaggtggtgaagtggatccacaacaagcccccaccacccaacacagacccctggctgctgcggagcaagagccctgtgggcaacccccagctgatccagttcagccgggaggtgattgacctgctgaagagccagcccagctgtgtgatccccatcagccacttcatccccagctaccaccaccactttgccaagcagtgccgggtgtctgactatggctacagcaagctgattgagctgctggaggccgtgccccacgtgctgcagatcctgggcatgggcagcaagaggctgctgaccctgacccaccgggcccaggtgaagcgcttcacccaggacctgctgaagctgctgaagagccaggccagcaagcaggtgattgtgcgggagttcagccaggcctaccactggtgcttcagcaaggactgggatgtgacagaatatggagtgtgtgagctgattgatattgtgtctgagatcccagacaccaccatctgcctgagccagcaggacaatgagatggtgatctgcatccccaagcgggagaggacccaggatgaaattgaaagaaccaagcagttcagcaaggatgtggtggacctgctgcggcaccagccccacttcaggatgcccttcaacaagttcatccccagctaccaccaccacttcggccggcagtgcaagctggcctactacggcttcaccaagctgctggagctgtttgaggccatcccagacaccctgcaggtgctggagtgtggggaggagaagatcctgaccctgacagaggtggagcgcttcaaggccctggccgcccagtttgtgaagctgctgcggagccagaaggacaactgcctgatgatgacagacctgctgacagaatatgccaagaccttcggctacaccttccggctgcaggactatgatgtgagcagcatcagcgccctgacccagaagctgtgccacgtggtgaaggtggccgacatcgagagcggccggcagatccagctgatcaacaggaagagcctgcggagcctgacagcccagctgctggtgctgctgatgtcctgggagggcaccacccacctgtctgtggaggagctgaagaggcactatgagagcacccacaacacccccctgaacccctgtgaatatggcttcatgaccctgacagagctgctgaagagcctgccctacctggtggagacagctgctgcctttgacctgcagatcgagctgaagtttgctgggggctacagcctgctgctggaggagatcctggagtacatccccccacccttcctgagccccctgcccagcttcctgcccccaccacccttcttcttctttgtgttcttcgtcatcttcatcttcttcatctttgtgtttgtgcagtttgtggtgtttgtgttcttcatcgtggtgtttgtgttcttcatcgtggtgtttgtgttcaccaatgacaagatggaggagtgtgtgaagctgaccagcctgtacctgtttgccaagaatgtgcgcagcctgctgcacacctaccactaccagcagatcttcctgcacgagttctccatggcctacaccaagtatgtgggggagaccctgcagcccaagacctacggccacagctctgtggaggagctgctgggcgccatcccccaggtggtggtgcagttcctgcagaagaatggcaaggagctgagctgtgagaactacctgaacctgtatgccaaggccggccgcctgagcagcctgagcctgagccctgccaaccacgagaaccagcccagcgagggggagcgcatcctggaggtgcctgagagccacacagccagcgagctgaagctgggcgcagatggcagcggccccagccacacagagcaggagctgctgcggctgacagatgacagccctgtggacctgctgtgtgcccctgtgcccagctgcctgcccagcccccagctgcggccagaccccgtcatcctgcagagcgctgacctgatccagtttgaggagcggccccaggagcccagcgagatcatgatcctgaaccaggaggagaagatggagatccccatccctgggaagagcaagaccctgaccagtgacagcagcagcagctgcatctctgctgctgtgcctgtgcccccctgccccagcagcgagaccagcgagagcctgctgagcaaggaccctgtggagagccctgccaagaagcagcccaagaacagagtgaagctggccgccaacttcagcctggcccccatcaccaagctgtag

SEQ ID NO: 19317 - DNA, 2346 bp, synthetic construct
  source 1..2346: mol_type = other DNA; note = Synthetic coding sequence
atgggccagctgcgggactggttccccaacacccaggacctggccggaaatgaccaggagaacatcagacatgctgacaggaacaacagtgatgacaaccacctggccagcgaggacaccagcgccaagcagagcggcaagccaggcatctatgaggaccgggaccccctgcgggtgtccatcagccgggagcagagcttcttcggcagccccctggcccatgaccccttcagctgcctgcagctggtgggccaggagaatgtgtgtggagatgattatgatgaggccgtgaagctgaaggagagcgtggtggagaaccacgctgtgctgtcctatgctgtggaggaggagcacgcctacctgggccccaccgtgaagccagatgacaaggccaagaccctgtcctatgagcccctgagcagcgccaccgtgtccacaggcagcctgctgtcctatgaaaatacagacctgagcctgacagatcctgagagcttcagcgagcacatggatgacagcaagcaggagagcaccaccagcaaggaggaggagaccaacatcatcagcagcatcgtgcccagcacccaggacatctaccagaggcagaacagcagtgatgtgcacaagagcctgctgcctgctgtggatgagaccacctgtggccacacccacttccagcagatgattgacaagtacatcaatgaggccaacctgatccctgagaagacagacctgcaggagctggagcacatcttccccaacctgcaccaccagctgttcaagcccctggagccccacccagactttgacctgagcagcagcagcagcggcatcagcccagacaacagagacttctaccagaggagtgacagcagcagcgagagccactgtgccaccggcctgagcaagagcacagtgtacttcaccgccctgcggaggacctccatgcacagcagcctgaacaccagccccaaccagcagcctgacaccaacctggcccacgtgggcgcccacagctttgccacagagaacatcattggaggcagcgagcagtgctttgagcagctgcagcctgagtacagcagccaggaggagagccagcacgccgacctgcccagcatcttcagcattgaggcccgggacagcagccagggcatgaagaaccagaactaccccagcgaggagcacacagagatcctgcagaacaagaagaagatcgtgcacttccagctgagcatcggcaacctgagctctgtgtacagcagcagtgatgaggccaacgtgtttgaccagctgaatgtgcagcacagcaccccctgtggcagcaacagcagtgaatgttccaccaagcaccagctggagagcaggaaggagagcatgggctttgaggagctgagcaagaggggcgtggtgaccatgctgcagagccagggcctgattgaggacaacaagaatgagacctgccgggtgctggacatcaacccccaggtggaggagacagacagccggctgtgtgtgaggacagtggagatgggcaccagcatccaggccccctacagcctgaccacccagaatgagaagtactttgaaaattctgctgagacagacatccccaagatcaccaagaagctgagccagctgggggagagcgagctgtttgccagcagcggcagcttcagcctgcagagcagcatccctgtgtgggagacagaaacaggccacggcatcatggaggagcctgagctgaccctcatcagcaccacagacaccagcattgctgagatggactttgccaacctgaccctggaggagaagtcagaaaatgaggccaagtgcttcttccaggtgtctgagttcctgcccctggtgtctgccacagaggccagtgactacccagctgtgtctgagctgagcattgagaagcccaggacagccagcacagagaccccccggcggctgacccctgtgcccggcagcctgcaggaggccttcatcaagaggaagaagagcttcatggagaggagccaccagaggcagaaggagatccggaacaagatccacgtgtctgagaacagccagatcaagacagtgaaggagaagcccagcatcagcagctctgtgtcccggctgaagggcgtgaacaaggtgcgggccagcttccctgaggacaggaagaccacccaggccctgcggcaccagaggggcctgcggctgtacaaccagctggccgaggtgaagcagcagaaggaggagaagaccaagcaggaggcctatgcccagaacagagcccgggccaaggagttccacaagaagaccctggagaagctgcgggccaagaacacctgctag

SEQ ID NO: 19318 - DNA, 513 bp, synthetic construct
  source 1..513: mol_type = other DNA; note = Synthetic coding sequence
atgggcaagcgctacttctgtgactactgtgaccgctccttccaggacaacctgcacaacaggaagaagcacctgaatggcctgcagcacctgaaggccaagaaggtgtggtatgacatgttcagagatgctgctgccatcctgctggatgagcagaacaagaggccctgcaggaagttcctgctgaccggccagtgtgactttggcagcaactgccgcttcagccacatgtctgagcgggacctgcaggagctgagcatccaggtggaggaggagcggcgggcccgggagtggctgctggatgcccctgagctgcctgagggccacctggaggactggctggagaagagggccaagaggctgagcagcgcccccagcagcagagctgagcccatccgcaccaccgtcttccagtaccctgtgggctggccccctgtgcaggagctgccccccagcctgcgggcccctcctcctgggggctggcccctgcagccccgggtgcagtggggctag

SEQ ID NO: 19319 - DNA, 1542 bp, synthetic construct
  source 1..1542: mol_type = other DNA; note = Synthetic coding sequence
atggcctctgtgctgagccggcggctgggcaagaggagcctgctgggcgcccgggtgctgggccccagcgccagcgagggccccagcgctgccccacccagcgagcccctgctggagggcgccgccccccagcccttcaccaccagtgatgacaccccctgccaggagcagcccaaggaggtgctgaaggcccccagcaccagcggcctgcagcaggtggccttccagcccggccagaaggtgtatgtgtggtatggaggccaggagtgcaccggcctggtggagcagcacagctggatggagggccaggtgacagtgtggctgctggagcagaagctgcaggtgtgctgccgggtggaggaggtgtggctggccgagctgcagggcccctgcccccaggccccacccctggagcccggggcccaggccctggcctacagacctgtgtccagaaatattgatgtgcccaagaggaagagtgatgctgtggagatggatgagatgatggccgccatggtgctgaccagcctgagctgcagccctgtggtgcagagccccccaggcacagaggccaacttcagcgccagccgggccgcctgtgacccctggaaggagagcggggacatcagtgacagcggcagcagcaccaccagcggccactggagcggcagcagtggagtgtccacccccagccccccccacccccaggccagccccaagtacctgggagatgccttcggcagcccccagacagaccacggctttgaaacagatcctgaccccttcctgctggatgagcccgcccccaggaagaggaagaacagcgtgaaggtgatgtacaagtgcctgtggcccaactgtgggaaggtgctgcggagcatcgtgggcatcaagagacatgtgaaggccctgcacctgggggacacagtggacagcgaccagttcaagcgggaggaggacttctactacacagaggtgcagctgaaggaggagagcgctgctgctgctgctgctgctgctgctggcacccctgtgcccggcacccccaccagcgagcccgcccccacccccagcatgacaggcctgcccctgagcgccctgcccccacccctgcacaaggcccagagcagcggccctgagcaccctggccctgagagcagcctgcccagcggggccctgagcaagagcgcccctggcagcttctggcacatccaggccgaccacgcctaccaggccctgcccagcttccagatccctgtgagcccccacatctacacctctgtgtcctgggccgccgcccccagcgctgcctgcagcctgagccctgtgcgcagccgcagcctgtccttcagcgagccccagcagcctgccccagccatgaagagccacctgattgtgaccagccccccccgggcccagagcggggccaggaaggcccggggggaggccaagaagtgcaggaaggtgtatggcatcgagcaccgggaccagtggtgcacagcctgccgctggaagaaggcctgccagcgcttcctggactag

SEQ ID NO: 19320 - DNA, 555 bp, synthetic construct
  source 1..555: mol_type = other DNA; note = Synthetic coding sequence
atgggaaatggcatgaacaagatcctgcccggcctgtacatcggcaacttcaaggatgccagagatgctgagcagctgagcaagaacaaggtgacccacatcctgtctgtgcatgacagcgcccggcccatgctggagggcgtgaagtacctgtgcatcccagctgctgacagccccagccagaacctgaccaggcacttcaaggagagcatcaagttcatccacgagtgccgcctgcggggggagagctgcctggtgcactgcctggccggcgtgagccgctctgtgaccctggtgattgcctacatcatgacagtgacagactttggctgggaggatgccctgcacacagtgcgggccggccgcagctgtgccaaccccaacgtgggcttccagaggcagctgcaggagtttgagaagcatgaggtgcaccagtaccggcagtggctgaaggaggagtatggagagagccccctgcaggatgctgaggaggccaagaacatcctggccgcccctggcatcctgaagttctgggccttcctgcggcggctgtag

SEQ ID NO: 19321 - DNA, 642 bp, synthetic construct
  source 1..642: mol_type = other DNA; note = Synthetic coding sequence
atgctgcagctgcgggacagcgtggacagcgctggcaccagccccacagctgtgctggccgccggggaggaggtgggcgccggcggcggccctgggggcggccggcctggggccggcacccccctgcggcagaccctgtggcccctgagcatccatgaccccacccggcgggcccgggtgaaggagtactttgtgttccggcccggcagcattgagcaggccgtggaggagatccgggtggtggtgcggcctgtggaggatggagagatccagggcgtgtggctgctgacagagcgggagggcttcggcatccgcatccagtgggacaagcagagccggcccagcttcatcaaccgctggaacccctggagcaccaacgtgccctatgccaccttcacagagcaccccatggccggggctgatgagaagacagccagcctgtgccagctggagagcttcaaggccctgctgatccaggccgtgaagaaggcccagaaggagagccccctgcccggccaggccaatggagtgctgatcctggagcggcccctgctgattgagacctacgtgggcctgatgtccttcatcaacaatgaggccaagctgggctacagcatgacccggggcaagattggcttctag

SEQ ID NO: 19322 - DNA, 888 bp, synthetic construct; identical to SEQ ID NO: 19226
  source 1..888: mol_type = other DNA; note = Synthetic coding sequence

SEQ ID NO: 19323 - DNA, 3867 bp, synthetic construct
  source 1..3867: mol_type = other DNA; note = Synthetic coding sequence
atgcccaggaagggcacccagcccagcacagccaggagaagagaggagggccccccaccacccagcccagatggagccagcagtgatgctgagcctgagccccccagcggccgcacagagagccctgccacagctgctgagacagccagcgaggagctggacaacagaagcctggaggagatcctgaacagcatccccccacctcctcctccagccatgaccaatgaagctggggccccccggctgatgatcacccacatcgtgaaccagaacttcaagagctatgctggggagaagatcctgggccccttccacaagcgcttcagctgcatcatcggccccaatggaagtggcaagagcaatgtgattgacagcatgctgtttgtgtttggctaccgggcccagaagatccgcagcaagaagctgtctgtgctgatccacaacagtgatgagcacaaggacatccagagctgcaccgtggaggtgcacttccagaagatcatcgacaaggagggagatgattatgaagtcatccccaacagcaacttctacgtgtccaggacagcctgccgggacaacacctctgtgtaccacatcagcggcaagaagaagaccttcaaggatgtgggcaacctgctgcggagccacggcatcgacctggaccacaaccgcttcctgatcctgcagggcgaggtggagcagatcgccatgatgaagcccaagggccagacagaacatgatgagggcatgctggagtacctggaggacatcatcggctgcggccgcctgaatgagcccatcaaggtgctgtgccggcgggtggagatcctgaatgagcacagaggagagaagctgaacagagtgaagatggtggagaaggagaaggatgccctggagggggagaagaacatcgccatcgagttcctgaccctggagaatgagatcttcaggaagaagaaccacgtgtgccagtactacatctatgagctgcagaagagaattgctgagatggagacccagaaggagaagatccacgaggacaccaaggagatcaatgagaagagcaacatcctgagcaatgagatgaaggccaagaacaaggatgtgaaggacacagagaagaagctgaacaagatcaccaagttcatcgaggagaacaaggagaagttcacccagctggacctggaggatgtgcaggtgcgggagaagctgaagcacgccaccagcaaggccaagaagctggagaagcagctgcagaaggacaaggagaaggtggaggagttcaagagcatcccagccaagagcaacaacatcatcaatgagaccaccaccagaaataatgccctggagaaggagaaggagaaggaggagaagaagctgaaggaggtgatggacagcctgaagcaggagacccagggcctgcagaaggagaaggagagccgggagaaggagctgatgggcttcagcaagtctgtgaatgaggcccggagcaagatggatgtggcccagagcgagctggacatctacctgagccgccacaacacagctgtgtcccagctgaccaaggccaaggaggccctgattgctgccagcgagaccctgaaggagaggaaggccgccatccgggacatcgagggcaagctgccccagacagagcaggagctgaaggagaaggagaaggagctgcagaagctgacccaggaggagaccaacttcaagagcctggtgcatgacctcttccagaaggtggaggaggccaagagcagcctggccatgaacagaagccggggcaaggtgctggatgccatcatccaggagaagaagagcggccgcatccctggcatctacggccgcctgggggacctgggcgccattgatgagaagtatgatgtggccatcagcagctgctgccacgccctggactacatcgtggtggacagcattgacatcgcccaggagtgtgtgaacttcctgaagaggcagaacattggagtggccaccttcatcggcctggacaagatggctgtgtgggccaagaagatgacagagatccagaccccagagaacaccccccggctgtttgacctggtgaaggtgaaggatgagaagatccggcaggccttctactttgccctgcgggacaccctggtggccgacaacctggaccaggccaccagggtggcctaccagaaggaccggcgctggagggtggtgaccctgcagggccagatcatcgagcagagcggcaccatgactggaggcggcagcaaggtgatgaagggccgcatgggcagcagcctggtgattgagatcagcgaggaggaggtgaacaagatggagagccagctgcagaatgacagcaagaaggccatgcagatccaggagcagaaggtgcagctggaggagcgggtggtgaagctgcggcacagcgagcgggagatgaggaacaccctggagaagttcaccgccagcatccagaggctgattgagcaggaggagtacctgaatgtgcaggtgaaggagctggaggccaacgtgctggccacagccccagacaagaagaagcagaagctgctggaggagaatgtgtctgccttcaagacagaatatgatgctgtggccgagaaggccggcaaggtggaggccgaggtgaagaggctgcacaacaccatcgtggagatcaacaaccacaagctgaaggcccagcaggacaagctggacaagatcaacaagcagctggatgaatgtgccagcgccatcaccaaggcccaggtggccatcaagacagctgacaggaacctgcagaaggcccaggacagcgtgctgaggacagagaaggagatcaaggacacagagaaggaggtggatgacctgacagctgagctgaagagcctggaggacaaggctgctgaggtggtgaagaacaccaatgctgctgaggagagcctgcctgagatccagaaggagcacaggaacctgctgcaggagctgaaggtgatccaggagaatgaacatgccctgcagaaggatgccctgagcatcaagctgaagctggagcagattgatggccacatcgccgagcacaacagcaagatcaagtactggcacaaggagatcagcaagatcagcctgcaccccatcgaggacaaccccatcgaggagatctctgtgctgagccctgaggacctggaggccatcaagaacccagacagcatcaccaaccagatcgccctgctggaggcccgctgccacgagatgaagcccaacctgggcgccatcgccgagtacaagaagaaggaggagctgtacctgcagagggtggccgagctggacaagatcacctatgagcgggacagcttccggcaggcctatgaggacctgaggaagcagaggctgaatgagttcatggccggcttctacatcatcaccaacaagctgaaggagaactaccagatgctgaccctgggcggagatgctgagctggagctggtggacagcctggaccccttcagcgagggcatcatgttttctgtgcggccccccaagaagtcctggaagaagatcttcaacctgagcggcggggagaagaccctgagcagcctggccctggtgtttgccctgcaccactacaagcccacccccctgtacttcatggatgaaattgatgctgccctggacttcaagaatgtgtccatcgtggccttctacatctatgagcagaccaagaatgcccagttcatcatcatcagcctgaggaacaacatgtttgagatcagtgaccggctgattggcatctacaagacctacaacatcaccaagtctgtggccgtgaaccccaaggagatcgccagcaagggcctgtgctag

SEQ ID NO: 19324 - DNA, 2856 bp, synthetic construct
  source 1..2856: mol_type = other DNA; note = Synthetic coding sequence
atgctgggctccatggccaggaagaagcccaggaacaccagccggctgcccctggccctgaaccccctgaagagcaaggatgtgctggccgtgctggccgagagaaatgaggccatcgtgcctgtgggcgcctgggtggagcccgccagccctggcagcagcgagatcccagcctacaccagcgcctacctgattgaggaggagctgaaggagcagctgaggaagaagcaggaggccctgaagcacttccagaagcaggtgaagtacagagtgaaccagcagatccggctgaggaagaagcagcagctgcagaagagctatgagcgggcccagaaggagggcagcatcgccatgcagagcagcgccacccacctgaccagcaagaggacctctgtgttccccaacaacctgaatgtggccatcggcagcagccggctgccccccagcctgatgcctggagatggcattgaagatgaggagaaccagaatgaactcttccagcagcaggcccaggccctgtctgagaccatgaagcaggcccggcaccggctggccagcttcaagacagtcatcaagaagaagggcagcgtcttcccagatgatggcaggaagagcttcctgacccgggaggaggtgctgagcaggaagccagccagcacaggcatcaacacaggcatccggggggagctgcccatcaaggtgcaccagggcctgctggccgctgtgccctaccagaactacatggagaaccaggagctggactatgaggagccagactatgaggagagcagcagcctggtgacagatgagaagggcaaggaggacctgtttggccggggccagcaggaccagcaggccatccacagcgaggacaagaacaagcccttcagccgggtgcagaaggtgaagttcaagaaccccctgtttgtgctgatggaggaggaggagcagaagcagctgcactttgagggcctgcaggacatcctgcctgaggcccaggactacttcctggaggcccagggcgacctgctggagacccagggcgacctgaccggcatccagagcgtgaagccagacacccaggccgtggagatgaaggtgcaggtgacagagcctgagggccaggccatcgagcctgagggccagcccatcaagacagagacccagggcatcatgctgaaggcccagagcattgagctggaggagggcagcatcgtgctgaagacccaggacttcctgcccaccaaccaggccctgctgaccaagaaccaggatgtgctgctgaaggaccactgtgtgctgcccaaggaccagagcatcctgctgaagtaccaggaccaggacttcctgccccgggaccagcacgtgctgcacaaggaccaggacatcctgcccaagtaccaggaccagaacttcctgcccaaggaccagaacttcctgagccgggaccagcacgtgctgcccaaggaccaggacatcctgcccaagtaccaggaccagaacttcctgcccaaggaccagaacttcctgagccgggaccagcacgtgctgcccaaggaccagaacatcctgcccaagtaccagggccaggacttcctgcccaaggaccaggacttcctgagccgggaccagcacgtgctgcccaaggactggaacatcctgcccaagtgccaggaccaggacttcctgccccgggaccagggcgtgctgcccaaggaccagaacatcctgcccatctgccaggaccaggacttcctgccccgggaccagggctacctgcccaaggaccagaacatcctgcccatctgccaggaccgggacttcctgccccgggacctgcacgtgctgagcaatgaccagaacatcctgcccaagtgccaggaccaggacttcctgcccaagtaccagaaggtgcacttcaaggagccctacagcgacatgacagatgagaagggccgggaggacttcagcctggccgactaccagtgcctgccccccaagagccaggaccaggatgacatcaagaaccagcagcctgccagcttcatgagggaggagcgggtgcgggaggagctgcccctggactaccaccagtatgtggtgcccaagatccaggaccaggacagcccccgggagcagaacaagcacatcaagctgcccagcagctttgagaagtgggagatcgcccggggcaacaccccaggagtgcccctggcctatgaccgctaccagagcggcctgagcacagagttccaggcccccctggccttccagagtgatgtggacaaggaggaggacaagaaggagcggcagaagcagtacctgcggcaccggcggctcttcatggacatcgagcgggagcaggtgaaggagcagcagaggcagaaggagcagaagaagaagattgagaagatcaagaagaagcgggagcaggagtgctatgctgctgagcagaggatcctgaggatgaacttccacgaggacccctacagcggggagaagctgtctgagatcctggcccagctgcagctgcaggagatcaagggcacccgggagaagcagcagcgggagaaggagtacctgcgctacgtggaggccctgcgggcccagatccaggagaagatgcagctgtacaacatcaccctgccccccctgtgctgctgcggccctgacttctgggatgcccacccagacacctgtgccaacaactgcatcttctacaagaaccaccgggcctacacccgggccctgcacagcttcatcaacagctgtgatgtgcctgggggcaacagcaccctgcgggtggccatccacaactttgccagcgcccacaggaggaccctgaagaacctgtag

SEQ ID NO: 19325 - DNA, 1248 bp, synthetic construct
  source 1..1248: mol_type = other DNA; note = Synthetic coding sequence
atgagccctgaggtggccctgaaccgcatcagccccatgctgagccccttcatcagctctgtggtgagaaatggcaaggtgggcctggatgccaccaactgcctgcgcatcacagacctgaagagcggctgcaccagcctgaccccaggccccaactgtgaccgcttcaagctgcacatcccctatgctggggagaccctgaagtgggacatcatcttcaatgcccagtacccagagctgcccccagacttcatctttggagaagatgctgagttcctgcctgaccccagcgccctgcagaacctggcctcctggaaccccagcaacccagaatgtctgctgctggtggtgaaggagctggtgcagcagtaccaccagttccagtgcagccggctgcgggagagcagccggctgatgtttgagtaccagaccctgctggaggagccccagtatggagagaacatggagatctatgccggcaagaagaacaactggacaggagagttcagcgcccgcttcctgctgaagctgcctgtggacttcagcaacatccccacctacctgctgaaggatgtgaatgaagaccccggggaggatgtggccctgctgtctgtgtcctttgaggacacagaggccacccaggtgtaccccaagctgtacctgagccccagaattgaacatgccctgggcggcagcagcgccctgcacatcccagccttccctgggggcggctgcctgattgattatgtgccccaggtgtgccacctgctgaccaacaaggtgcagtatgtgatccagggctaccacaagagaagagagtacatcgccgccttcctgagccacttcggcaccggggtggtggagtatgatgctgagggcttcaccaagctgaccctgctgctgatgtggaaggacttctgcttcctggtgcacatcgacctgcccctcttcttcccccgggaccagcccaccctgaccttccagagcgtgtaccacttcaccaacagcggccagctgtacagccaggcccagaagaactacccctacagcccccgctgggatggaaatgagatggccaagagggccaagggctgccagggcagcagagatgcctgcagcccctgggagcaggtgctggcctttgctgtggccaagacaggctgcaagctgctgcagccccagaggaactggcccagcagccggggccccccctggagggccagcgagggggagaggacagcccagtag

SEQ ID NO: 19326 - DNA, 903 bp, synthetic construct
  source 1..903: mol_type = other DNA; note = Synthetic coding sequence
atgctgtctgctgtggcccggggctaccagggctggttccacccctgtgcccggctgtctgtgaggatgagcagcacaggcatcgacagaaaaggagtgctggccaacagagtggccgtggtgacaggcagcaccagcggcatcggctttgccatcgcccggcggctggccagagatggagcccacgtggtgatcagcagcaggaagcagcagaatgtggaccgggccatggccaagctgcagggcgagggcctgtctgtggccggcatcgtgtgccacgtgggcaaggccgaggaccgggagcagctggtggccaaggccctggagcactgcggcggcgtggacttcctggtgtgcagcgctggggtgaaccccctggtgggcagcaccctgggcaccagcgagcagatctgggacaagatcctgtctgtgaatgtgaagagccctgccctgctgctgagccagctgctgccctacatggagaacagaagaggagctgtgatcctggtgagcagcattgctgcctacaaccctgtggtggccctgggcgtgtacaacgtgtccaagacagccctgctgggcctgaccaggaccctggccctggagctggcccccaaggacatccgggtgaactgtgtggtgcccggcatcatcaagacagacttcagcaaggtggtgcgcatcggcttcatgggcatgagcctgagcggccgcaccagcaggaacatcatcagctgccggggcctgggcagccagaggacagtgcaggagagctgccccagctgtgccctgcagatgcctgccaccagcactggaagaaccctgcgctggcaggccacccccctgggcagcgagaggtctgggggcggctgtgtggccgtggtgcccggccctggggcctag

SEQ ID NO: 19327 - DNA, 1014 bp, synthetic construct
  source 1..1014: mol_type = other DNA; note = Synthetic coding sequence
atgagatttgacaccctgtgggagaacaagctgatgcagagcagagctgtggatggcttccacagcgaggagcagcagctgctgctgcaggtgcagcagcagcaccagccccagcagcagcagcaccaccaccaccaccaccaccagcaggcccagccccagcagacagtgccccagcaggcccagacccagcaggtgctgatcccagccagccagcaggccacagccccccaggtgattgtgcctgacagcaagctgatccagcacatgaatgccagcaacatgtctgctgctgccacagctgccaccctggccctgcctgctggggtgacccctgtgcagcagatcctgaccaacagcggccagctgctgcaggtggtgcgggccgccaatggagcccagtacatcttccagccccagcagagcgtggtgctgcagcagcaggtgatcccccagatgcagcctggaggagtgcaggcccctgtgatccagcaggtgctggcccccctgcccggcggcatcagcccccagacaggagtcatcatccagccccagcagatcctcttcaccggcaacaagacccaggtgatccccaccaccgtggccgcccccaccccagcccaggcccagatcacagccaccggccagcagcagccccaggcccagcctgcccagacccaggcccccctggtgctgcaggtggatggcactggagacaccagcagcgaggaggatgaagatgaggaggaggactatgatgatgatgaggaggaggacaaggagaaggatggagcagaagatggccaggtggaggaggagcccctgaacagtgaagatgatgtgtctgatgaggagggccaggagctgtttgacacagaaaatgtggtggtgtgccagtatgacaagatccacaggagcaagaacaagtggaagttccacctgaaggatggcatcatgaacctgaatggccgggactacatcttcagcaaggccatcggagatgctgagtggtag

SEQ ID NO: 19328 - DNA, 282 bp, synthetic construct
  source 1..282: mol_type = other DNA; note = Synthetic coding sequence
atggcccagagcggcggggaggcccggcccggccccaagacagctgtgcagatccgggtggccatccaggaggccgaggatgtggatgagctggaggatgaggaggagggcgctgagaccagaggagctggggaccctgcccgctacctgagccctggctggggcagcgccagcgaggaggagcccagccggggccacaggaacagaagctctgtgaacagcaggaccatgctggccagcttcatcgtgtcctctgcccccagcacagcccccagcacctag

SEQ ID NO: 19329 - DNA, 255 bp, synthetic construct
  source 1..255: mol_type = other DNA; note = Synthetic coding sequence
atgaaggtgaagatcaagtgctggaatggagtggccacctggctgtgggtggccaatgatgagaactgtggcatctgcaggatggccttcaacggctgctgcccagactgcaaggtgcctggagatgactgccccctggtgtggggccagtgcagccactgcttccacatgcactgcatcctgaagtggctgcacgcccagcaggtgcagcagcactgccccatgtgccggcaggagtggaagttcaaggagtag

SEQ ID NO: 19330 - DNA, 612 bp, synthetic construct; identical to SEQ ID NO: 18852
  source 1..612: mol_type = other DNA; note = Synthetic coding sequence

SEQ ID NO: 19331 - DNA, 1794 bp, synthetic construct
  source 1..1794: mol_type = other DNA; note = Synthetic coding sequence
atgcccagcccccagctgctggtgctgtttggcagccagacaggaacagcccaggatgtgtctgagcggctgggccgggaggccaggagaagaaggctgggctgccgggtgcaggccctggacagctaccctgtggtgaacctgatcaatgagcccctggtgatctttgtgtgtgccaccaccggccagggcgaccccccagacaacatgaagaacttctggaggttcatcttcaggaagaacctgcccagcacagccctgtgccagatggactttgctgtgctgggcctgggggacagcagctatgccaagttcaactttgtggccaagaagctgcaccggcggctgctgcagctgggcggcagcgccctgctgcctgtgtgcctgggagatgaccagcacgagctgggcccagatgctgctgtggacccctggctgcgggacctgtgggacagagtgctgggcctgtacccacctcctcctggcctgacagagatccccccaggagtgcccctgcccagcaagttcaccctgctcttcctgcaggaggcccccagcactggaagtgagggccagagggtggcccaccctggcagccaggagccccccagcgagagcaagcccttcctggcccccatgatcagcaaccagagggtgacaggccccagccacttccaggatgtgcggctgattgaatttgacatcctgggcagcggcatcagctttgctgctggagatgtggtgctgatccagcccagcaacagcgctgcccacgtgcagcgcttctgccaggtgctgggcctggaccctgaccagctgttcatgctgcagccccgggagccagatgtgagcagccccacccggctgccccagccctgcagcatgaggcacctggtgagccactacctggacatcgcctctgtgccccggcgctccttctttgagctgctggcctgcctgagcctgcacgagctggagcgggagaagctgctggagttcagcagcgcccagggccaggaggagctgtttgagtactgcaaccggcccaggaggaccatcctggaggtgctgtgtgacttcccccacacagctgctgccatccccccagactacctgctggacctgatccctgtgatccggccccgggccttcagcatcgccagcagcctgctgacccaccccagccggctgcagatcctggtggccgtggtgcagttccagacccggctgaaggagccccggcggggcctgtgcagctcctggctggccagcctggaccccggccagggccctgtgcgggtgcccctgtgggtgcggcccggcagcctggccttccctgagaccccagacacccctgtgatcatggtgggccctggcaccggggtggcccccttccgggccgccatccaggagcgggtggcccagggccagacaggcaacttcctgttcttcggctgccgctggagggaccaggacttctactgggaggccgagtggcaggagctggagaagagggactgcctgaccctcatcccagccttcagccgggagcaggagcagaaggtgtatgtgcagcaccggctgcgggagctgggcagcctggtgtgggagctgctggaccggcagggcgcctacttctacctggccggaaatgccaagtccatgccagcagatgtgtctgaggccctgatgagcatcttccaggaggagggcggcctgtgcagcccagatgctgctgcctacctggcccggctgcagcagacccggcgcttccagacagagacctgggcctag

SEQ ID NO: 19332 - DNA, 1860 bp, synthetic construct
  source 1..1860: mol_type = other DNA; note = Synthetic coding sequence
atggatgaccagcaggccctgaacagcatcatgcaggacctggccgtgctgcacaaggccagcaggcctgccctgagcctgcaggagaccaggaaggccaagagcagcagccccaagaagcagaatgatgtgcgggtgaagtttgagcacagaggagagaagaggatcctgcagttccccaggcctgtgaagctggaggacctgcggagcaaggccaagatcgccttcggccagagcatggacctgcactacaccaacaatgagctggtgatccccctgaccacccaggatgacctggacaaggctgtggagctgctggacaggagcatccacatgaagagcctgaagatcctgctggtgatcaatggcagcacccaggccaccaacctggagcccctgcccagcctggaggacctggacaacacagtgtttggagctgagaggaagaagaggctgagcatcatcggccccaccagccgggacaggagcagccccccacctggctacatcccagatgagctgcaccaggtggccagaaatggcagcttcaccagcatcaacagcgagggggagttcatccctgagagcatggaccagatgctggaccccctgagcctgagcagccctgagaacagcggcagcggcagctgccccagcctggacagccccctggatggagagagctaccccaagagcaggatgccccgggcccagagctacccagacaaccaccaggagttcagtgactatgacaaccccatctttgagaagtttgggaagggcggcacctacccccggcgctaccacgtgtcctaccaccaccaggagtacaatgatggcaggaagaccttcccccgggcccggaggacccagggcaccagcctgcggagccctgtgtccttcagccccacagaccacagcctgagcaccagcagcggcagcagcatcttcaccccagaatatgatgacagccgcatcagaagaagaggaagtgacatcgacaaccccaccctgactgtgatggacatcagcccccccagccgcagcccccgggcccccaccaactggaggctgggcaagctgctgggccagggcgccttcggccgggtgtacctgtgctatgatgtggacaccggccgggagctggccgtgaagcaggtgcagtttgatcctgacagccctgagaccagcaaggaggtgaatgccctggagtgtgagatccagctgctgaagaacctgctgcacgagcgcatcgtgcagtactacggctgcctgcgggacccccaggagaagaccctgagcatcttcatggagtacatgcctgggggcagcatcaaggaccagctgaaggcctacggggccctgacagaaaatgtgaccaggaagtacacccggcagatcctggagggcgtgcactacctgcacagcaacatgattgtgcaccgggacatcaagggggccaacatcctgcgggacagcactggaaatgtgaagctgggggactttggagccagcaagaggctgcagaccatctgcctgagcggcaccggcatgaagtctgtgacaggcaccccctactggatgagccctgaggtgatcagcggggagggctacggcaggaaggctgacatctggagcgtggcctgcaccgtggtggagatgctgacagagaagccaccctgggccgagtttgaggccatggccgccatcttcaagatcgccacccagcccaccaaccccaagctgccccctcatgtgtctgactacacccgggacttcctgaagaggatctttgtggaggccaagctgcggcccagcgcagatgagctgctgcggcacatgtttgtgcactaccactag

SEQ ID NO: 19333 - DNA, 828 bp, synthetic construct
  source 1..828: mol_type = other DNA; note = Synthetic coding sequence
atgagcaccatcggcagctttgagggcttccaggccgtgtccctgaagcaggagggagatgaccagcccagcgagacagaccacctgtccatggaggaggaggaccccatgccccggcagatcagccggcagagctctgtgacagagagcaccctgtaccccaacccctaccaccagccctacatcagcaggaagtactttgccaccaggcctggggccatcgagacagccatggaggacctgaagggccacgtggccgagaccagcggggagaccatccagggcttctggctgctgaccaagattgaccactggaacaatgagaaggagcgcatcctgctggtgacagacaagaccctgctgatctgcaagtatgacttcatcatgctgagctgtgtgcagctgcagaggatccccctgtctgctgtgtaccgcatctgcctgggcaagttcaccttccctggcatgagcctggacaagaggcagggcgagggcctgcgcatctactggggcagccctgaggagcagagcctgctgagccgctggaacccctggagcacagaggtgccctatgccaccttcacagagcaccccatgaagtacaccagcgagaagttcctggagatctgcaagctgagcggcttcatgagcaagctggtgcctgccatccagaatgcccacaagaacagcactggaagtggccggggcaagaagctgatggtgctgacagagcccatcctgattgagacctacacaggcctgatgtccttcatcggcaacagaaacaagctgggctacagcctggcccggggcagcatcggcttctag

SEQ ID NO: 19334 - DNA, 1629 bp, synthetic construct
  source 1..1629: mol_type = other DNA; note = Synthetic coding sequence
atggctgctgctgctggagctgctgctgcccctggcagccgggagccccaggacagaccagaatgtggggccggccaccctggcccccgctactaccgccaccctgagcgctggctgctgcggcctgaggccttcctgggccccctgcggacccgggcccccagcgctgaggacagccagcgggagaggcctgctgcccggagcggccctgccatgagccggcgggtggtgcggcagagcaagttccgccacgtgtttggccaggccgccaaggctgaccaggcctatgaggacatccgggtgtccaaggtgacctgggacagcagcttctgtgctgtgaaccccaagttcctggccatcatcgtggaggccggcggcggcggggccttcatcgtgctgcccctggccaagacaggccgggtggacaagaactaccccctggtgacaggccacacagcccctgtgctggacatcgactggtgcccccacaatgacaacgtcatcgccagcgccagtgatgacaccaccatcatggtgtggcagatcccagactacacccccatgaggaacatcacagagcccatcatcaccctggagggccacagcaagagggtgggcatcctgtcctggcaccccacagccagaaatgtgctgctgtctgctggaggagacaacgtcatcatcatctggaatgtgggcaccggggaggtgctgctgagcctggatgacatgcacccagatgtgatccacagcgtgtgctggaacagcaatggcagcctgctggccaccacctgcaaggacaagaccctgcgcatcatcgaccccaggaagggccaggtggtggccgagagatttgctgcccacgagggcatgaggcccatgagagctgtgttcacccggcagggccacatcttcaccaccggcttcaccaggatgagccagcgggagctgggcctgtgggaccccaacaactttgaggagcctgtggccctgcaggagatggacaccagcaatggagtgctgctgcccttctatgaccctgacagcagcatcgtgtacctgtgtgggaaaggagacagcagcatccgctactttgagatcacagatgagcccccatttgtgcactacctgaacaccttcagcagcaaggagccccagaggggcatgggcttcatgcccaagaggggcctggatgtgtccaaatgtgagatcgcccgcttctacaagctgcacgagaggaaatgtgagcccatcatcatgacagtgcccaggaagagtgacctcttccaggatgacctgtacccagacaccccaggccctgagcccgccctggaggctgatgagtggctgagcggccaggatgctgagcctgtgctgatcagcctgagagatggctacgtgccccccaagcaccgggagctgcgggtgaccaagaggaacatcctggatgtgcggccccccagcggccccaggaggagccagagcgccagtgatgcccccctgagccagcacaccctggagaccctgctggaggagatcaaggccctgcgggagcgggtgcaggcccaggagcagaggatcacagccctggagaacatgctgtgtgagctggtggatggaacagactag

SEQ ID NO: 19335 - DNA, 2550 bp, synthetic construct
  source 1..2550: mol_type = other DNA; note = Synthetic coding sequence
atgtctgacacccggcggcgggtgaaggtgtacaccctgaatgaagatcggcagtgggatgaccggggcaccggccacgtgagcagcacctacgtggaggagctgaagggcatgagcctgctggtgcgggcagagagtgatggcagcctgctgctggagagcaagatcaaccccaacacagcctaccagaagcagcaggacaccctcatcgtgtggagcgaggccgagaactatgacctggccctgtccttccaggagaaggccggctgtgatgagatctgggagaagatctgccaggtgcagggcaaggaccccagcgtggaggtgacccaggacctgattgatgaaagtgaggaggagagatttgaggagatgcctgagaccagccacctgattgacctgcccacctgtgagctgaacaagctggaggagattgctgacctggtgacctctgtgctgagcagccccatccggcgggagaagctggccctggccctggagaatgaaggctacatcaagaagctgctgcagctgttccaggcctgtgagaacctggagaacacagagggcctgcaccacctgtatgagatcatccggggcatcctcttcctgaacaaggccaccctgtttgaggtgatgttcagtgatgagtgcatcatggatgtggtgggctgcctggagtatgaccctgccctggcccagcccaagaggcaccgggagttcctgaccaagacagccaagttcaaggaggtgatccccatcacagattctgagctgcggcagaagatccaccagacctacagagtgcagtacatccaggacatcatcctgcccaccccatctgtgtttgaggagaacttcctgagcaccctgaccagcttcatcttcttcaacaaggtggagatcgtgtccatgctgcaggaggatgagaagttcctgtctgaggtgtttgcccagctgacagatgaggccacagatgatgacaagaggcgggagctggtgaacttcttcaaggagttctgtgccttcagccagaccctgcagccccagaacagagatgccttcttcaagaccctggccaagctgggcatcctgcctgccctggagatcgtgatgggcatggatgacctgcaggtgcgctctgctgccacagacatcttctcctacctggtggagttcagccccagcatggtgcgggagtttgtgatgcaggaggcccagcagagtgatgatgacatcctgctgatcaacgtggtgattgagcagatgatctgtgacacagatcctgagctgggcggcgctgtgcagctgatgggcctgctgcggaccctgattgatcctgagaacatgctggccaccaccaacaagacagagaagtctgagttcctgaacttcttctacaaccactgcatgcacgtgctgacagcccccctgctgaccaacaccagcgaggacaagtgtgagaaggacttcttcctgaagcactaccgctacagctggagcttcatctgcacccccagccacagccacagccacagcacccccagcagcagcatcagccaggacaacatcgtgggcagcaacaagaacaacaccatctgcccagacaactaccagacagcccagctgctggccctgatcctggagctgctgaccttctgtgtggagcaccacacctaccacatcaagaactacatcatgaacaaggacctgctgcggcgggtgctggtgctgatgaacagcaagcacaccttcctggccctgtgtgccctgcgcttcatgaggcgcatcatcggcctgaaggatgagttctacaaccgctacatcaccaagggcaacctgtttgagcctgtgatcaatgccctgctggacaatggcacccgctacaacctgctgaacagcgctgtgattgagctgtttgagttcatccgggtggaggacatcaagagcctgacagcccacatcgtggagaacttctacaaggccctggagagcattgaatatgtgcagaccttcaagggcctgaagaccaagtatgagcaggagaaggaccggcagaaccagaagctgaacagcgtgcccagcatcctgcggagcaaccgcttcagaagagatgccaaggccctggaggaggatgaggagatgtggttcaatgaagatgaggaggaggagggcaaggctgtggtggcccctgtggagaagcccaagccagaagatgacttcccagacaactatgagaagttcatggagaccaagaaggccaaggagagcgaggacaaggagaacctgcccaagaggaccagccctgggggcttcaagttcaccttcagccacagcgccagcgctgccaacggcaccaacagcaagtctgtggtggcccagatccccccagccaccagcaatggcagcagcagcaagaccaccaacctgcccacctctgtgacagccaccaagggcagcctggtgggcctggtggactacccagatgatgaggaggaggatgaggaggaggagagcagccccaggaagaggccccggctgggcagctag

SEQ ID NO: 19336 - DNA, 669 bp, synthetic construct
  source 1..669: mol_type = other DNA; note = Synthetic coding sequence
atgggagacatcccagctgtgggcctgagctcctggaaggccagccctgggaaggtgacagaggccgtgaaggaggccattgatgctggctaccgccactttgactgtgcctacttctaccacaatgaaagagaggtgggcgccggcatccgctgcaagatcaaggagggcgctgtgcggcgggaggacctcttcatcgccaccaagctgtggtgcacctgccacaagaagagcctggtggagacagcctgcaggaagagcctgaaggccctgaagctgaactacctggacctgtacctgatccactggcccatgggcttcaagccaccccaccctgagtggatcatgagctgcagcgagctgtccttctgcctgagccacccccgggtgcaggacctgcccctggatgagagcaacatggtgatccccagcgacacagacttcctggacacctgggagatcctgatccgcttccagatccagagaaatgtgattgtcatccctggcagcatcacccccagccacatcaaggagaacatccaggtgtttgattttgagctgacccagcacgacatggacaacatcctgagcctgaacagaaacctgcggctggccatgttccccatcaccaagaaccacaaggactaccccttccacatcgagtactag

SEQ ID NO: 19337 - DNA, 1080 bp, synthetic construct
  source 1..1080: mol_type = other DNA; note = Synthetic coding sequence
atgcccaaccccagcagcaccagcagcccctaccccctgcctgaggagatccggaacctgctggctgatgtggagacctttgtggccgacatcctgaagggggagaacctgagcaagaaggccaaggagaagcgggagagcctcatcaagaagatcaaggatgtgaagagcatctacctgcaggagttccaggacaagggagatgctgaagatggagaggagtatgatgacccctttgctggccccccagacaccatcagcctggccagcgagagatatgacaaggatgatgaggcccccagtgatggagcccagtttcctcccatcgccgcccaggacctgccctttgtgctgaaggccggctacctggagaagaggaggaaggaccacagcttcctgggctttgagtggcagaagcgctggtgtgccctgagcaagacagtgttctactactacggcagtgacaaggacaagcagcagaagggggagtttgccattgatggctacagcgtgaggatgaacaacaccctgaggaaggatggcaagaaggactgctgctttgagatcagcgccccagacaagaggatctaccagttcaccgctgccagccccaaggatgctgaggagtgggtgcagcagctgaagtttgtgctgcaggacatggagagtgacatcatccctgaggactatgatgagcggggggagctgtatgatgatgtggaccaccccctgcccatcagcaaccccctgaccagcagccagcccattgatgatgagatctatgaggagctgcctgaggaggaggaggacagcgcccctgtgaaggtggaggagcagaggaagatgagccaggacagcgtgcaccacaccagcggggacaagagcacagattatgccaacttctaccagggcctgtgggactgcacaggagccttcagtgatgagctgtccttcaagagaggagatgtgatctacatcctgagcaaggagtacaacagatatggctggtgggtgggggagatgaagggggccatcggcctggtgcccaaggcctacatcatggagatgtatgacatctag

SEQ ID NO: 19338 - DNA, 1227 bp, synthetic construct
  source 1..1227: mol_type = other DNA; note = Synthetic coding sequence
atgaagtgtgagcactgcaccaggaaggagtgcagcaagaagaccaagacagatgaccaggagaatgtgtctgcagatgcccccagccctgcccaggagaatggagagaagtgtgacaccagcaagcacaaggtgctggtggtgtctgtgtgcccccagagcctgccctactttgctgccaagttcaacctgtctgtgacagatgccagccggcggctgtgtggcttcctgaagagcctgggcgtgcactacgtgtttgacaccaccatcgctgctgacttcagcatcctggagagccagaaggagtttgtgcggcgctaccggcagcacagcgaggaggagaggaccctgcccatgctgaccagcgcctgccccggctgggtgcgctatgcagagcgggtgctgggccggcccatcacagcccacctgtgcacagccaagagcccccagcaggtgatgggcagcctggtgaaggactactttgcccggcagcagaacctgagccctgagaagatcttccacgtgattgtggccccctgctatgacaagaagctggaggccctgcaggagagcctgcccccagccctgcacggcagcagaggagctgactgtgtgctgaccagcggggagatcgcccagatcatggagcagggcgacctgtctgtgagagatgctgctgtggacaccctgtttggagacctgaaggaggacaaggtgaccaggcatgatggagccagcagtgatggccacctggcccacatcttcagacatgctgccaaggagctgttcaatgaagatgtggaggaggtgacctaccgggccctgaggaacaaggacttccaggaggtgaccctggagaagaatggagaggtggtgctgcgctttgctgctgcctacggcttcaggaacatccagaacatgatcctgaagctgaagaagggcaagttccccttccactttgtggaggtgctggcctgtgccggcggctgcctgaatggccggggccaggcccagaccccagatggccacgccgacaaggccctgctgcggcagatggagggcatctatgctgacatccctgtgcggcggcctgagagcagcgcccacgtgcaggagctgtaccaggagtggctggagggcatcaacagccccaaggcccgggaggtgctgcacaccacctaccagagccaggagcggggcacccacagcctggacatcaagtggtag

SEQ ID NO: 19339 - DNA, 1104 bp, synthetic construct
  source 1..1104: mol_type = other DNA; note = Synthetic coding sequence
atggccctgaatgtggcccctgtgcgggacaccaagtggctgaccctggaggtgtgccggcagttccagaggggcacctgcagcagaagtgatgaggagtgcaagtttgcccacccccccaagagctgccaggtggagaatggccgggtgattgcctgctttgacagcctgaagggccgctgcagccgggagaactgcaagtacctgcacccccccacccacctgaagacccagctggagatcaatggaagaaacaacctgatccagcagaagacagctgctgccatgctggcccagcagatgcagttcatgtttcctggcacccccctgcaccctgtgcccaccttccctgtgggccctgccatcggcaccaacacagccatcagctttgccccctacctggcccctgtgaccccaggagtgggcctggtgcccacagagatcctgcccaccacccctgtgattgtgcccggcagcccccctgtgacagtgcccggcagcacagccacccagaagctgctgaggacagacaagctggaggtgtgccgggagttccagaggggcaactgtgcccggggggagacagactgccgctttgcccaccctgctgacagcaccatgattgacaccagtgacaacacagtgacagtgtgcatggactacatcaagggccgctgcatgagggagaagtgcaagtacttccaccccccagcccacctgcaggccaagatcaaggccgcccagcaccaggccaaccaggccgctgtggccgcccaggccgctgctgctgctgccaccgtgatggccttccccccaggggccctgcaccccctgcccaagaggcaggccctggagaagagcaatggcaccagcgctgtgttcaaccccagcgtgctgcactaccagcaggccctgaccagcgcccagctgcagcagcacgccgccttcatccccactggatctgtgctgtgcatgaccccagccaccagcatcgtgcccatgatgcacagcgccaccagcgccaccgtgtctgctgccaccaccccagccacctctgtgccctttgctgccacagccacagccaaccagatcatcctgaagtag

SEQ ID NO: 19340 - DNA, 3909 bp, synthetic construct
  source 1..3909: mol_type = other DNA; note = Synthetic coding sequence
atggccctgcggcctggagctggcagcggcggcggcggcgctgctggagctggagctggcagcgctgggggcggcggcttcatgtttcctgtggccggcggcatccggcccccccaggccggcctgatgcccatgcagcagcagggcttccccatggtgtctgtgatgcagcccaacatgcagggcatcatgggcatgaactacagcagccagatgagccagggccccatcgccatgcaggccggcatccccatgggccccatgcctgctgctggcatgccctacctgggccaggcccccttcctgggcatgaggcctcctggcccccagtacaccccagacatgcagaagcagtttgctgaggagcagcagaagagatttgagcagcagcagaagctgctggaggaggagaggaagaggcggcagtttgaggagcagaagcagaagctgcggctgctgagctctgtgaagcccaagacaggagagaagagcagagatgatgccctggaggccatcaagggcaacctggatggcttcagcagagatgccaagatgcaccccaccccagccagccaccccaagaagccaggccccagcctggaggagaagttcctggtgtcctgtgacatcagcaccagcggccaggagcagatcaagctgaacaccagcgaggtgggccacaaggccctgggccctggcagcagcaagaagtaccccagcctgatggccagcaatggagtggccgtggatggctgtgtgtctggcaccaccacagctgaggccgagaacaccagtgaccagaacctgagcattgaggagagcggcgtgggcgtcttccccagccaggaccctgcccagcccaggatgccaccctggatctacaatgaaagcctggtgcctgatgcctacaagaagatcctggagaccaccatgacccccaccggcatcgacacagccaagctgtaccccatcctgatgagcagcggcctgccccgggagaccctgggccagatctgggccctggccaacagaaccaccccaggcaagctgaccaaggaggagctgtacacagtgctggccatgattgctgtgacccagaggggcgtgcctgccatgagcccagatgccctgaaccagtttcctgctgcccccatccccaccctgagcggcttctccatgaccctgcccacccctgtgtcccagcccaccgtcatccccagcggccctgctggctccatgcccctgagcctgggccagcctgtgatgggcatcaacctggtgggccctgtgggcggggccgccgcccaggccagcagcggcttcatccccacctacccagccaaccaggtggtgaagccagaagaagatgacttccaggacttccaggatgccagcaagagcggcagcctggatgacagcttcagtgacttccaggagctgcctgccagcagcaagaccagcaacagccagcacggcaacagcgcccccagcctgctgatgcccctgcccggcaccaaggccctgcccagcatggacaagtatgctgtgttcaagggcattgctgctgacaagagcagtgaaaatacagtgcccccaggggaccccggggacaagtacagcgccttccgggagctggagcagacagctgagaacaagcccctgggggagagctttgctgagttccgctctgctggaacagatgatggcttcacagacttcaagacagctgacagcgtgagccccctggagccccccaccaaggacaagaccttcccccccagcttccccagcggcaccatccagcagaagcagcagacccaggtgaagaaccccctgaacctggccgacctggacatgttcagctctgtgaactgcagcagcgagaagcccctgtccttctctgctgtgttcagcaccagcaagtctgtgtccaccccccagagcactggatctgctgccaccatgacagccctggccgccaccaagaccagcagcctggctgatgactttggagagttcagcctgtttggagagtacagcggcctggcccctgtgggggagcaggatgactttgctgacttcatggccttcagcaacagcagcatcagcagcgagcagaagccagatgacaagtatgatgccctgaaggaggaggccagccctgtgcccctgaccagcaatgtgggcagcacagtgaagggcggccagaacagcacagctgccagcaccaagtatgatgtgttccggcagctgagcctggagggcagcggcctgggcgtggaggacctgaaggacaacaccccatctgggaagagtgatgatgactttgctgacttccacagcagcaagttcagcagcatcaacagcgacaagagcctgggggagaaggctgtggccttccgccacaccaaggaggacagcgcctctgtgaagagcctggacctgcccagcatcggcggcagctctgtgggcaaggaggacagtgaagatgccctgtctgtgcagtttgacatgaagctggctgatgtgggcggggacctgaagcacgtgatgtctgacagcagcctggacctgcccaccgtgtctggccagcaccccccagctgctgacatcgaggacctgaagtatgctgccttcggcagctacagcagcaactttgctgtgtccaccctgaccagctatgactggagcgacagagatgatgccacccagggcaggaagctgagcccctttgtgctgtctgctggcagcggcagccccagcgccaccagcatcctgcagaagaaggagaccagctttggcagcagcgagaacatcaccatgaccagcctgagcaaggtgaccacctttgtgtctgaagatgccctgcctgagaccaccttccctgccctggccagcttcaaggacaccatcccccagaccagcgagcagaaggagtatgaaaatagagactacaaggacttcaccaagcaggacctgcccacagctgagaggagccaggaggccacctgccccagccctgccagcagcggggccagccaggagaccccaaatgaatgttctgatgactttggagagttccagagcgagaagcccaagatcagcaagtttgacttcctggtggccaccagccagagcaagatgaagagcagcgaggagatgatcaagtctgagctggccacctttgacctgtctgtgcagggcagccacaagaggagcctgagcctgggggacaaggagatcagccgcagcagccccagccctgccctggagcagcccttccgggacaggagcaacaccctgaatgagaagccagccctgcccgtcatccgggacaagtacaaggacctgaccggggaggtggaggagaatgaaagatatgcctatgagtggcagcgctgcctgggcagcgccctgaatgtcatcaagaaggccaatgacaccctgaatggcatcagcagcagctctgtgtgcacagaggtgatccagagcgcccagggcatggagtacctgctgggcgtggtggaggtgtacagagtgaccaagagggtggagctgggcatcaaggccacagctgtgtgcagcgagaagctgcagcagctgctgaaggacatcgacaaggtgtggaacaacctgattggcttcatgagcctggccaccctgaccccagatgagaacagcctggacttcagcagctgcatgctgcggcccggcatcaagaatgcccaggagctggcctgtggggtgtgcctgctgaatgtggacagccgcagccgggccttcaacagcgagacagacagcttcaagctggcctacggcggccaccagtaccacgccagctgtgccaacttctggatcaactgtgtggagcccaagcccccaggcctggtgctgcctgacctgctgtag

SEQ ID NO: 19341 - DNA, 1011 bp, synthetic construct
  source 1..1011: mol_type = other DNA; note = Synthetic coding sequence
atggagagcgtgctgagcaaatatgaggaccagatcaccatcttcacagactacctggaggagtacccagacacagatgagctggtgtggatcctgggcaagcagcacctgctgaagacagagaagagcaagctgctgagtgacatcagcgcccggctgtggttcacctacagaaggaagttcagccccatcggcggcaccggccccagcagtgatgctggctggggctgcatgctgcgctgtggccagatgatgctggcccaggccctgatctgccgccacctgggccgggactggagctgggagaagcagaaggagcagcccaaggagtaccagaggatcctgcagtgcttcctggacaggaaggactgctgctacagcatccaccagatggcccagatgggcgtgggggagggcaagagcatcggggagtggtttggccccaacacagtggcccaggtgctgaagaagctggccctgtttgatgagtggaacagcctggccgtgtatgtgtccatggacaacacagtggtgattgaggacatcaagaagatgtgccgggtgctgcccctgtctgctgacacagctggggaccggcccccagacagcctgacagccagcaaccagagtgatgagctgatcttcctggacccccacaccacccagacctttgtggacacagaagaaaatggcaccgtgaatgaccagaccttccactgcctgcagagcccccagaggatgaacatcctgaacctggaccccagcgtggccctgggcttcttctgcaaggaggagaaggactttgacaactggtgcagcctggtgcagaaggagatcctgaaggagaacctgaggatgtttgagctggtgcagaagcaccccagccactggcccccatttgtgcccccagccaagccagaggtgaccaccactggagctgagttcatcgacagcacagagcagctggaggagtttgacctggaggaggactttgagatcctgtctgtgtag

SEQ ID NO: 19342 - DNA, 3018 bp, synthetic construct
  source 1..3018: mol_type = other DNA; note = Synthetic coding sequence
atgctgaggacagctggaagagatggcctgtgccgcctgagcacctacctggaggagctggaggccgtggagctgaagaagttcaagctgtacctgggcacagccacagagctgggggagggcaagatcccctggggctccatggagaaggccggccccctggagatggcccagctgctgatcacccacttcggccctgaggaggcctggaggctggccctgagcacctttgagcgcatcaacaggaaggacctgtgggagcggggccagcgggaggacctggtgcgggacaccccacctgggggccccagcagcctgggcaaccagagcacctgcctgctggaggtgtccctggtgacccccaggaaggacccccaggagacctacagagattatgtgcggaggaagttccggctgatggaggacagaaatgcccggctgggagaatgtgtgaacctgagccaccgctacacccggctgctgctggtgaaggagcacagcaaccccatgcaggtgcagcagcagctgctggacaccggccggggccacgccaggacagtgggccaccaggccagccccatcaagattgagaccctgtttgagccagatgaggagaggcctgagccccccaggacagtggtgatgcagggcgctgctggcatcggcaagtccatgctggcccacaaggtgatgctggactgggcagatggcaagctgttccagggccgctttgactacctgttctacatcaactgccgggagatgaaccagagcgccacagaatgttccatgcaggacctgatcttcagctgctggccagagcccagcgcccccctgcaggagctgatccgggtgcctgagcggctgctcttcatcattgatggctttgatgagctgaagcccagcttccatgacccccagggcccctggtgcctgtgctgggaggagaagaggcccacagagctgctgctgaacagcctcatcaggaagaagctgctgcctgagctgagcctgctgatcaccacccggcccacagccctggagaagctgcaccggctgctggagcaccccaggcatgtggagatcctgggcttcagcgaggccgagaggaaggagtacttctacaagtacttccacaatgctgagcaggccggccaggtgttcaactacgtgcgggacaatgagcccctcttcaccatgtgctttgtgcccctggtgtgctgggtggtgtgcacctgcctgcagcagcagctggagggcggcggcctgctgcggcagaccagcaggaccaccacagctgtgtacatgctgtacctgctgagcctgatgcagcccaagccaggggccccccggctgcagcccccacccaaccagaggggcctgtgcagcctggccgcagatggcctgtggaaccagaagatcctgtttgaggagcaggacctgaggaagcacggcctggatggagaagatgtgtctgccttcctgaacatgaacatcttccagaaggacatcaactgtgagcgctactacagcttcatccacctgtccttccaggagttctttgctgccatgtactacatcctggatgaaggagagggcggggccggccctgaccaggatgtgacccggctgctgacagaatatgccttcagcgagaggagcttcctggccctgaccagccgcttcctgtttggcctgctgaatgaggagaccaggagccacctggagaagagcctgtgctggaaggtgagcccccacatcaagatggacctgctgcagtggatccagagcaaggcccagagtgatggcagcaccctgcagcagggcagcctggagttcttcagctgcctgtatgagatccaggaggaggagttcatccagcaggccctgagccacttccaggtgattgtggtgagcaacatcgccagcaagatggagcacatggtgtcctccttctgcctgaagcgctgccgcagcgcccaggtgctgcacctgtatggagccacctacagcgcagatggagaagatcgggcccgctgcagcgctggggcccacaccctgctggtgcagctgcggcctgagaggacagtgctgctggatgcctacagcgagcacctggccgccgccctgtgcaccaaccccaacctgattgagctgagcctgtacagaaatgccctgggcagccggggcgtgaagctgctgtgccagggcctgcggcaccccaactgcaagctgcagaacctgcggctgaagcgctgccgcatcagcagcagcgcctgtgaggacctgtctgctgccctgattgccaacaagaacctgaccaggatggacctgtctggaaatggagtgggcttccctggcatgatgctgctgtgtgagggcctgcggcacccccagtgccgcctgcagatgatccagctgaggaagtgccagctggagagcggggcctgccaggagatggcctctgtgctgggcaccaacccccacctggtggagctggacctgactggaaatgccctggaggacctgggcctgcggctgctgtgccagggcctgcggcaccctgtgtgccgcctgcggaccctgtggctgaagatctgccgcctgacagctgctgcctgtgatgagctggccagcaccctgtctgtgaaccagagcctgcgggagctggacctgagcctgaatgagctgggggacctgggcgtgctgctgctgtgtgagggcctgcggcaccccacctgcaagctgcagaccctgcggctgggcatctgccgcctgggcagcgctgcctgtgagggcctgtctgtggtgctgcaggccaaccacaacctgcgggagctggacctgtccttcaatgacctgggggactggggcctgtggctgctggccgagggcctgcagcacccagcctgccgcctgcagaagctgtggctgtttggcatggacctgaacaagatgacccacagccggctggccgccctgcgggtgaccaagccctacctggacatcggctgctag

SEQ ID NO: 19343 - DNA, 618 bp, synthetic construct
  source 1..618: mol_type = other DNA; note = Synthetic coding sequence
atggtgagcagctgctgcggctctgtgtgcagcgaccagggctgcggcctggagacctgctgccggcccagctgctgccagaccacctgctgcaggaccacctgctgccggcccagctgctgcgtgagcagctgctgccggccccagtgctgccagagcgtgtgctgccagcccacctgctgccggcccagctgctgccccagctgctgccagaccacctgctgcaggaccacctgctgccggcccagctgctgcgtgagcagctgctgccggccccagtgctgccagagcgtgtgctgccagcccacctgctgccggcccagctgcagcatcagcagctgctgccggcccagctgctgcgtgagccgctgctgccgcagccagtgctgccagagcgtgtgctgccagcccacctgctgccggcccagctgctgcatcagcagctgctgccggcccagctgctgtgagagcagctgctgccggccctgctgctgccggccctgctgctgcctgcggcctgtgtgtggccgggtgtcctgccacaccacctgctaccggcccacctgtgtgatcagcacctgcccccggcccctgtgctgtgccagcagctgctgctag

SEQ ID NO: 19344 - DNA, 573 bp, synthetic construct
  source 1..573: mol_type = other DNA; note = Synthetic coding sequence
atgcagagctgtgagagcagcggggacagcgcagatgaccccctgagccggggcctgcggcggcggggccagccccgggtggtggtgattggagctggcctggccggcctggccgccgccaaggccctgctggagcagggcttcacagatgtgacagtgctggaggccagcagccacatcggcggccgggtgcagagcgtgaagctgggccacgccacctttgagctgggcgccacctggatccacggcagccacggcaaccccatctaccacctggccgaggccaacggcctgctggaggagaccacagatggagagaggtctgtgggccgcatcagcctgtacagcaagaatggagtggcctgctacctgaccaaccacggccgccgcatccccaaggatgtggtggaggagttcagtgacctgtacaatgagcccatgcaggtgctcttcagcggggaggccacccacaggaagtactacagcaccacccatggagccctgctgagcggccagcgggaggccgcccggctgattgagatgtacagagacctcttccagcagggcacctag

SEQ ID NO: 19345 - DNA, 3945 bp, synthetic construct
  source 1..3945: mol_type = other DNA; note = Synthetic coding sequence
atggccctgcggcctggagctggcagcggcggcggcggcgctgctggagctggagctggcagcgctgggggcggcggcttcatgtttcctgtggccggcggcatccggcccccccaggccggcctgatgcccatgcagcagcagggcttccccatggtgtctgtgatgcagcccaacatgcagggcatcatgggcatgaactacagcagccagatgagccagggccccatcgccatgcaggccggcatccccatgggccccatgcctgctgctggcatgccctacctgggccaggcccccttcctgggcatgaggcctcctggcccccagtacaccccagacatgcagaagcagtttgctgaggagcagcagaagagatttgagcagcagcagaagctgctggaggaggagaggaagaggcggcagtttgaggagcagaagcagaagctgcggctgctgagctctgtgaagcccaagacaggagagaagagcagagatgatgccctggaggccatcaagggcaacctggatggcttcagcagagatgccaagatgcaccccaccccagccagccaccccaagaagccaggccccagcctggaggagaagttcctggtgtcctgtgacatcagcaccagcggccaggagcagatcaagctgaacaccagcgaggtgggccacaaggccctgggccctggcagcagcaagaagtaccccagcctgatggccagcaatggagtggccgtggatggctgtgtgtctggcaccaccacagctgaggccgagaacaccagtgaccagaacctgagcattgaggagagcggcgtgggcgtcttccccagccaggaccctgcccagcccaggatgccaccctggatctacaatgaaagcctggtgcctgatgcctacaagaagatcctggagaccaccatgacccccaccggcatcgacacagccaagctgtaccccatcctgatgagcagcggcctgccccgggagaccctgggccagatctgggccctggccaacagaaccaccccaggcaagctgaccaaggaggagctgtacacagtgctggccatgattgctgtgacccagaggggcgtgcctgccatgagcccagatgccctgaaccagtttcctgctgcccccatccccaccctgagcggcttctccatgaccctgcccacccctgtgtcccagcccaccgtcatccccagcggccctgctggctccatgcccctgagcctgggccagcctgtgatgggcatcaacctggtgggccctgtgggcggggccgccgcccaggccagcagcggcttcatccccacctacccagccaaccaggtggtgaagccagaagaagatgacttccaggacttccaggatgccagcaagagcggcagcctggatgacagcttcagtgacttccaggagctgcctgccagcagcaagaccagcaacagccagcacggcaacagcgcccccagcctgctgatgcccctgcccggcaccaaggccctgcccagcatggacaagtatgctgtgttcaagggcattgctgctgacaagagcagtgaaaatacagtgcccccaggggaccccggggacaagtacagcgccttccgggagctggagcagacagctgagaacaagcccctgggggagagctttgctgagttccgctctgctggaacagatgatggcttcacagacttcaagacagctgacagcgtgagccccctggagccccccaccaaggacaagaccttcccccccagcttccccagcggcaccatccagcagaagcagcagacccaggtgaagaaccccctgaacctggccgacctggacatgttcagctctgtgaactgcagcagcgagaagcccctgtccttctctgctgtgttcagcaccagcaagtctgtgtccaccccccagagcactggatctgctgccaccatgacagccctggccgccaccaagaccagcagcctggctgatgactttggagagttcagcctgtttggagagtacagcggcctggcccctgtgggggagcaggatgactttgctgacttcatggccttcagcaacagcagcatcagcagcgagcagaagccagatgacaagtatgatgccctgaaggaggaggccagccctgtgcccctgaccagcaatgtgggcagcacagtgaagggcggccagaacagcacagctgccagcaccaagtatgatgtgttccggcagctgagcctggagggcagcggcctgggcgtggaggacctgaaggacaacaccccatctgggaagagtgatgatgactttgctgacttccacagcagcaagttcagcagcatcaacagcgacaagagcctgggggagaaggctgtggccttccgccacaccaaggaggacagcgcctctgtgaagagcctggacctgcccagcatcggcggcagctctgtgggcaaggaggacagtgaagatgccctgtctgtgcagtttgacatgaagctggctgatgtgggcggggacctgaagcacgtgatgtctgacagcagcctggacctgcccaccgtgtctggccagcaccccccagctgctgacatcgaggacctgaagtatgctgccttcggcagctacagcagcaactttgctgtgtccaccctgaccagctatgactggagcgacagagatgatgccacccagggcaggaagctgagcccctttgtgctgtctgctggcagcggcagccccagcgccaccagcatcctgcagaagaaggagaccagctttggcagcagcgagaacatcaccatgaccagcctgagcaaggtgaccacctttgtgtctgaagatgccctgcctgagaccaccttccctgccctggccagcttcaaggacaccatcccccagaccagcgagcagaaggagtatgaaaatagagactacaaggacttcaccaagcaggacctgcccacagctgagaggagccaggaggccacctgccccagccctgccagcagcggggccagccaggagaccccaaatgaatgttctgatgactttggagagttccagagcgagaagcccaagatcagcaagtttgacttcctggtggccaccagccagagcaagatgaagagcagcgaggagatgatcaagtctgagctggccacctttgacctgtctgtgcagggcagccacaagaggagcctgagcctgggggacaaggagatcagccgcagcagccccagccctgccctggagcagcccttccgggacaggagcaacaccctgaatgagaagccagccctgcccgtcatccgggacaagtacaaggacctgaccggggaggtggaggagaatgaaagatatgcctatgagtggcagcgctgcctgggcagcgccctgaatgtcatcaagaaggccaatgacaccctgaatggcatcagcagcagctctgtgtgcacagaggtgatccagagcgcccagggcatggagtacctgctgggcgtggtggaggtgtacagagtgaccaagagggtggagctgggcatcaaggccacagctgtgtgcagcgagaagctgcagcagctgctgaaggacatcgacaaggtgtggaacaacctgattggcttcatgagcctggccaccctgaccccagatgagaacagcctggacttcagcagctgcatgctgcggcccggcatcaagaatgcccaggagctggcctgtggggtgtgcctgctgaatgtggacagccgcagcaggaaggaggagaagccagctgaggagcaccccaagaaggccttcaacagcgagacagacagcttcaagctggcctacggcggccaccagtaccacgccagctgtgccaacttctggatcaactgtgtggagcccaagcccccaggcctggtgctgcctgacctgctgtag

SEQ ID NO: 19346 - DNA, 531 bp, synthetic construct
  source 1..531: mol_type = other DNA; note = Synthetic coding sequence
atgtctgatgatgacagccgggccagcaccagcagcagcagcagcagcagcagcaaccagcagacagagaaggagaccaacacccccaagaagaaggagagcaaggtgtccatgagcaagaacagcaagctgctgagcaccagcgccaagtctgctggccccaagggggacaacatctatgagtggaggagcaccatcctgggccccccaggctctgtgtatgagggcggcgtcttcttcctggacatcaccttcaccccagagtaccccttcaagccacccaaggtgaccttccgcacccgcatctaccactgcaacatcaacagccagggcgtcatctgcctggacatcctgaaggacaactggagccctgccctgaccatcagcaaggtgctgctgagcatctgcagcctgctgacagactgcaacccagctgaccccctggtgggcagcatcgccacccagtacatgaccaacagagctgagcatgacaggatggcccggcagtggaccaagagatatgccacctag

SEQ ID NO: 19347 - DNA, 7029 bp, synthetic construct
  source 1..7029: mol_type = other DNA; note = Synthetic coding sequence
atggatggagtgagcagcgaggccaatgaagaaaatgacaacatcgagaggcctgtgagaagaagacacagcagcatcctgaagcccccaagaagccccctgcaggacctgcggggcggcaatgaaagagtgcaggagagcaatgccctgaggaacaagaagaacagcagaagagtgtcctttgctgacaccatcaaggtgttccagacagagagccacatgaagatcgtgaggaagtctgagatggagggctgcagcgccatggtgcccagccagctgcagctgctgcccccaggcttcaagcgcttcagctgcctgagcctgcctgagacagaaacaggagagaacctgctgctgatccagaacaagaagctggaggacaactactgtgagatcaccggcatgaacaccctgctgagcgcccccatccacacccagatgcagcagaaggagttcagcatcatcgagcacacccgggagaggaagcacgccaatgaccagaccgtcatcttcagtgatgagaaccagatggacctgaccagcagccacacagtgatgatcaccaagggcctgctggacaaccccatcagcgagaagagcaccaagattgacaccaccagcttcctggccaacctgaagctgcacacagaggacagcaggatgaagaaggaggtgaacttctctgtggaccagaacaccagcagcgagaacaagattgacttcaatgacttcatcaagaggctgaagacaggcaagtgcagcgccttcccagatgtgcctgacaaggaaaattttgagatccccatctacagcaaggagcccaacagcgccagcagcacccaccagatgcacgtgtccctgaaggaggatgagaacaacagcaacatcaccaggctcttccgggagaaggatgatggcatgaacttcacccagtgccacacagccaacatccagaccctcatccccaccagcagcgagaccaacagccgggagagcaaaggaaatgacatcaccatctatggaaatgacttcatggacctgaccttcaaccacaccctgcagatcctgcctgccactggaaacttcagcgagattgagaaccagacccagaatgccatggatgtgaccaccggctacggcaccaaggccagcggcaacaagacagtgttcaagagcaagcagaacacagccttccaggacctgagcatcaacagcgctgacaagatccacatcaccaggagccacatcatgggcgctgagacccacatcgtgtcccagacctgcaaccaggatgcccgcatcctggccatgaccccagagagcatctacagcaaccccagcatccagggctgcaagacagtgttctacagcagctgcaatgatgccatggagatgaccaagtgcctgagcaacatgagggaggagaagaacctgctgaagcatgacagcaactatgccaagatgtactgcaacccagatgccatgagcagcctgacagagaagaccatctacagcggggaggagaacatggacatcaccaagagccacacagtggccatcgacaaccagatcttcaagcaggaccagagcaatgtgcagattgctgctgcccccaccccagagaaggagatgatgctgcagaacctgatgaccaccagtgaagatggcaagatgaatgtgaactgcaacagcgtgccccacgtgtccaaggagcgcatccagcagagcctgagcaaccccctgagcatcagcctgacagacaggaagacagagctgctgagcggggagaacatggacctgacagagagccacaccagcaacctgggcagccaggtgcccctggccgcctacaacctggcccctgagagcaccagcgagagccacagccagagcaagagcagcagtgatgaatgtgaggagatcaccaagagcagaaatgagcccttccagaggagtgacatcatcgccaagaacagcctgacagacacctggaacaaggacaaggactgggtgctgaagatcctgccctacctggacaaggacagcccccagagcgctgactgcaaccaggagatcgccaccagccacaacatcgtgtactgcggcggcgtgctggacaagcagatcaccaacagaaacacagtgtcctgggagcagagcctcttcagcaccaccaagcccctcttcagcagcggccagttctccatgaagaaccacgacacagccatcagcagccacacagtgaagtctgtgctgggccagaacagcaagctggccgagcccctgaggaagagcctgagcaaccccaccccagactactgccacgacaagatgatcatctgcagcgaggaggagcagaacatggacctgaccaagagccacacagtggtgattggcttcggccccagcgagctgcaggagctgggcaagaccaacctggagcacaccaccggccagctgaccaccatgaaccggcagattgctgtgaaggtggagaagtgtgggaagagccccatcgagaagagcggcgtgctgaagagcaactgcatcatggatgtgctggaggatgagagcgtgcagaagcccaagttccccaaggagaagcagaatgtgaagatctggggcaggaagtctgtgggcggccccaagattgacaagaccatcgtgttttctgaagatgacaagaatgacatggacatcaccaagagctacaccatcgagatcaaccaccggcccctgctggagaagagggactgccacctggtgcccctggccggcaccagcgagaccatcctgtacacctgccggcaggatgacatggagatcaccaggagccacaccacagccctggagtgcaagacagtgtccccagatgagatcaccacccggcccatggacaagacagtggtgtttgtggacaaccacgtggagctggagatgacagagagccacacagtgttcatcgactaccaggagaaggagaggacagaccggcccaactttgagctgagccagaggaagagcctgggcacccccaccgtcatctgcacccccacagaggagagcgtcttcttccctggaaatggagagagtgaccggctggtggccaatgacagccagctgacccccctggaggagtggagcaacaacagaggccctgtggaggtggccgacaacatggagctgagcaagagcgccacctgcaagaacatcaaggatgtgcagagccctggcttcctgaatgagcccctgagcagcaagagccagaggaggaagagcctgaagctgaagaatgacaagaccatcgtgttttctgagaaccacaagaatgacatggacatcacccagagctgcatggtggagattgacaatgaaagtgccctggaggacaaggaggacttccacctggccggggccagcaagaccatcctgtacagctgtggccaggatgacatggagatcaccaggagccacaccacagccctggagtgcaagaccctgctgcccaatgagatcgccatccggcccatggacaagacagtgctcttcacagacaactacagcgacctggaggtgacagacagccacacagtgttcatcgactgccaggccacagagaagatcctggaggagaaccccaagtttggaattggcaagggcaagaacctgggcgtgtccttccccaaggacaacagctgtgtgcaggagattgctgagaagcaggccctggccgtgggcaacaagatcgtgctgcacacagagcagaagcagcagctgtttgctgccaccaacagaaccaccaatgagatcatcaagttccacagcgctgccatggatgagaaggtgattggcaaggtggtggaccaggcctgcaccctggagaaggcccaggtggagagctgccagctgaacaacagagacagaagaaatgtggacttcaccagcagccacgccacagctgtgtgtggcagcagtgacaactacagctgcctgcccaacgtcatcagctgcacagacaacctggagggcagcgccatgctgctgtgtgacaaggatgaggagaaggccaactactgccctgtgcagaatgacctggcctatgccaatgactttgccagcgagtactacctggagagcgagggccagcccctgagcgccccctgccccctgctggagaaggaggaggtgatccagaccagcaccaagggccagctggactgtgtgatcaccctgcacaaggaccaggacctgatcaaggaccccaggaacctgctggccaaccagaccctggtgtacagccaggacctgggggagatgaccaagctgaacagcaagagggtgtccttcaagctgcccaaggaccagatgaaggtgtatgtggatgacatctacgtgatcccccagccccacttcagcacagaccagccccccctgcccaagaagggccagagcagcatcaacaaggaggaggtgatcctgagcaaggccggcaacaagagcctgaacatcatcgagaacagcagcgcccccatctgtgagaacaagcccaagatcctgaacagcgaggagtggtttgctgctgcctgcaagaaggagctgaaggagaacatccagaccaccaactacaacacagccctggacttccacagcaacagtgatgtgaccaagcaggtgatccagacccacgtgaatgctggggaggccccagaccctgtgatcaccagcaatgtgccctgcttccacagcatcaagcccaacctgaacaacctgaatggcaagacaggagagttcctggccttccagacagtgcacctgccccccctgcctgagcagctgctggagctgggcaacaaggcccacaatgacatgcacatcgtgcaggccacagagatccacaacatcaacatcatcagcagcaatgccaaggacagcagagatgaggagaacaagaagagccacaacggggctgagaccaccagcctgccccccaagacagtgttcaaggacaaggtgcggcgctgcagcctgggcatcttcctgccccggctgcccaacaagaggaactgcagcgtgactggaattgatgacctggagcagatcccagctgacaccacagacatcaaccacctggagacccagcctgtgagcagcaaggacagcggcatcggctctgtggccggcaagctgaacctgagccccagccagtacatcaatgaggagaacctgcctgtgtacccagatgagatcaacagcagtgacagcatcaacattgaaacagaggagaaggccctgattgagacctaccagaaggagatcagcccctatgagaacaagatgggcaagacctgcaacagccagaagaggacctgggtgcaggaggaggaggacatccacaaggagaagaagatcaggaagaatgagatcaagttcagtgacaccacccaggaccgggagatctttgaccaccacacagaggaggacatcgacaagagcgccaacagcgtgctgatcaagaacctgagcaggacccccagcagctgcagcagcagcctggacagcatcaaggcagatggcaccagcctggacttcagcacctaccgcagcagccagatggagagccagttcctgcgggacaccatctgtgaggagagcctgcgggagaagctgcaggacggccgcatcaccatccgggagttcttcatcctgctgcaggtgcacatcctgatccagaagccccggcagagcaacctgcccggcaacttcaccgtgaacaccccacccaccccagaggacctgatgctgagccagtatgtgtaccggcccaagatccagatctaccgggaggactgtgaggcccggcggcagaagattgaggagctgaagctgagcgccagcaaccaggacaagctgctggtggacatcaacaagaacctgtgggagaagatgaggcactgcagcgacaaggagctgaaggccttcggcatctacctgaacaagatcaagagctgcttcaccaagatgaccaaggtgttcacccaccagggcaaggtggccctgtatggcaagctggtgcagagcgcccagaatgaaagagagaagctgcagatcaagattgatgagatggacaagatcctgaagaagattgacaactgcctgacagagatggagacagagaccaagaacctggaggatgaggagaagaacaaccctgtggaggagtgggacagcgagatgagagctgctgagaaggagctggagcagctgaagacagaggaggaggagctgcagaggaacctgctggagctggaggtgcagaaggagcagaccctggcccagattgacttcatgcagaagcagaggaacagaacagaggagctgctggaccagctgagcctgtctgagtgggatgtggtggagtggagcgatgaccaggccgtgttcacctttgtgtatgacaccatccagctgaccatcacctttgaggagagcgtggtgggcttccccttcctggacaagcgctacaggaagatcgtggatgtgaacttccagagcctgctggatgaggaccaggccccacccagcagcctgctggtgcacaagctgatcttccagtatgtggaggagaaggagagctggaagaagacctgcaccacccagcaccagctgcccaagatgctggaggagttcagcctggtggtgcaccactgccgcctgctgggggaggagattgagtacctgaagcgctggggccccaactacaacctgatgaacatcgacatcaacaacaatgagctgcggctgctcttcagcagcagcgctgcctttgccaagtttgagatcaccctcttcctgagcgcctactaccccagcgtgcccctgcccagcaccatccagaaccacgtgggcaacaccagccaggatgacatcgccaccatcctgagcaaggtgcccctggagaacaactacctgaagaatgtggtgaagcagatctaccaggacctcttccaggactgccacttctaccactag

SEQ ID NO: 19348 - DNA, 1638 bp, synthetic construct
  source 1..1638: mol_type = other DNA; note = Synthetic coding sequence
atgagcagctgtgtgagcagccagcccagcagcaacagagctgccccccaggatgagctgggcggccggggcagcagcagcagcgagagccagaagccctgtgaggccctgcggggcctgagcagcctgagcatccacctgggcatggagagcttcatcgtggtgacagaatgtgagcccggctgtgctgtggacctgggcctggcccgggaccggcccctggaggctgatggccaggaggtgcccctggacaccagcggcagccaggcccggccccacctgagcggcaggaagctgagcctgcaggagaggagccagggcggcctggccgccggcggcagcctggacatgaatggccgctgcatctgccccagcctgccctacagccctgtgagcagcccccagagcagcccccggctgccccggcggcccaccgtggagagccaccacgtgtccatcaccggcatgcaggactgtgtgcagctgaaccagtacaccctgaaggatgaaattggcaagggcagctatggagtggtgaagctggcctacaatgaaaatgacaacacctactatgccatgaaggtgctgagcaagaagaagctgatccggcaggccggcttcccccggcggcccccaccccggggcaccaggcctgcccctgggggctgcatccagccccggggccccatcgagcaggtgtaccaggagatcgccatcctgaagaagctggaccaccccaacgtggtgaagctggtggaggtgctggatgaccccaatgaagaccacctgtacatggtgtttgagctggtgaaccagggccctgtgatggaggtgcccaccctgaagcccctgtctgaggaccaggcccgcttctacttccaggacctgatcaagggcatcgagtacctgcactaccagaagatcatccaccgggacatcaagcccagcaacctgctggtgggggaggatggccacatcaagattgctgactttggagtgtccaatgagttcaagggcagtgatgccctgctgagcaacacagtgggcaccccagccttcatggcccctgagagcctgtctgagaccaggaagatcttcagcggcaaggccctggatgtgtgggccatgggcgtgaccctgtactgctttgtgtttggccagtgccccttcatggatgagcgcatcatgtgcctgcacagcaagatcaagagccaggccctggagttcccagaccagcctgacattgctgaggacctgaaggacctgatcaccaggatgctggacaagaaccctgagagcagaattgtggtgcctgagatcaagatcctggtgaagaccatgatcaggaagaggagctttggaaacccctttgagggcagcagaagagaggagaggagcctgagcgcccctggcaacctgctgaccaagaagcccaccagagaatgtgagagcctgtctgagctgaaggaggcccggcagaggcggcagcccccaggccacaggcctgccccccggggcggcggcggcagcgccctggtgcggggcagcccctgtgtggagagctgctgggccccagcccctggcagccctgccaggatgcaccccctgcggcctgaggaggccatggagcctgagtag

SEQ ID NO: 19349 - DNA, 333 bp, synthetic construct
  source 1..333: mol_type = other DNA; note = Synthetic coding sequence
atgcccaagaggagctgcccctttgctgatgtggcccccctgcagctgaaggtgcgggtgtcccagcgggagctgagccggggcgtgtgtgccgagcgctacagccaggaggtgtttgaccccagcggcgtggccagcatcgcctgcagcagctgtgtgcgggctgtggatggcaaggctgtgtgtggccagtgtgagcgggccctgtgtggccagtgtgtgaggacctgctggggctgcggctctgtggcctgcaccctgtgtggcctggtggactgcagcgacatgtatgagaaggtgctgtgcaccagctgtgccatgtttgagacctag

SEQ ID NO: 19350 - DNA, 2253 bp, synthetic construct
  source 1..2253: mol_type = other DNA; note = Synthetic coding sequence
atggaggacctgtttgagaccttccaggatgagatgggcttcagcaacatggaggatgatggccctgaggaggaggagcgggtggccgagccccaggccaacttcaacaccccccaggccctgcgctttgaggagctgctggccaacctgctgaatgagcagcaccagatcgccaaggagctgtttgagcagctgaagatgaagaagcccagcgccaagcagcagaaggaggtggagaaggtgaagccccagtgcaaggaggtgcaccagaccctcatcctggaccctgcccagaggaagaggctgcagcagcagatgcagcagcacgtgcagctgctgacccagatccacctgctggccacctgcaaccccaacctgaaccctgaggccagcagcacccgcatctgcctgaaggagctgggcacctttgcccagagcagcatcgccctgcaccaccagtacaaccccaagttccagaccctcttccagccctgcaacctgatgggcgccatgcagctgattgaggacttcagcacccacgtgtccattgactgcagcccccacaagacagtgaagaagacagccaatgagttcccctgcctgcccaagcaggtggcctggatcctggccaccagcaaggtgttcatgtacccagagctgctgcctgtgtgcagcctgaaggccaagaacccccaggacaagatcctcttcaccaaggccgaggacaacctgctggccctgggcctgaagcactttgagggcacagagttcctgaaccccctcatcagcaagtacctgctgacctgcaagacagcccggcagctgactgtgcgcatcaagaacctgaacatgaacagagccccagacaacatcatcaagttctacaagaagaccaagcagctgcctgtgctgggcaagtgctgtgaggagatccagccccaccagtggaagccacccatcgagcgggaggagcaccggctgcccttctggctgaaggccagcctgcccagcatccaggaggagctgcggcacatggctgatggagcccgggaggtgggcaacatgacaggcaccacagagatcaacagcgaccagggcctggagaaggacaacagcgagctgggcagcgagacccgctaccccctgctgctgcccaagggcgtggtgctgaagctgaagcctgtggccgaccgcttccccaagaaggcctggaggcagaagaggagctctgtgctgaagcccctgctgatccagcccagccccagcctgcagcccagcttcaaccctgggaagaccccagcccagagcacccacagcgaggccccacccagcaagatggtgctgcgcatcccccaccccatccagcctgccaccgtgctgcagacagtgcctggggtgccccccctgggcgtgtctggaggagagagctttgagagccctgctgccctgcctgccatgcctcctgaggcccggaccagcttccccctgtctgagagccagaccctgctgagcagcgcccctgtgcccaaggtgatgatgcccagccctgccagctccatgttcaggaagccctacgtgagaagaagacccagcaagagaagaggagcccgggccttccgctgcatcaagccagcccctgtgatccacccagccagcgtcatcttcaccgtgcctgccaccaccgtgaagatcgtgtccctgggcggcggctgcaacatgatccagcctgtgaatgctgctgtggcccagagcccccagaccatccccatcgccaccctgctggtgaaccccaccagcttcccctgccccctgaaccagcccctggtggccagctctgtgagccccctgattgtgtctggcaacagcgtgaacctgcccatccccagcaccccagaggacaaggcccacatgaatgtggacatcgcctgtgctgtggctgatggagaaaatgccttccagggcctggagcccaagctggagccccaggagctgagccccctgagcgccaccgtcttccccaaggtggagcacagccctggccccccacctgtggacaagcagtgccaggagggcctgtctgagaacagcgcctaccgctggacagtggtgaagacagaggagggccggcaggccctggagcccctgccccagggcatccaggagagcctgaacaacagcagccctggggacctggaggaggtggtgaagatggagccagaagatgccacagaggagatcagcggcttcctgtag

SEQ ID NO: 19351 - DNA, 2604 bp, synthetic construct
  source 1..2604: mol_type = other DNA; note = Synthetic coding sequence
atgcaggccgaggccgctgactggttcagctccatgcccttccagaagcacgtgtactaccccctggccagcggccctgagggcccagatgtggccgtggccgctgctgctgctggggccgcctccatggcctgtgcccctccttctgctgccagcggccccctgcccttcttccagttccggccccggctggagagcgtggactggaggcggctgagcgccattgatgtggacaaggtggccggggctgtggatgtgctgaccctgcaggagaacatcatgaacatcaccttctgcaagctggaggatgagaagtgcccccactgccagagcggcgtggaccctgtgctgctgaagctgatccggctggcccagttcaccatcgagtacctgctgcacagccaggagttcctgaccagccagctgcacaccctggaggagcggctgcggctgagccactgtgatggagagcagagcaagaagctgctgaccaagcaggccggggagatcaagaccctgaaggaggagtgcaagaggaggaagaagatgatcagcacccagcagctgatgattgaggccaaggccaactactaccagtgccacttctgtgacaaggccttcatgaaccaggccttcctgcagagccacatccagaggaggcacacagaggagaacagccactttgagtaccagaagaatgcccagatcgagaagctgcggagtgaaattgtggtgctgaaggaggagctgcagctgaccaggtctgagctggaggccgcccaccacgccagcgctgtgcgcttcagcaaggagtatgagatgcagaagaccaaggaggaggacttcctgaagctgtttgaccgctggaaggaggaggagaaggagaagctggtggatgagatggagaaggtgaaggagatgttcatgaaggagttcaaggagctgaccagcaagaacagcgccctggagtaccagctgtctgagatccagaagagcaacatgcagatcaagagcaacatcggcaccctgaaggatgcccacgagttcaaggaggacaggagcccctacccccaggacttccacaacgtgatgcagctgctggacagccaggagagcaagtggacagcccgggtgcaggccatccaccaggagcacaagaaggagaagggccgcctgctgagccacatcgagaagctgcggacctccatgattgatgacctgaatgccagcaatgtgttctacaagaagagaattgaggagctgggccagaggctgcaggagcagaatgaactcatcatcacccagaggcagcagatcaaggacttcacctgcaaccccctgaacagcatcagcgagcccaagggcaaccccctggcctggcaggcctttgagagccagcctgctgccccagctgtgcccatgaatgccccagccctgcacaccctggagaccaagagcagcctgcccatggtgcatgagcaggccttcagcagccacatcctggagcccatcgaggagctgtctgaggaggagaagggcagagaaaatgagcagaagctgaacaacaacaagatgcacctgaggaaggccctgaagagcaacagcagcctgaccaagggcctgcggaccatggtggagcagaacctgatggagaagctggagaccctgggcatcaatgctgacatccggggcatcagcagtgaccagctgcaccgggtgctgaagtctgtggagagcgagcggcacaagcaggagcgggagatccccaacttccaccagatccgggagttcctggagcaccaggtgtcctgcaagattgaggagaaggccctgctgagcagtgaccagtgcagcgtgtcccagatggacaccctgagcactggagaggtgcccaagatgatccagctgcccagcaagaaccggcagctgatccggcagaaggctgtgtccacagacaggacctctgtgcccaagatcaagaagaatgtgatggaggaccccttccccaggaagagcagcaccatcaccaccccacccttcagcagcgaggaggagcaggaggatgatgacctgatccgggcctatgccagccctggccccctgcctgtgcccccaccccagaacaagggcagctttgggaagaacacagtgaagagtgatgctgatggaacagagggcagcgagattgaggacacagatgacagccccaagccagctggggtggccgtgaagacccccacagagaaggtggagaagatgttcccccacaggaagaatgtgaacaagcctgtgggcggcaccaacgtgcctgagatgttcatcaagaaggaggagctgcaggagctgaagtgtgctgatgtggaggatgaggactgggacatcagcagcctggaggaggagatcagcctgggcaagaagagcggcaaggagcagaaggagcccccaccagccaagaatgagccccactttgcccacgtgctgaatgcctggggcgccttcaaccccaagggccccaagggggagggcctgcaggagaatgaaagcagcaccctgaagagcagcctggtgacagtgacagactggagcgacaccagtgatgtgtag

SEQ ID NO: 19352 - DNA, 1860 bp, synthetic construct
  source 1..1860: mol_type = other DNA; note = Synthetic coding sequence
atgagcggcctggtgctgggccagagagatgagcctgctggccaccggctgagccaggaggagatcctgggcagcacccggctggtgtcccagggcctggaggccctgcggtctgagcaccaggccgtgctgcagagcctgagccagaccatcgagtgcctgcagcagggcggccacgaggagggcctggtgcatgagaaggcccggcagctgcggcgctccatggagaacatcgagctgggcctgtctgaggcccaggtgatgctggccctggccagccacctgagcacagtggagagcgagaagcagaagctgcgggcccaggtgcggcggctgtgccaggagaaccagtggctgagagatgagctggccggcacccagcagaggctgcagaggtctgagcaggccgtggcccagctggaggaggagaagaagcacctggagttcctgggccagctgcggcagtatgatgaagatggccacaccagcgaggagaaggagggagatgccaccaaggacagcctggatgacctcttccccaatgaggaggaggaggaccccagcaatggcctgagccggggccagggcgccacagctgcccagcagggcggctatgagatcccagcccggctgcggaccctgcacaacctggtgatccagtatgctgcccagggccgctatgaggtggccgtgcccctgtgcaagcaggccctggaggacctggagaggaccagcggccggggccacccagatgtggccaccatgctgaacatcctggccctggtgtacagagaccagaacaagtacaaggaggccgcccacctgctgaatgatgccctgagcatccgggagagcaccctgggccctgaccaccctgctgtggccgccaccctgaacaacctggccgtgctgtatggcaagaggggcaagtacaaggaggccgagcccctgtgccagagggccctggagatccgggagaaggtgctgggcaccaaccacccagatgtggccaagcagctgaacaacctggccctgctgtgccagaaccagggcaagtatgaagctgtggagcgctactaccagagggccctggccatctatgagggccagctgggccctgacaaccccaacgtggcccggaccaagaacaacctggccagctgctacctgaagcagggcaagtatgcagaggccgagaccctgtacaaggagatcctgacccgggcccacgtgcaggagtttggatctgtggatgatgaccacaagcccatctggatgcacgccgaggagcgggaggagatgagcaagagccgccaccacgagggcggcaccccctatgcagaatatggaggctggtacaaggcctgcaaggtgagcagccccaccgtgaacaccaccctgaggaacctgggcgccctgtaccgccggcagggcaagctggaggccgctgagaccctggaggagtgtgccctgcggagccggcggcagggcacagaccccatcagccagaccaaggtggccgagctgctgggggagagtgatggccgccgcaccagccaggagggccctggggacagcgtgaagtttgaaggaggagaagatgcctctgtggccgtggagtggagcggagatggcagcggcaccctgcagaggagcggcagcctgggcaagatcagagatgtgctgcggcgcagcagcgagctgctggtgaggaagctgcagggcacagagccccggcccagcagcagcaacatgaagagagctgccagcctgaactacctgaaccagcccagcgctgcccccctgcaggtgtcccggggcctgagcgccagcaccatggacctgagcagcagcagctag

SEQ ID NO: 19353 - DNA, 1137 bp, synthetic construct
  source 1..1137: mol_type = other DNA; note = Synthetic coding sequence
atgaaggagcagctgcctgacctgcacagccacttcagtgacctgaacctggaggcccacatgtatgccagccagtggttcctgaccctcttcaccgccaagttccccctgtgcatggtgttccacatcatcgacctgctgctgtgtgagggcctgaacatcatcttccacgtggccctggccctgctgaagaccagcaaggaggacctgctgcaggccgactttgaaggagccctgaagttcttccgggtgcagctgcccaagcgctacagagctgaggagaatgcccggcggctgatggagcaggcctgcaacatcaaggtgcccaccaagaagctgaagaagtatgagaaggagtaccagaccatgagggagagccagctgcagcaggaggaccccatggaccgctacaagcgggagaacagaaggctgcaggaggcctccatgaggctggagcaggagaatgatgacctggcccacgagctggtgaccagcaagatcgccctgagaaatgacctggaccaggccgaggacaaggcagatgtgctgaacaaggagctgctgctgaccaagcagaggctggtggagacagaggaggagaagaggaagcaggaggaggagacagcccagctgaaggaggtgttcaggaagcagctggagaaggccgagtatgagatcaagaagaccacagccatcatcgccgagtacaagcagatctgcagccagctgagcacccggctggagaagcagcaggccgccagcaaggaggagctggaggtggtgaagggcaagatgatggcctgcaagcactgcagcgacatcttcagcaaggagggcgccctgaagctggccgccaccggccgggaggaccagggcattgaaacagatgatgagaaggacagcctgaagaagcagctgcgggagatggagctggagctggcccagaccaagctgcagctggtggaggccaagtgcaagatccaggagctggagcaccagagaggagccctgatgaatgagatccaggccgccaagaacagctggttcagcaagaccctgaacagcatcaagacagccaccggcacccagcccctgcagcctgcccctgtgacccagccccccaaggagagcacctag

SEQ ID NO: 19354 - DNA, 2631 bp, synthetic construct
  source 1..2631: mol_type = other DNA; note = Synthetic coding sequence
atgggagacagtgatgatgaatatgacagaagaagaagagacaagttcagaagagagaggagtgactatgacaggagccgggagagagatgagaggagaagaggagatgactggaatgaccgggagtgggaccggggccgggagaggaggagcagaggagagtacagagattatgacaggaacagaagagagcgcttcagcccccccaggcatgagctgagccccccccagaagaggatgagaagagactgggatgagcacagcagtgacccctaccacagcggctatgagatgccctatgccggcggcggcggcggccccacctacggccccccccagccctggggccacccagatgtgcacatcatgcagcaccacgtgctgcccatccaggcccggctgggcagcattgctgagattgacctgggcgtgcccccacctgtgatgaagaccttcaaggagttcctgctgagcctggatgacagcgtggatgaaacagaggccgtgaagcgctacaatgactacaagctggacttccggcggcagcagatgcaggacttcttcctggcccacaaggatgaggagtggttccgcagcaagtaccacccagatgaggtgggcaagaggcggcaggaggcccggggggccctgcagaaccggctgcgggtcttcctgagcctgatggagaccggctggtttgacaacctgctgctggacatcgacaaggcagatgccatcgtgaagatgctggatgctgctgtgatcaagatggagggcggcacagaaaatgacctgcgcatcctggagcaggaggaggaggaggagcaggccggcaagccaggagagcccagcaagaaggaggagggccgggccggggccggcctgggagatggagagaggaagaccaatgacaaggatgagaagaaggaggatggcaagcaggccgagaatgacagcagcaatgatgacaagaccaagaagtcagaaggagatggagacaaggaggagaagaaggaggacagcgagaaggaggccaagaagagcagcaagaagaggaacaggaagcacagcggagatgacagctttgatgagggctctgtgtctgagagcgagagcgagagcgagagcggccaggccgaggaggagaaggaggaggccgaggaggccctgaaggagaaggagaagcccaaggaggaggagtgggagaagcccaaggatgctgctggcctggagtgcaagccccggcccctgcacaagacctgcagcctcttcatgaggaacatcgcccccaacatcagcagagctgagatcatcagcctgtgcaagcgctacccaggcttcatgagggtggccctgtctgagccccagcctgagcggcgcttcttcagaagaggctgggtgacctttgacagatctgtgaacatcaaggagatctgctggaacctgcagaacatccggctgagagaatgtgagctgagccctggggtgaacagagacctgacccggcgggtgaggaacatcaatggcatcacccagcacaagcagatcgtgagaaatgacatcaagctggccgccaagctgatccacaccctggatgacaggacccagctgtgggccagcgagcccggcaccccacccctgcccaccagcctgcccagccagaaccccatcctgaagaacatcacagactacctgattgaggaggtgtctgctgaggaggaggagctgctgggcagcagcggcggggcccctcctgaggagccccccaaggagggcaacccagctgagatcaacgtggagagagatgagaagctgatcaaggtgctggacaagctgctgctgtacctgcgcatcgtgcacagcctggactactacaacacctgtgagtacccaaatgaagatgagatgcccaacagatgtggcatcatccacgtgcggggccccatgccacccaaccgcatcagccacggggaggtgctggagtggcagaagacctttgaggagaagctgacccccctgctgtctgtgcgggagagcctgtctgaggaggaggcccagaagatgggcaggaaggaccctgagcaggaggtggagaagtttgtgaccagcaacacccaggagctgggcaaggacaagtggctgtgccccctgagcggcaagaagttcaagggccctgagtttgtgaggaagcacatcttcaacaagcatgctgagaagattgaggaggtgaagaaggaggtggccttcttcaacaacttcctgacagatgccaagaggcctgccctgcctgagatcaagccagcccagcccccaggccctgcccagatcctgcccccaggcctgaccccaggcctgccctacccccaccagaccccccagggcctgatgccctacggccagcccaggcctcccatcctgggctacggggccggggctgtgcggcctgctgtgcccactggaggccccccctacccccacgccccctatggagctggccggggcaactatgatgccttccggggccagggcggctacccaggcaagcccaggaacaggatggtgcggggggacccccgggccatcgtggagtacagagacctggatgccccagatgatgtggacttcttctag

SEQ ID NO: 19355 - DNA, 1491 bp, synthetic construct; identical to SEQ ID NO: 19263
  source 1..1491: mol_type = other DNA; note = Synthetic coding sequence

SEQ ID NO: 19356 - DNA, 318 bp, synthetic construct
  source 1..318: mol_type = other DNA; note = Synthetic coding sequence
atggccctgcgctaccccatggctgtgggcctgaacaagggccacaaggtgaccaagaatgtgtccaagcccaggcacagcagaagaagaggccgcctgaccaagcacaccaagtttgtgcgggacatgatccgggaggtgtgtggctttgccccctatgaaagaagagccatggagctgctgaaggtgtccaaggacaagagggccctgaagttcatcaagaagagggtgggcacccacatccgggccaagaggaagcgggaggagctgagcaatgtgctggccgccatgaggaaggctgctgccaagaaggactag

SEQ ID NO: 19357 - DNA, 3720 bp, synthetic construct
  source 1..3720: mol_type = other DNA; note = Synthetic coding sequence
atggccaatgacagccctgccaagagcctggtggacatcgacctgagcagcctgcgggaccctgctggcatctttgagctggtggaggtggtgggcaatggcacctacggccaggtgtacaagggccgccacgtgaagacaggccagctggccgccatcaaggtgatggatgtgacagaagatgaggaggaggagatcaagctggagatcaacatgctgaagaagtacagccaccacaggaacatcgccacctactacggggccttcatcaagaagagccccccaggccatgatgaccagctgtggctggtgatggagttctgtggggccggcagcatcacagacctggtgaagaacaccaagggcaacaccctgaaggaggactggatcgcctacatcagccgggagatcctgcggggcctggcccacctgcacatccaccacgtgatccaccgggacatcaagggccagaatgtgctgctgacagaaaatgctgaggtgaagctggtggactttggagtgtctgcccagctggacagaacagtgggcagaagaaacaccttcatcggcaccccctactggatggcccctgaggtgattgcctgtgatgagaacccagatgccacctatgactacagaagtgacctgtggagctgtggcatcacagccatcgagatggccgagggcgccccacccctgtgtgacatgcaccccatgagggccctcttcctgatccccagaaatcctccaccccggctgaagagcaagaagtggagcaagaagttcttctccttcatcgagggctgcctggtgaagaactacatgcagaggcccagcacagagcagctgctgaagcaccccttcatccgggaccagcccaatgaaaggcaggtgcgcatccagctgaaggaccacatcgacaggaccaggaagaagagaggagagaaggatgaaacagaatatgagtacagcggcagcgaggaggaggaggaggaggtgcctgagcaggagggggagcccagcagcatcgtgaatgtgcctggagagagcaccctgcggcgggacttcctgcggctgcagcaggagaacaaggagaggtctgaggccctgcggcggcagcagctgctgcaggagcagcagctgcgggagcaggaggagtacaagaggcagctgctggccgagcggcagaagagaattgagcagcagaaggagcagaggcggcggctggaggagcagcagaggcgggagcgggaggcccggcggcagcaggagcgggagcagaggagaagagagcaggaggagaagaggcggctggaggagctggagaggaggaggaaggaggaggaggagcggcggcgggcagaggaggagaagagaagagtggagcgggagcaggagtacatccggcggcagctggaggaggagcagaggcacctggaggtgctgcagcagcagctgctgcaggagcaggccatgctgctggagtgccgctggagggagatggaggagcaccggcaggccgagcggctgcagaggcagctgcagcaggagcaggcctacctgctgagcctgcagcacgaccacagaagaccccacccccagcacagccagcagcccccaccaccccagcaggagaggagcaagcccagcttccacgcccctgagcccaaggcccactatgagcctgctgaccgggcccgggaggtggaggaccgcttcaggaagaccaaccacagcagccctgaggcccagagcaagcagacaggccgggtgctggagccccctgtgcccagccgctctgagagcttcagcaatggaaacagcgagagcgtgcacccagccctgcagaggcctgctgagccccaggtgcctgtgaggaccaccagccgcagccctgtgctgagccggcgggacagccccctgcagggcagcggccagcagaacagccaggccggccagaggaacagcaccagcattgagccccggctgctgtgggagcgggtggagaagctggtgcccaggcctggcagcggcagcagcagcggcagcagcaacagcggcagccagcccggcagccaccctggcagccagagcggcagcggggagcgcttccgggtgcgcagcagcagcaagtctgagggcagccccagccagaggctggagaatgctgtgaagaagccagaggacaagaaggaggtgttccggcccctgaagccagctgacctgacagccctggccaaggagctgcgggctgtggaggatgtgcggcccccccacaaggtgacagactacagcagcagcagcgaggagagcggcaccacagatgaagaagatgatgatgtggagcaggagggcgcagatgagagcaccagcggccctgaggacacccgggccgccagcagcctgaacctgagcaatggagaaacagaatctgtgaagaccatgattgtgcatgatgatgtggagagcgagcccgccatgacccccagcaaggagggcaccctcatcgtgcggcagacccagagcgccagcagcaccctgcagaagcacaagagcagcagcagcttcacccccttcatcgacccccggctgctgcagatcagccccagcagcggcaccaccgtgacctctgtggtgggcttcagctgtgatggcatgaggcctgaggccatccggcaggaccccaccaggaagggctctgtggtgaatgtgaaccccaccaacacccggccccagagcgacaccccagagatcaggaagtacaagaagcgcttcaacagcgagatcctgtgtgccgccctgtggggcgtgaacctgctggtgggcacagaaagtggcctgatgctgctggacagaagtggccagggcaaggtgtaccccctcatcaacagaagacgcttccagcagatggatgtgctggagggcctgaatgtgctggtgaccatcagcggcaagaaggacaagctgcgggtgtactacctgtcctggctgaggaacaagatcctgcacaatgaccctgaggtggagaagaagcagggctggaccaccgtgggggacctggagggctgtgtgcactacaaggtggtgaagtatgagcgcatcaagttcctggtgattgccctgaagagctctgtggaggtgtatgcctgggcccccaagccctaccacaagttcatggccttcaagagctttggagagctggtgcacaagcccctgctggtggacctgactgtggaggagggccagaggctgaaggtgatctacggcagctgtgccggcttccacgctgtggatgtggacagcggctctgtgtatgacatctacctgcccacccacatccagtgcagcatcaagccccacgccatcatcatcctgcccaacacagatggcatggagctgctggtgtgctatgaagatgaaggagtgtatgtgaacacctacggccgcatcaccaaggatgtggtgctgcagtggggcgagatgcccacctctgtggcctacatccgcagcaaccagaccatgggctggggcgagaaggccatcgagatccgctctgtggagaccggccacctggatggagtcttcatgcacaagagggcccagaggctgaagttcctgtgtgaaagaaatgacaaggtgttctttgcctctgtgcgcagcggcggcagcagccaggtgtacttcatgaccctgggccgcaccagcctgctgtcctggtag

SEQ ID NO: 19358 - DNA, 2847 bp, synthetic construct
  source 1..2847: mol_type = other DNA; note = Synthetic coding sequence
atgtatggcagcgcccggtctgtgggcaaggtggagcccagcagccagagccctggccgcagcccccggctgcccaggagcccccggctgggccacaggaggaccaacagcactggaggcagcagcggcagctctgtgggcggcggcagcggcaagaccctgtccatggagaacatccagagcctgaatgctgcctatgccaccagcggccccatgtacctgagtgaccatgaaaatgtgggcagcgagacccccaagagcaccatgaccctgggccgcagcggcggccgcctgccctacggcgtgaggatgacagccatgggcagcagccccaacatcgccagcagcggcgtggccagtgacaccatcgcctttggagagcaccacctgccccctgtgtccatggccagcacagtgccccacagcctgcggcaggcccgggacaacaccatcatggacctgcagacccagctgaaggaggtgctgcgggagaatgacctgctgaggaaggatgtggaggtgaaggagagcaagctgagcagctccatgaacagcatcaagaccttctggagccctgagctgaagaaggagcgggccctgaggaaggatgaggccagcaagatcaccatctggaaggagcagtacagagtggtgcaggaggagaaccagcacatgcagatgaccatccaggccctgcaggatgagctgcgcatccagagggacctgaaccagctgttccagcaggacagcagcagcaggactggagagccctgtgtggccgagctgacagaggagaacttccagaggctgcacgccgagcacgagcggcaggccaaggagctgttcctgctgaggaagaccctggaggagatggagctgagaattgagacccagaagcagaccctgaatgccagagatgagagcatcaagaagctgctggagatgctgcagagcaagggcctgagcgccaaggccacagaggaggaccacgagaggacccggcggctggccgaggccgagatgcacgtgcaccacctggagagcctgctggagcagaaggagaaggagaacagcatgctgcgggaggagatgcacagaagatttgaaaatgccccagacagcgccaagaccaaggccctgcagaccgtcatcgagatgaaggacagcaagatcagctccatggagcggggcctgcgggacctggaggaggagatccagatgctgaagagcaatggagccctgagcacagaggagcgggaggaggagatgaagcagatggaggtgtaccgcagccacagcaagttcatgaagaacaagattggccaggtgaagcaggagctgagcaggaaggacacagagctgctggccctgcagaccaagctggagaccctgaccaaccagttcagtgacagcaagcagcacatcgaggtgctgaaggagagcctgacagccaaggagcagagagctgccatcctgcagacagaggtggatgccctgcggctgcggctggaggagaaggagaccatgctgaacaagaagaccaagcagatccaggacatggccgaggagaagggcacccaggccggggagatccatgacctgaaggacatgctggatgtgaaggagaggaaggtgaatgtgctgcagaagaagattgagaacctgcaggagcagctgcgggacaaggagaagcagatgagcagcctgaaggagcgggtgaagagcctgcaggccgacaccaccaacacagacacagccctgaccaccctggaggaggccctggccgagaaggagaggaccatcgagcggctgaaggagcagagggacagagatgagcgggagaagcaggaggagattgacaactacaagaaggacctgaaggacctgaaggagaaggtgtccctgctgcagggcgacctgtctgagaaggaggccagcctgctggacctgaaggagcacgccagcagcctggccagcagcggcctgaagaaggacagccggctgaagaccctggagatcgccctggagcagaagaaggaggagtgcctgaagatggagagccagctgaagaaggcccatgaagctgccctggaggcccgggccagccctgagatgtctgaccgcatccagcacctggagcgggagatcacccgctacaaggatgagagcagcaaggcccaggccgaggtggaccggctgctggagatcctgaaggaggtggagaatgagaagaatgacaaggacaagaagattgctgagctggagagcctgaccagccggcaggtgaaggaccagaacaagaaggtggccaacctgaagcacaaggagcaggtggagaagaagaagagcgcccagatgctggaggaggcccggcggcgggaggacaacctgaatgacagcagccagcagctgcaggtggaggagctgctgatggccatggagaaggtgaagcaggagctggagagcatgaaggccaagctgagcagcacccagcagagcctggccgagaaggagacccacctgaccaacctgcgggcagagaggaggaagcacctggaggaggtgctggagatgaagcaggaggccctgctggccgccatcagcgagaaggatgccaacatcgccctgctggagctgagcagcagcaagaagaagacccaggaggaggtggccgccctgaagcgggagaaggaccggctggtgcagcagctgaagcagcagacccagaacaggatgaagctgatggctgacaactatgaagatgaccacttcaagagcagccacagcaaccagaccaaccacaagcccagcccagaccaggatgaggaggagggcatctgggcctag

SEQ ID NO: 19359 - DNA, 2733 bp, synthetic construct
  source 1..2733: mol_type = other DNA; note = Synthetic coding sequence
atggccgccaccgtggagggccctgagctggaggccgctgctgctgctggagatgcctctgaagattctgatgctggcagccgggccctgcccttcctgggcggcaaccggctgagcctggacctgtacccaggcggctgccagcagctgctgcacctgtgtgtgcagcagcccctgcagctgctgcaggtggagttcctgcggctgagcacccatgaggacccccagctgctggaggccaccctggcccagctgccccagagcctgagctgcctgcggagcctggtgctgaagggcggccagaggcgggacaccctgggcgcctgcctgcggggggccctgaccaacctgcctgctggcctgagcggcctggcccacctggcccacctggacctgtccttcaacagcctggagaccctgcctgcctgtgtgctgcagatgaggggcctgggcgccctgctgctgagccacaactgcctgtctgagctgcctgaggccctgggcgccctgcctgccctgaccttcctgactgtgacccacaaccggctgcagaccctgcccccagccctgggcgccctgagcaccctgcagaggctggacctgagccagaacctgctggacaccctgcccccagaaattggaggcctgggcagcctgctggagctgaacctggccagcaaccggctgcagagcctgcctgccagcctggccggcctgcggagcctgcggctgctggtgctgcacagcaacctgctggcctctgtgcctgctgacctggcccggctgcccctgctgacccggctggacctgcgggacaaccagctgcgggacctgcccccagagctgctggatgccccctttgtgcggctgcagggcaaccccctgggggaggccagcccagatgcccccagcagccctgtggccgccctgatccctgagatgcccaggctcttcctgaccagtgacctggacagcttccctgtgaccccccagggctgcagcgtgaccctggcctgtggggtgcggctgcagtttcctgctggggccacagccacccccatcaccatccgctaccgcctgctgctgcctgagcccggcctggtgcccctgggcccccatgatgccctgctgagccacgtgctggagctgcagccccacggcgtggccttccagcaggatgtgggcctgtggctgctcttcaccccaccccaggcccggcgctgccgggaggtggtggtgaggaccagaaatgacaacagctggggagacctggagacctacctggaggaggaggccccccagaggctgtgggcccactgccaggtgccccacttctcctggttcctggtggtgtccaggcctgtgtccaatgcctgcctggtgcccccagagggcaccctgctgtgcagcagcggccaccctggggtgaaggtgatcttccccccaggggccacagaggagcccaggagagtgtccatgcaggtggtgaggatggccggccgggagctgcaggccctgctgggggagcctgaggccgctgtgagccccctgctgtgcctgagccagagcggccccccatccttcctgcagcctgtgacagtgcagctgcccctgcccagcggcatcaccggcctgagcctggacaggagccggctgcacctgctgtactgggcccctcctgctgccacctgggatgacatcacagcccaggtggtgctggagctgacccacctgtatgcccgcttccaggtgacccacttctcctggtactggctgtggtacaccaccaagaactgtgtgggcggcctggccaggaaggcctgggagcggctgcggctgcaccgggtgaacctgattgccctgcagaggcggcgggaccctgagcaggtgctgctgcagtgcctgcccaggaacaaggtggatgccaccctgcggcggctgctggagcgctaccggggccctgagcccagcgacacagtggagatgtttgaaggagaggagttctttgctgcctttgagcggggcattgatgtggatgctgacagaccagactgtgtggagggccgcatctgctttgtgttctacagccacctgaagaatgtgaaggaggtgtatgtgaccaccaccctggaccgggaggcccaggccgtgcggggccaggtgtccttctacagaggagctgtgcctgtgcgggtgcctgaggaggccgaggccgcccggcagaggaaaggagcagatgccctgtggatggccaccctgcccatcaagctgccccggctgcggggcagcgagggccccaggagaggagctggcctgagcctggcccccctgaacctgggagatgctgagaccggcttcctgacccagagcaacctgctgtctgtggccggccgcctgggcctggactggccagctgtggccctgcacctgggcgtgtcctaccgggaggtgcagaggatcagacatgagttcagagatgacctggatgagcagatccgccacatgctgttctcctgggccgagcggcaggccggccagcctggagctgtgggcctgctggtgcaggccctggagcagagcgaccggcaggatgtggccgaggaggtgcgggctgtgctggagctgggccgcaggaagtaccaggacagcatccggaggatgggcctggcccccaaggaccctgccctgcccggcagcagcgccccccagcccccagagcccgcccaggcctag

SEQ ID NO: 19360 - DNA, 2961 bp, synthetic construct
  source 1..2961: mol_type = other DNA; note = Synthetic coding sequence
atgagccagtggaccccagagtacaatgagctgtacaccctgaaggtggacatgaagtctgagatccccagtgatgcccccaagacccaggagagcctgaagggcatcctgctgcaccctgagcccatcggggccgccaagagcttccctgctggggtggagatgatcaacagcaaggtgggcaatgagttcagccacctgtgtgatgacagccagaagcaggagaaggagatgaatggaaaccagcaggagcaggagaagagcctggtggtgaggaagaagaggaagagccagcaggccggccccagctatgtgcagaactgtgtgaaggagaaccagggcatcctgggcctgcggcagcacctgggcacccccagtgatgaggacaatgacagcagcttcagtgactgcctgagcagccccagcagcagcctgcactttggagacagcgacacagtgaccagtgatgaggacaaggaggtgtctgtgcgccacagccagaccatcctgaatgccaagagccgcagccacagcgcccggagccacaagtggcccaggacagaaacagaatctgtgtctggcctgctgatgaagaggccctgcctgcacggcagcagcctgcggcggctgccctgcaggaagagatttgtgaagaacaacagcagccagaggacccagaagcagaaggagcgcatcctgatgcagaggaagaagcgggaggtgctggcccggaggaaatatgccctgctgcccagcagcagcagcagcagtgaaaatgacctgagcagcgagagcagcagcagcagcagcacagaaggagaggaggacctgtttgtgtctgccagcgagaaccaccagaacaacccagctgtgcccagcggcagcattgatgaagatgtggtggtgattgaggccagcagcaccccccaggtgacagccaatgaggagatcaacgtgaccagcacagacagcgaggtggagatcgtgacagtgggggagagctaccgcagccgcagcaccctgggccacagccgcagccactggagccagggcagcagcagccacgccagccggccccaggagcccaggaacagaagccgcatcagcaccgtcatccagcccctgcggcagaatgctgctgaggtggtggacctgactgtggatgaagatgagcccaccgtggtgcccaccaccagcgccaggatggagagccaggccaccagcgccagcatcaacaacagcaaccccagcaccagcgagcaggccagtgacacagccagcgctgtgaccagcagccagcccagcacagtgtctgagaccagcgccaccctgaccagcaacagcaccaccggcaccagcattggagatgacagcaggaggaccaccagcagcgctgtgacagaaacaggccccccagccatgccccggctgcccagctgctgcccccagcacagcccctgtggcggcagcagccagaaccaccacgccctgggccacccccacaccagctgcttccagcagcacggccaccacttccagcaccaccaccaccaccaccacaccccccaccctgctgtgcctgtgagccccagcttcagtgaccctgcctgccctgtggagcggcccccccaggtgcaggccccctgtggggccaacagcagcagcggcaccagctaccacgagcagcaggccctgcctgtggacctgagcaacagcggcatccgcagccacggcagcggcagcttccatggagccagcgcctttgacccctgctgccctgtgagcagcagcagagctgccatcttcggccaccaggccgctgctgctgcccccagccagcccctgagcagcattgatggctacggcagctccatggtggcccagccccagccccagcccccaccccagcccagcctgagcagctgccgccactacatgcccccaccctatgccagcctgacccggcccctgcaccaccaggccagcgcctgcccccacagccacggcaaccccccaccccagacccagcccccaccccaggtggactatgtgatcccccaccctgtgcacgccttccacagccagatcagcagccacgccaccagccaccctgtggcccctcctccacccacccacctggccagcacagctgcccccatcccccagcacctgccccccacccaccagcccatcagccaccacatcccagccacagcccccccagcccagaggctgcacccccatgaggtgatgcagaggatggaggtgcagaggaggaggatgatgcagcaccccacccgggcccacgagcggcccccaccccacccccacaggatgcaccccaactacggccacggccaccacatccacgtgccccagaccatgagcagccacccccggcaggcccctgagaggtctgcctgggagctgggcatcgaggccggcgtgacagctgccacctacacccctggggccctgcacccccacctggcccactaccacgccccaccccggctgcaccacctgcagctgggcgccctgcccctgatggtgcctgacatggccggctacccccacatccgctacatcagcagcggcctggatggcaccagcttccggggccccttccggggcaactttgaggagctgatccacctggaggagcggctgggcaatgtgaacagaggagccagccagggcaccatcgagcgctgcacctacccccacaagtacaagaagaggaagctgcactgcaagcaggatggagaggagggcacagaggaggacacagaggagaagtgcaccatctgcctgagcatcctggaggagggagaagatgtgcggcggctgccctgcatgcacctgttccaccaggtgtgtgtggaccagtggctgatcaccaacaagaagtgccccatctgccgggtggacatcgaggcccagctgcccagcgagagctag

SEQ ID NO: 19361 - DNA, 372 bp, synthetic construct
  source 1..372: mol_type = other DNA; note = Synthetic coding sequence
atggccaagatcaaggcccgggacctgcggggcaagaagaaggaggagctgctgaagcagctggatgacctgaaggtggagctgagccagctgcgggtggccaaggtgactggaggagctgccagcaagctgagcaagatccgggtggtgaggaagagcatcgcccgggtgctgaccgtcatcaaccagacccagaaggagaacctgaggaagttctacaagggcaagaagtacaagcccctggacctgcggcccaagaagacccgggccatgagaagaaggctgaacaagcatgaggagaacctgaagaccaagaagcagcagaggaaggagcggctgtaccccctgaggaaatatgctgtgaaggcctag

SEQ ID NO: 19362 - DNA, 1635 bp, synthetic construct
  source 1..1635: mol_type = other DNA; note = Synthetic coding sequence
atgaagatcttctgcagccgggccaaccccaccaccggctctgtggagtggctggaggaggatgagcactatgactaccaccaggagatcgcccggagcagctatgctgacatgctgcatgacaaggacagaaatgtgaagtactaccagggcatccgggctgctgtgtcccgggtgaaggaccggggccagaaggccctggtgctggacattggaactggaacaggcctgctgtccatgatggctgtgacagctggagctgacttctgctacgccatcgaggagaactgtgaggccgtgccccaccgggccaccgtgtatgcccagctggtggagagcggccgcatgtggagctggaacaagctgttccccatccacgtgcagaccagcctgggggagcaggtgattgtgccccctgtggatgtggagagctgccctggggcccccagcgtgtgtgacatccagctgaaccaggtgtccccagctgacttcaccgtgctgagtgatgtgctgcccatgttcagcattgacttcagcaagcaggtgagcagcagcgctgcctgccacagcagaagatttgagcccctgaccagcggccgggcccaggtggtgctgtcctggtgggacatcgagatggaccctgagggcaagatcaagtgcaccatggcccccttctgggcccacagcgaccctgaggagatgcagtggagggaccactggatgcagtgtgtgtacttcctgccccaggaggagcctgtggtgcagggcagcgccctgtacctggtggcccaccatgatgactactgtgtgtggtacagcctgcagaggaccagccctgagaagaatgaaagagtgcggcagatgaggcctgtgtgtgactgccaggcccacctgctgtggaaccggcccaggtttggagagatcaatgaccaggacagaacagacagatatgtgcaggccctgaggacagtgtccctgctgctgggggagcccttcttcaccaccagcctgctgccctggcacaacctgtacttctggtacgtgaggacagctgtggaccagcacctgggccctggggccatggtgatgccccaggccgccagcctgcatgctgtggtggtggagttccgggacctgtggaggatccgcagcccctgtggggactgtgagggctttgatgtgcacatcatggatgacatgatcaagagggccctggacttccgggagagccgggaggccgagccccaccccctgtgggagtacccctgccgcagcctgtctgagccctggcagatcctgacctttgacttccagcagcctgtgcccctgcagcccctgtgtgccgagggcaccgtggagctgcggcggcccggccagagccacgccgctgtgctgtggatggagtaccacctgaccccagagtgcaccctgagcacaggcctgctggagcctgctgaccctgagggcggctgctgctggaacccccactgcaagcaggccgtgtacttcttcagccctgccccagacccccgggccctgctgggcggccccaggacagtgtcctatgctgtggagttccacccagacaccggggacatcatcatggagttcagacatgctgacaccccagactag

SEQ ID NO: 19363 - DNA, 1131 bp, synthetic construct
  source 1..1131: mol_type = other DNA; note = Synthetic coding sequence
atgcccctgcaggtgtctgactacagctggcagcagaccaagacagctgtgttcctgagcctgcccctgaagggcgtgtgtgtgcgggacacagatgtgttctgcacagagaactacctgaaggtgaacttcccccccttcctgtttgaggccttcctgtatgcccccattgatgatgagagcagcaaggccaagattggaaatgacaccatcgtgttcaccctgtacaagaaggaggccgccatgtgggagaccctgtctgtgactggagtggacaaggagatgatgcagaggatccgggagaagagcatcctgcaggcccaggagcgggccaaggaggccacagaggccaaggccgccgccaagcgggaggaccagaagtatgccctgtctgtgatgatgaagattgaggaggaggagaggaagaagattgaggacatgaaggaaaatgaaagaatcaaggccaccaaggccctggaggcctggaaggagtaccagaggaaggccgaggagcagaagaagatccagcgggaggagaagctgtgccagaaggagaagcagatcaaggaggagaggaagaagatcaagtacaagagcctgaccaggaacctggccagcaggaacctggcccccaagggcaggaacagcgagaacatcttcacagagaagctgaaggaggacagcatcccagcccccaggtctgtgggcagcatcaagatcaacttcacccccagggtcttccccacagccctgcgggagagccaggtggccgaggaggaggagtggctgcacaagcaggccgaggcccggcgggccatgaacacagacattgctgagctgtgtgacctgaaggaggaggagaagaaccctgagtggctgaaggacaagggcaacaagctgtttgccacagagaactacctggccgccatcaatgcctacaacctggccatccggctgaacaacaagatgcccctgctgtacctgaacagagctgcctgccacctgaagctgaagaacctgcacaaggccatcgaggacagcagcaaggcctaccgcatcatgaagaggcacctgcggctcatccaccccaccaagctgtacaagctgatgctgcggcgcttcggcatgtag

SEQ ID NO: 19364 - DNA, 4221 bp, synthetic construct
  source 1..4221: mol_type = other DNA; note = Synthetic coding sequence
atgtggagcctgacagccagcgagggggagagcaccacagcccacttcttcctgggcgctggagatgagggcctgggcacccggggcatcggcatgaggcctgaggagagtgacagcgagctgctggaggatgaggaggatgaggtgcccccagagccccagatcatcgtgggcatctgtgccatgaccaagaagagcaagagcaagcccatgacccagatcctggagcggctgtgccgctttgactacctgactgtggtgatcctgggagaagatgtgatcctgaatgaacctgtggagaactggcccagctgccactgcctgatctccttccacagcaagggcttccccctggacaaggctgtggcctacagcaagctgaggaaccccttcctgatcaatgacctggccatgcagtactacatccaggacagaagagaggtgtaccgcatcctgcaggaggagggcatcgacctgcccaggtatgctgtgctgaacagagatcctgcccggcctgaggagtgcaacctgattgaaggagaggaccaggtggaggtgaatggagctgtgttccccaagccctttgtggagaagcctgtgtctgctgaggaccacaacgtgtacatctactaccccagcagcgctgggggcggcagccagaggctcttcaggaagattggcagccgcagctctgtgtacagccctgagagctctgtgaggaagacaggcagctacatctatgaggagttcatgcccacagatggaacagatgtgaaggtgtacacagtgggccctgactatgcccacgccgaggccaggaagagccctgccctggatggcaaggtggagcgggacagcgagggcaaggagatccgctaccctgtgatgctgacagccatggagaagctggtggccaggaaggtgtgtgtggccttcaagcagacagtgtgtggctttgacctgctgcgggccaacggccacagctttgtgtgtgatgtgaatggcttctcctttgtgaagaacagcatgaagtactatgatgactgtgccaagatcctgggcaacaccatcatgagggagctggccccccagttccagatcccctggagcatccccacagaagctgaggacatccccatcgtgcccaccaccagcggcaccatgatggagctgcgctgtgtgattgccatcatccgccacggggacaggacccccaagcagaagatgaagatggaggtgaagcacccccgcttctttgccctgtttgagaagcatggaggctacaagacaggcaagctgaagctgaagaggcctgagcagctgcaggaggtgctggacatcacccggctgctgctggccgagctggagaaggagcctggaggagaaattgaggagaagacaggcaagctggagcagctgaagtctgtgctggagatgtatggccacttcagcggcatcaacaggaaggtgcagctgacctactacccccatggagtgaaggccagcaatgaaggccaggacccccagcgggagaccctggcccccagcctgctgctggtgctgaagtggggcggggagctgaccccagctggccgggtgcaggccgaggagctgggccgggccttccgctgcatgtacccaggcggccagggcgactatgccggcttccctggctgcggcctgctgcggctgcacagcaccttcagacatgacctgaagatctatgccagtgatgagggccgggtgcagatgacagctgctgcctttgccaagggcctgctggccctggagggggagctgacccccatcctggtgcagatggtgaagagcgccaacatgaatggcctgctggacagtgatggagacagcctgagcagctgccagcaccgggtgaaggcccggctgcaccacatcctgcagcaggatgccccctttggacctgaggactatgaccagctggcccccaccaggagcaccagcctgctgaacagcatgaccatcatccagaaccctgtgaaggtgtgtgaccaggtgtttgccctgattgagaacctgacccaccagatccgggagaggatgcaggaccccaggtctgtggacctgcagctgtaccacagcgagaccctggagctgatgctgcagcgctggagcaagctggagcgggacttccggcagaagagcggccgctatgacatcagcaagatcccagacatctatgactgtgtgaagtatgatgtgcagcacaacggcagcctgggcctgcagggcacagctgagctgctgcggctgagcaaggccctggctgatgtggtgatcccccaggagtatggcatcagccgggaggagaagctggagattgctgtgggcttctgcctgcccctgctgaggaagatcctgctggacctgcagaggacccatgaagatgagagcgtgaacaagctgcaccccctgtacagcagaggagtgctgagccctggccgccacgtgaggacccggctgtacttcaccagcgagagccacgtgcacagcctgctgagcgtcttccgctatggaggcctgctggatgagacccaggatgcccagtggcagagggccctggactacctgagcgccatcagcgagctgaactacatgacccagatcgtcatcatgctgtatgaggacaacacccaggaccccctgtctgaggagcgcttccacgtggagctgcacttcagccctggggtgaagggcgtggaggaggagggcagcgccccagctggctgcggcttccggcctgccagcagtgaaaatgaggagatgaagaccaaccagggctccatggagaacctgtgccctgggaaggccagtgatgagccagaccgggccctgcagaccagcccccagcccccagagggccctggcctgcccaggaggagccccctcatccggaacaggaaggccggctccatggaggtgctgtctgagaccagcagcagcaggcctgggggctaccgcctcttcagcagcagccggcccccaacagagatgaagcagagcggcctgggctttgagggctgcagcatggtgcccaccatctaccccctggagaccctgcacaatgccctgagcctgcggcaggtgtctgagttcctgagccgggtgtgccagaggcacacagatgcccaggcccaggccagcgctgccctgtttgacagcatgcacagcagccaggccagtgacaaccccttcagcccccccaggaccctgcacagcccccccctgcagctgcagcagaggtctgagaagccaccctggctggagacccgcttctgccacgtgggccaggccggcctggagctgctgaccagcagtgacctgcctgccagcgccagccagagcgctggcatcactggagtgagccacaggacccagcctgacagcagcggccccagcagcacagtgagcagcgctggccccagcagccccaccaccgtggatggcaacagccagtttggcttcagtgaccagcccagcctgaacagccacgtggccgaggagcaccagggcctgggcctgctgcaggagaccccaggcagcggggcccaggagctgagcattgaaggagagcaggagctgtttgagcccaaccagagcccccaggtgccccccatggagaccagccagccctatgaggaggtgtcccagccctgccaggaggtgcctgacatcagccagccctgccaggacatcagcgaggccctgagccagccctgccagaaggtgcctgacatcagccagcagtgccaggagaaccacgacaatggaaaccacacctgccaggaggtgccccacatcagccagccctgccagaagagcagccagctgtgccagaaggtgtctgaggaggtgtgccagctgtgcctggagaacagcgaggaggtgtcccagccctgccagggcgtgtctgtggaggtgggcaagctggtgcacaagttccacgtgggcgtgggcagcctggtgcaggagaccctggtggaggtgggcagccctgctgaggagatccctgaggaggtgatccagccctaccaggagttctctgtggaggtgggccgcctggcccaggagaccagcgccatcaacctgctgagccagggcatccctgagattgacaagcccagccaggagttccctgaggagattgacctgcaggcccaggaggtgcctgaggagatcaactag

SEQ ID NO: 19365 - DNA, 1338 bp, synthetic construct
  source 1..1338: mol_type = other DNA; note = Synthetic coding sequence
atggtgctggagggcaaccctgaggtgggcagccccaggaccagtgacctgcagcaccggggcaacaagggcagctgtgtgctgagcagccctggagaagatgcccagcctggagaggagcccatcaagtacggggagctgattgtgctgggctacaacggctgcctggccagcggggacaagggcagaagaagaagccggctggccctgagccgccgcagccacgccaatggagtgaagccagatgtgatgcaccacatcagcacccccctggtgtccaaggccctgagcaacagaggccagcacagcatctcctacaccctgagccgcagccacagcgtgattgtggagtacacccatgacagcgacacagacatgttccagatcggccgcagcacagagaacatgattgactttgtggtgacagacaccagccctgggggcggcgctgctgagggccccagcgcccagagcaccatcagccgctatgcctgccgcatcctgtgtgacagaagaccaccctacacagcccgcatctatgctgctggctttgatgccagcagcaacatcttcctgggggagcgggccgccaagtggaggaccccagatggcctgatggatggcctgaccaccaacggggtgctggtgatgcaccctgctgggggcttctctgaagattctgcccctggggtgtggagggagatctctgtgtgtggaaatgtgtacaccctgcgggacagccgcagcgcccagcagaggggcaagctggtggagaatgaaagcaatgtgctgcaggacggcagcctgattgacctgtgtggggccaccctgctgtggaggaccccagctggcctgctgcgggcccccaccctgaagcagctggaggcccagaggcaggaggccaatgctgcccggccccagtgccctgtgggcctgagcaccctggccttccccagccctgcccggggccgcacagccccagacaagcagcagccctgggtgtatgtgcgctgtggccacgtgcacggctaccacggctggggctgccggcgggagcggggcccccaggagagagaatgtcccctgtgccgcctggtgggcccctacgtgcccctgtggctgggccaggaggccggcctgtgcctggaccccggcccccccagccacgcctttgccccctgtggccacgtgtgcagcgagaagacagcccgctactgggcccagacccccctgccccacggcacccacgccttccacgccgcctgccccttctgtggggcctggctgaccggggagcacggctgtgtgcggctcatcttccagggccccctggactag

SEQ ID NO: 19366 - DNA, 1950 bp, synthetic construct
  source 1..1950: mol_type = other DNA; note = Synthetic coding sequence
atgggcacagccctggtgtaccacgaggacatgacagccacccggctgctgtgggatgatcctgaatgtgaaattgaaagacctgagcggctgacagctgccctggaccggctgcggcagaggggcctggagcagcgctgcctgcggctgagcgcccgggaggccagcgaggaggagctgggcctggtgcacagcccagaatatgtgtccctggtgcgggagacccaggtgctgggcaaggaggagctgcaggccctgagcggccagtttgatgccatctacttccaccccagcaccttccactgtgcccggctggccgccggggccggcctgcagctggtggatgctgtgctgactggagctgtgcagaatggcctggccctggtgcggcccccaggccaccacggccagagagctgctgccaacggcttctgtgtgttcaacaacgtggccatcgccgccgcccacgccaagcagaagcacggcctgcaccgcatcctggtggtggactgggatgtgcaccacggccagggcatccagtacctgtttgaagatgaccccagcgtgctgtacttctcctggcacagatatgaacatggccgcttctggcccttcctgcgggagagtgatgctgatgctgtgggccggggccagggcctgggcttcaccgtgaacctgccctggaaccaggtgggcatgggaaatgctgactatgtggccgccttcctgcacctgctgctgcccctggcctttgagggccagatgcaggccaccccagagtgctttgcccacctgacccagctgctgcaggtgctggccggcggccgggtgtgtgctgtgctggagggcggctaccacctggagagcctggccgagagcgtgtgcatgacagtgcagaccctgctgggggaccctgccccacccctgagcggccccatggccccctgccagagcgccctggagagcatccagagcgcccgggccgcccaggccccccactggaagagcctgcagcagcaggatgtgacagctgtgcccatgagccccagcagccacagccctgagggccggcccccacccctgctgcccggcggccctgtgtgcaaggctgctgccagcgcccccagcagcctgctggaccagccctgcctgtgcccagcccccagcgtgaggacagctgtggccctgaccaccccagacatcaccctggtgctgcccccagatgtgatccagcaggaggccagcgccctgcgggaggagacagaggcctgggcccggccccatgagagcctggcccgggaggaggccctgacagccctgggcaagctgctgtacctgctggatggcatgctggatggccaggtgaacagcggcattgctgccaccccagccagcgctgctgctgccaccctggatgtggccgtgcggcggggcctgagccatggagcccagaggctgctgtgtgtggccctgggccagctggaccggcccccagacctggcccatgatggccgcagcctgtggctgaacatccggggcaaggaggccgccgccctgtccatgtttcatgtgtccacccccctgcctgtgatgactggaggcttcctgagctgcatcctgggcctggtgctgcccctggcctacggcttccagcctgacctggtgctggtggccctgggccctggccacggcctgcagggcccccacgccgccctgctggccgccatgctgcggggcctggccggcggccgggtgctggccctgctggaggagaacagcaccccccagctggccggcatcctggcccgggtgctgaatggagaggccccacccagcctgggccccagctctgtggccagcccagaagatgtgcaggccctgatgtacctgcggggccagctggagccccagtggaagatgctgcagtgccacccccacctggtggcctag

SEQ ID NO: 19367 - DNA, 795 bp, synthetic construct
  source 1..795: mol_type = other DNA; note = Synthetic coding sequence
atggccggggagcagaagcccagcagcaacctgctggagcagttcatcctgctggccaagggcaccagcggcagcgccctgacagccctgatcagccaggtgctggaggcccctggggtgtatgtgtttggagagctgctggagctggccaacgtgcaggagctggccgagggcgccaatgctgcctacctgcagctgctgaacctgtttgcctacggcacctacccagactacatcgccaacaaggagagcctgcctgagctgagcacagcccagcagaacaagctgaagcacctgaccatcgtgtccctggccagcaggatgaagtgcatcccctacagcgtgctgctgaaggacctggagatgaggaacctgcgggagctggaggacctgatcattgaagctgtgtacacagacatcatccagggcaagctggaccagaggaaccagctgctggaggtggacttctgcatcggccgggacatcaggaagaaggacatcaacaacatcgtgaagaccctgcacgagtggtgtgatggctgtgaggccgtgctgctgggcatcgagcagcaggtgctgcgggccaaccagtacaaggagaaccacaacagaacccagcagcaggtggaggccgaggtgaccaacatcaagaagaccctgaaggccacagccagcagcagcgcccaggagatggagcagcagctggccgagagagaatgtcctcctcatgctgagcagaggcagcccaccaagaagatgagcaaggtgaagggcctggtgagcagccgccactag

SEQ ID NO: 19368 - DNA, 726 bp, synthetic construct
  source 1..726: mol_type = other DNA; note = Synthetic coding sequence
atgtctgccagcctgaactacaagagcttcagcaaggagcagcagaccatggacaacctggagaagcagctgatctgccccatctgcctggagatgttcaccaagcctgtggtgatcctgccctgccagcacaacctgtgcaggaaatgtgccagtgacatcttccaggccagcaacccctacctgcccacccggggcggcaccaccatggccagcggcggccgcttccgctgccccagctgcagacatgaggtggtgctggacagacatggagtgtatggcctgcagaggaacctgctggtggagaacatcatcgacatctacaagcaggagagcaccaggcctgagaagaagagtgaccagcccatgtgtgaggagcacgaggaggagcgcatcaacatctactgcctgaactgtgaggtgcccacctgcagcctgtgcaaggtgtttggagcccacaaggactgccaggtggcccccctgacccacgtgttccagaggcagaagtctgagctgagtgatggcatcgccatcctggtgggcagcaatgacagagtgcagggcgtcatcagccagctggaggacacctgcaagaccatcgagatcggctttgaggccccacccctgcagggccaggccgccgccccagccagcggcagcggggctgacagcgagcccgcccggcacatcttctccttctcctggctgaacagcctgaatgaatag

SEQ ID NO: 19369 - DNA, 3501 bp, synthetic construct
  source 1..3501: mol_type = other DNA; note = Synthetic coding sequence
atggccaatgacagccctgccaagagcctggtggacatcgacctgagcagcctgcgggaccctgctggcatctttgagctggtggaggtggtgggcaatggcacctacggccaggtgtacaagggccgccacgtgaagacaggccagctggccgccatcaaggtgatggatgtgacagaagatgaggaggaggagatcaagctggagatcaacatgctgaagaagtacagccaccacaggaacatcgccacctactacggggccttcatcaagaagagccccccaggccatgatgaccagctgtggctggtgatggagttctgtggggccggcagcatcacagacctggtgaagaacaccaagggcaacaccctgaaggaggactggatcgcctacatcagccgggagatcctgcggggcctggcccacctgcacatccaccacgtgatccaccgggacatcaagggccagaatgtgctgctgacagaaaatgctgaggtgaagctggtggactttggagtgtctgcccagctggacagaacagtgggcagaagaaacaccttcatcggcaccccctactggatggcccctgaggtgattgcctgtgatgagaacccagatgccacctatgactacagaagtgacctgtggagctgtggcatcacagccatcgagatggccgagggcgccccacccctgtgtgacatgcaccccatgagggccctcttcctgatccccagaaatcctccaccccggctgaagagcaagaagtggagcaagaagttcttctccttcatcgagggctgcctggtgaagaactacatgcagaggcccagcacagagcagctgctgaagcaccccttcatccgggaccagcccaatgaaaggcaggtgcgcatccagctgaaggaccacatcgacaggaccaggaagaagagaggagagaaggatgaaacagaatatgagtacagcggcagcgaggaggaggaggaggaggtgcctgagcaggagggggagcccagcagcatcgtgaatgtgcctggagagagcaccctgcggcgggacttcctgcggctgcagcaggagaacaaggagaggtctgaggccctgcggcggcagcagctgctgcaggagcagcagctgcgggagcaggaggagtacaagaggcagctgctggccgagcggcagaagagaattgagcagcagaaggagcagaggcggcggctggaggagcagcagaggcgggagcgggaggcccggcggcagcaggagcgggagcagaggagaagagagcaggaggagaagaggcggctggaggagctggagaggaggaggaaggaggaggaggagcggcggcgggcagaggaggagaagagaagagtggagcgggagcaggagtacatccggcggcagctggaggaggagcagaggcacctggaggtgctgcagcagcagctgctgcaggagcaggccatgctgctgcatgaccaccggcggccccacccccagcacagccagcagcccccaccaccccagcaggagaggagcaagcccagcttccacgcccctgagcccaaggcccactatgagcctgctgaccgggcccgggaggtgcctgtgaggaccaccagccgcagccctgtgctgagcagaagagacagccccctgcagggcagcggccagcagaacagccaggccggccagaggaacagcaccagcagcattgagccccggctgctgtgggagcgggtggagaagctggtgcccaggcctggcagcggcagcagcagcggcagcagcaacagcggcagccagcccggcagccaccctggcagccagagcggcagcggggagcgcttccgggtgcgcagcagcagcaagtctgagggcagccccagccagaggctggagaatgctgtgaagaagccagaggacaagaaggaggtgttccggcccctgaagccagctgtgagaattgacctgacagccctggccaaggagctgcgggctgtggaggatgtgcggcccccccacaaggtgacagactacagcagcagcagcgaggagagcggcaccacagatgaggaggatgatgatgtggagcaggagggcgcagatgagagcaccagcggccctgaggacaccagggctgccagcagcctgaacctgagcaatggagaaacagagagcgtgaagaccatgattgtgcatgatgatgtggagagcgagcccgccatgacccccagcaaggagggcaccctgattgtgcggcagacccagagcgccagcagcaccctgcagaagcacaagagcagcagcagcttcacccccttcatcgacccccggctgctgcagatcagccccagcagcggcaccaccgtgacctctgtggtgggcttcagctgtgatggcatgaggcctgaggccatccggcaggaccccaccaggaaaggatctgtggtgaatgtgaaccccaccaacacccggccccagagcgacaccccagagatcaggaagtacaagaagcgcttcaacagcgagatcctgtgtgccgccctgtggggcgtgaacctgctggtgggcacagagagcggcctgatgctgctggacaggagcggccagggcaaggtgtaccccctcatcaacagaagacgcttccagcagatggatgtgctggagggcctgaatgtgctggtgaccatcagcggcaagaaggacaagctgcgggtgtactacctgtcctggctgaggaacaagatcctgcacaatgaccctgaggtggagaagaagcagggctggaccaccgtgggggacctggagggctgtgtgcactacaaggtggtgaagtatgaaagaatcaagttcctggtgattgccctgaagagctctgtggaggtgtatgcctgggcccccaagccctaccacaagttcatggccttcaagagctttggagagctggtgcacaagcccctgctggtggacctgactgtggaggagggccagaggctgaaggtgatctacggcagctgtgccggcttccacgctgtggatgtggacagcggctctgtgtatgacatctacctgcccacccacgtgaggaagaacccccacagcatgatccagtgcagcatcaagccccacgccatcatcatcctgcccaacacagatggcatggagctgctggtgtgctatgaagatgagggcgtgtatgtgaacacctacggccgcatcaccaaggatgtggtgctgcagtggggcgagatgcccacctctgtggcctacatccgcagcaaccagaccatgggctggggcgagaaggccatcgagatccgctctgtggagaccggccacctggatggagtcttcatgcacaagagggcccagaggctgaagttcctgtgtgaaagaaatgacaaggtgttctttgcctctgtgcgcagcggcggcagcagccaggtgtacttcatgaccctgggccgcaccagcctgctgtcctggtag

SEQ ID NO: 19370 - DNA, 2466 bp, synthetic construct
  source 1..2466: mol_type = other DNA; note = Synthetic coding sequence
atggtggcccctgtgctggagaccagccacgtgttctgctgccccaacagagtgcggggcgtgctgaactggagcagcggcccccggggcctgctggccttcggcaccagctgcagcgtggtgctgtatgaccccctgaagagggtggtggtgaccaacctgaatggccacacagcccgggtgaactgcatccagtggatctgcaagcaggacggcagccccagcacagagctggtgtctgggggcagtgacaaccaggtgatccactgggagattgaggacaaccagctgctgaaggctgtgcacctgcagggccacgagggccctgtgtatgctgtgcatgctgtgtaccagaggaggaccagtgaccctgccctgtgcaccctcatcgtgtctgctgctgctgacagcgctgtgcggctgtggagcaagaagggccctgaggtgacctggaagacaggccaggtggagcggggccgggcctggaagcccccagccagcctggccctgtgcagccgcagctgtgacagcatggtgtcctgctacgccagcatcctgtgcaaggccctgtggaaggagaagctgcacaccttctggcaccacaaccgcatctccttcctgcccagcgccttccggcccatccccatcctggcctgtggaaatgatgactgccgcatccacatctttgcccagcagaatgaccagttccagaaggtgctgagcctgtgtggccacgaggactggatccggggcgtggagtgggccgccttcggccgggacctcttcctggccagctgcagccaggactgcctgatccgcatctggaagctgtacatcaagagcaccagcctggagacccaggatgatgacaacatccggctgaaggagaacaccttcaccattgaaaatgaatctgtgaagatcgcctttgctgtgaccctggagaccgtgctggccggccacgagaactgggtgaatgctgtgcactggcagcccgtcttctacaaggatggagtgctgcagcagcctgtgcggctgctgagcgcctccatggacaagaccatgatcctgtgggccccagatgaggagagcggcgtgtggctggagcagcgggagtggaccccagaaattgtcatcagcggccactttgatggagtgcaggacctggtgtgggaccctgagggggagttcatcatcaccgtgggcacagaccagaccacccggctgtttgccccctggaagaggaaggaccagagccaggtgacctggcatgagatcgcccggccccagatccacggctatgacctgaagtgcctggccatgatcaaccgcttccagtttgtgtctggagcagatgagaaggtgctgcgggtcttcagcgcccccaggaactttgtggagaacttctgtgccatcaccggccagagcctgaaccacgtgctgtgcaaccaggacagcgacctgcctgagggcgccaccgtgcctgccctgggcctgagcaacaaggctgtgttccagggcgacatcgccagccagcccagtgatgaggaggagctgctgaccagcactggatttgagtaccagcaggtggccttccagcccagcatcctgacagagcccccaacagaggaccacctgctgcagaacaccctgtggccagaggtgcagaagctgtatggccacggctatgagatcttctgtgtgacctgcaacagcagcaagaccctgctggccagcgcctgcaaggccgccaagaaggagcacgccgccatcatcctgtggaacaccacctcctggaagcaggtgcagaacctggtgttccacagcctgactgtgacccagatggccttcagccccaatgagaagttcctgctggccgtgtcccgggacaggacctggagcctgtggaagaagcaggacaccatcagccctgagtttgagcccgtcttcagcctgtttgccttcaccaacaagatcacctctgtgcacagccgcatcatctggagctgtgactggagcccagacagcaagtacttcttcaccggcagccgggacaagaaggtggtggtgtggggagaatgtgacagcacagatgactgcatcgagcacaacatcggcccctgcagctctgtgctggatgtgggcggcgctgtgacagctgtgtctgtgtgccctgtgctgcaccccagccagagatatgtggtggccgtgggcctggagtgtgggaagatctgcctgtacacctggaagaagacagaccaggtgcctgagatcaatgactggacccactgtgtggagaccagccagagccagagccacaccctggccatcaggaagctgtgctggaagaactgcagcggcaagacagagcagaaggaggccgagggcgctgagtggctgcactttgccagctgtggggaggaccacacagtgaagatccaccgggtgaacaagtgtgccctgtag

SEQ ID NO: 19371 - DNA, 969 bp, synthetic construct
  source 1..969: mol_type = other DNA; note = Synthetic coding sequence
atggtgtctgtcatcaacacagtggacaccagccatgaggacatgattcatgatgcccagatggactactacggcacccggctggccacctgcagcagtgacagatctgtgaagatctttgatgtgagaaatggaggccagatcctgattgctgacctgcggggccacgagggccctgtgtggcaggtggcctgggcccaccccatgtatggcaacatcctggccagctgcagctatgacaggaaggtgatcatctggagagaagaaaatggcacctgggagaagagccatgaacatgctggccatgacagctctgtgaacagcgtgtgctgggcccctcatgactatggcctcatcctggcctgtggcagcagtgatggagccatcagcctgctgacctacacaggagagggccagtgggaggtgaagaagatcaacaatgcccacaccatcggctgcaatgctgtgtcctgggccccagctgtggtgcccggcagcctgattgaccaccccagcggccagaagcccaactacatcaagagatttgccagcggcggctgtgacaacctgatcaagctgtggaaggaggaggaggatggccagtggaaggaggagcagaagctggaggcccacagcgactgggtgagagatgtggcctgggcccccagcatcggcctgcccaccagcaccatcgccagctgcagccaggacggccgggtcttcatctggacctgtgatgatgccagcagcaacacctggagccccaagctgctgcacaagttcaatgatgtggtgtggcacgtgtcctggagcatcacagccaacatcctggccgtgtctggaggagacaacaaggtgaccctgtggaaggagagcgtggatggccagtgggtgtgcatcagtgatgtgaacaagggccagggctctgtgtctgcctctgtgacagagggccagcagaatgagcagtag

SEQ ID NO: 19372 - DNA, 1347 bp, synthetic construct
  source 1..1347: mol_type = other DNA; note = Synthetic coding sequence
atgagcagcaggaagctgagcggccccaagggccggcggctgagcatccacgtggtgacctggaatgtggccagcgctgccccacccctggacctgagtgacctgctgcagctgaacaacagaaacctgaacctggacatctacgtgattggcctgcaggagctgaacagcggcatcatcagcctgctgagtgatgctgccttcaatgacagctggagcagcttcctgatggatgtgctgagccccctgtccttcatcaaggtgagccacgtgaggatgcagggcatcctgctgctggtgtttgccaagtaccagcacctgccctacatccagatcctgagcaccaagagcacccccaccggcctgtttggctactggggcaacaagggcggcgtgaacatctgcctgaagctgtatggctactacgtgtccatcatcaactgccacctgcccccccacatcagcaacaactaccagaggctggagcactttgaccgcatcctggagatgcagaactgtgagggccgggacatccccaacatcctggaccatgacctgatcatctggtttggagacatgaacttcagaattgaggactttggcctgcactttgtgcgggagagcatcaagaaccgctgctacggcggcctgtgggagaaggaccagctgagcatcgccaagaagcatgaccccctgctgcgggagttccaggagggccgcctgctcttcccccccacctacaagtttgacaggaacagcaatgactatgacaccagcgagaagaagaggaagccagcctggacagaccgcatcctgtggaggctgaagaggcagccctgtgccggccctgacacccccatccccccagccagccacttcagcctgagcctgcggggctacagcagccacatgacctacggcatcagtgaccacaagcctgtgtctggcacctttgacctggagctgaagcccctggtgtctgcccccctgattgtgctgatgcctgaggacctgtggacagtggagaatgacatgatggtgtcctacagcagcaccagtgacttccccagcagcccctgggactggattggcctgtacaaggtgggcctgagagatgtgaatgactatgtgtcctatgcctgggtgggggacagcaaggtgtcctgcagcgacaacctgaaccaggtgtacatcgacatcagcaacatccccaccacagaagatgagttcctgctgtgctactacagcaacagcctgcggtctgtggtgggcatcagccggcccttccagatccccccaggcagcctgcgggaggaccccctgggggaggcccagccccagatctag

SEQ ID NO: 19373 - DNA, 1641 bp, synthetic construct; identical to SEQ ID NO: 19311
  source 1..1641: mol_type = other DNA; note = Synthetic coding sequence

SEQ ID NO: 19374 - DNA, 3840 bp, synthetic construct
  source 1..3840: mol_type = other DNA; note = Synthetic coding sequence
atgctgcaggccctgcagctgaggacaggcttcttctgcttccgggtgctggtggccctgagcccctgtgccctgcatgacagcggccgcctgaccaccggcagcttcaacgtggtgagagatgaggaggaggagatcaagctggagatcaacatgctgaagaagtacagccaccacaggaacatcgccacctactacggggccttcatcaagaagagccccccaggccatgatgaccagctgtggctggtgatggagttctgtggggccggcagcatcacagacctggtgaagaacaccaagggcaacaccctgaaggaggactggatcgcctacatcagccgggagatcctgcggggcctggcccacctgcacatccaccacgtgatccaccgggacatcaagggccagaatgtgctgctgacagaaaatgctgaggtgaagctggtggactttggagtgtctgcccagctggacagaacagtgggcagaagaaacaccttcatcggcaccccctactggatggcccctgaggtgattgcctgtgatgagaacccagatgccacctatgactacagaagtgacctgtggagctgtggcatcacagccatcgagatggccgagggcgccccacccctgtgtgacatgcaccccatgagggccctcttcctgatccccagaaatcctccaccccggctgaagagcaagaagtggagcaagaagttcttctccttcatcgagggctgcctggtgaagaactacatgcagaggcccagcacagagcagctgctgaagcaccccttcatccgggaccagcccaatgaaaggcaggtgcgcatccagctgaaggaccacatcgacaggaccaggaagaagagaggagagaaggatgaaacagaatatgagtacagcggcagcgaggaggaggaggaggaggtgcctgagcaggagggggagcccagcagcatcgtgaatgtgcctggagagagcaccctgcggcgggacttcctgcggctgcagcaggagaacaaggagaggtctgaggccctgcggcggcagcagctgctgcaggagcagcagctgcgggagcaggaggagtacaagaggcagctgctggccgagcggcagaagagaattgagcagcagaaggagcagaggcggcggctggaggagcagcagaggcgggagcgggaggcccggcggcagcaggagcgggagcagaggagaagagagcaggaggagaagaggcggctggaggagctggagaggaggaggaaggaggaggaggagcggcggcgggcagaggaggagaagagaagagtggagcgggagcaggagtacatccggcggcagctggaggaggagcagaggcacctggaggtgctgcagcagcagctgctgcaggagcaggccatgctgctgcatgaccaccggcggccccacccccagcacagccagcagcccccaccaccccagcaggagaggagcaagcccagcttccacgcccctgagcccaaggcccactatgagcctgctgaccgggcccgggaggtgcagtggagccacctggccagcctgaagaacaacgtgtcccctgtgagccgcagccacagcttcagtgaccccagccccaagtttgcccaccaccacctgcggagccaggacccctgcccccccagccgctctgaggtgctgagccagagcagtgacagcaagtctgaggccccagaccccacccagaaggcctggagcagaagtgacagtgatgaggtgcccccccgggtgcctgtgaggaccaccagccgcagccctgtgctgagccggcgggacagccccctgcagggcagcggccagcagaacagccaggccggccagaggaacagcaccagcagcattgagccccggctgctgtgggagcgggtggagaagctggtgccccggcccggcagcggcagcagcagcggcagcagcaacagcggcagccagcccggcagccaccctggcagccagagcggcagcggggagcgcttccgggtgcgcagcagcagcaagtctgagggcagccccagccagaggctggagaatgctgtgaagaagccagaggacaagaaggaggtgttccggcccctgaagccagctgtgagaattgacctgacagccctggccaaggagctgcgggctgtggaggatgtgcggcccccccacaaggtgacagactacagcagcagcagcgaggagagcggcaccacagatgaagaagatgatgatgtggagcaggagggcgcagatgagagcaccagcggccctgaggacacccgggccgccagcagcctgaacctgagcaatggagaaacagaatctgtgaagaccatgattgtgcatgatgatgtggagagcgagcccgccatgacccccagcaaggagggcaccctcatcgtgcggcagagcacagtggaccagaagagggccagccaccacgagagcaatggatttgctggccgcatccacctgctgcctgacctgctgcagcagagccacagcagcagcaccagcagcaccagcagcagccccagcagcagccagcccacccccaccatgagcccccagaccccccaggacaagctgacagccaatgagacccagagcgccagcagcaccctgcagaagcacaagagcagcagcagcttcacccccttcatcgacccccggctgctgcagatcagccccagcagcggcaccaccgtgacctctgtggtgggcttcagctgtgatggcatgaggcctgaggccatccggcaggaccccaccaggaagggctctgtggtgaatgtgaaccccaccaacacccggccccagagcgacaccccagagatcaggaagtacaagaagcgcttcaacagcgagatcctgtgtgccgccctgtggggcgtgaacctgctggtgggcacagaaagtggcctgatgctgctggacagaagtggccagggcaaggtgtaccccctcatcaacagaagacgcttccagcagatggatgtgctggagggcctgaatgtgctggtgaccatcagcggcaagaaggacaagctgcgggtgtactacctgtcctggctgaggaacaagatcctgcacaatgaccctgaggtggagaagaagcagggctggaccaccgtgggggacctggagggctgtgtgcactacaaggtggtgaagtatgagcgcatcaagttcctggtgattgccctgaagagctctgtggaggtgtatgcctgggcccccaagccctaccacaagttcatggccttcaagagctttggagagctggtgcacaagcccctgctggtggacctgactgtggaggagggccagaggctgaaggtgatctacggcagctgtgccggcttccacgctgtggatgtggacagcggctctgtgtatgacatctacctgcccacccacatccagtgcagcatcaagccccacgccatcatcatcctgcccaacacagatggcatggagctgctggtgtgctatgaagatgaaggagtgtatgtgaacacctacggccgcatcaccaaggatgtggtgctgcagtggggcgagatgcccacctctgtggcctacatccgcagcaaccagaccatgggctggggcgagaaggccatcgagatccgctctgtggagaccggccacctggatggagtcttcatgcacaagagggcccagaggctgaagttcctgtgtgaaagaaatgacaaggtgttctttgcctctgtgcgcagcggcggcagcagccaggtgtacttcatgaccctgggccgcaccagcctgctgtcctggtag

SEQ ID NO: 19375 - DNA, 1989 bp, synthetic construct
  source 1..1989: mol_type = other DNA; note = Synthetic coding sequence
atggccagctgcccagacagcgacaacagctgggtgctggccggcagcgagagcctgcctgtggagaccctgggccctgccagcaggatggaccctgagagcgagcgggccctgcaggccccccacagccccagcaagacagatggcaaggagctggccggcaccatggatggagagggcaccctcttccagacagagagcccccagagcggcagcatcctgacagaggagacagaggtgaagggcaccctggagggagatgtgtgtggggtggagcccccaggccctggggacacagtggtgcagggcgacctgcaggagaccaccgtggtgacaggcctgggccctgacacccaggacctggagggccagagccccccccagagcctgcccagcacccccaaggccgcctggatccgggaggagggccgctgcagcagcagtgatgatgacacagatgtggacatggagggcctgcggcggcggcggggccgggaggccggccccccccagcccatggtgcccctggccgtggagaaccaggccggcggggagggcgccggcggggagctgggcatcagcctgaacatgtgcctgctgggcgccctggtgctgctgggcctgggcgtgctgctcttcagcggcggcctgtctgagagcgagaccggccccatggaggaggtggagcggcaggtgctgcctgaccctgaggtgctggaggccgtgggggaccggcaggacggcctgcgggagcagctgcaggcccctgtgcccccagattctgtgcccagcctgcagaacatgggcctgctgctggacaagctggccaaggagaaccaggacatccggctgctgcaggcccagctgcaggcccagaaggaggagctgcagagcctgatgcaccagcccaagggcctggaggaggagaatgcccagctgcggggggccctgcagcagggcgaggccttccagagggccctggagagcgagctgcagcagctgcgggcccggctgcagggcctggaggccgactgtgtgcggggcccagatggagtgtgcctgagcggcggccggggcccccagggcgacaaggccatccgggagcagggcccccgggagcaggagcctgagctgtccttcctgaagcagaaggagcagctggaggccgaggcccaggccctgcggcaggagctggagcggcagaggcggctgctgggctctgtgcagcaggacctggagaggagcctgcaggatgccagcagaggagaccctgcccatgctggcctggccgagctgggccaccggctggcccagaagctgcagggcctggagaactggggccaggaccccggggtgtctgccaatgccagcaaggcctggcaccagaagagccacttccagaacagccgggagtggagcggcaaggagaagtggtgggatggccagagggacaggaaggccgagcactggaagcacaagaaggaggagagcggccgggagaggaagaagaactggggcggccaggaggaccgggagcccgccggccgctggaaggagggccggccccgggtggaggagagcggcagcaagaaggagggcaagaggcagggccccaaggagccccccaggaagagcggcagcttccacagcagtggagagaagcagaagcagccccgctggagggagggcaccaaggagctgcccctgagccctgccttcttcggggaggatggcatcttcagacatgaccggctgcgcttccgggactttgtggatgccctggaggacagcctggaggaggtggccgtgcagcagacaggagatgatgatgaggtggatgactttgaggacttcatcttcagccacttcttcggggacaaggccctgaagaagaggtctgggaagaaggacaagcacagccagagccccagggctgctggcccccgggagggccacagccacagccaccaccaccaccaccggggctag

SEQ ID NO: 19376 - DNA, 2403 bp, synthetic construct
  source 1..2403: mol_type = other DNA; note = Synthetic coding sequence
atggtggcccctgtgctggagaccagccacgtgttctgctgccccaacagagtgcggggcgtgctgaactggagcagcggcccccggggcctgctggccttcggcaccagctgcagcgtggtgctgtatgaccccctgaagagggtggtggtgaccaacctgaatggccacacagcccgggtgaactgcatccagtggatctgcaagcaggacggcagccccagcacagagctggtgtctgggggcagtgacaaccaggtgatccactgggagattgaggacaaccagctgctgaaggctgtgcacctgcagggccacgagggccctgtgtatgctgtgcatgctgtgtaccagaggaggaccagtgaccctgccctgtgcaccctcatcgtgtctgctgctgctgacagcgctgtgcggctgtggagcaagaagggccctgaggtgcccatcctggcctgtggaaatgatgactgccgcatccacatctttgcccagcagaatgaccagttccagaaggtgctgagcctgtgtggccacgaggactggatccggggcgtggagtgggccgccttcggccgggacctcttcctggccagctgcagccaggactgcctgatccgcatctggaagctgtacatcaagagcaccagcctggagacccaggatgatgacaacatccggctgaaggagaacaccttcaccattgaaaatgaatctgtgaagatcgcctttgctgtgaccctggagaccgtgctggccggccacgagaactgggtgaatgctgtgcactggcagcctgtgttctacaaggatggagtgctgcagcagcctgtgcggctgctgagcgcctccatggacaagaccatgatcctgtgggccccagatgaggagagcggcgtgtggctggagcaggtgcgggtgggggaggtgggcggcaacaccctgggcttctatgactgccagttcaatgaagatggctccatgatcatcgcccacgccttccacggggccctgcacctgtggaagcagaacacagtgaacccccgggagtggaccccagagatcgtcatcagcggccactttgatggagtgcaggacctggtgtgggaccctgagggggagttcatcatcaccgtgggcacagaccagaccacccggctgtttgccccctggaagaggaaggaccagagccaggtgacctggcatgaaattgcccggccccagatccacggctatgacctgaagtgcctggccatgatcaaccgcttccagtttgtgtctggagcagatgagaaggtgctgcgggtcttcagcgcccccaggaactttgtggagaacttctgtgccatcaccggccagagcctgaaccacgtgctgtgcaaccaggacagcgacctgcctgagggcgccaccgtgcctgccctgggcctgagcaacaaggctgtgttccagggcgacatcgccagccagcccagtgatgaggaggagctgctgaccagcacaggctttgagtaccagcaggtggccttccagcccagcatcctgacagagcccccaacagaggaccacctgctgcagaacaccctgtggccagaggtgcagaagctgtatggccacggctatgagatcttctgtgtgacctgcaacagcagcaagaccctgctggccagcgcctgcaaggccgccaagaaggagcacgccgccatcatcctgtggaacaccacctcctggaagcaggtgcagaacctggtgttccacagcctgactgtgacccagatggccttcagccccaatgagaagttcctgctggccgtgtcccgggacaggacctggagcctgtggaagaagcaggacaccatcagccctgagtttgagcctgtgttcagcctgtttgccttcaccaacaagatcacctctgtgcacagccgcatcatctggagctgtgactggagcccagacagcaagtacttcttcaccggcagccgggacaagaaggtggtggtgtggggagaatgtgacagcacagatgactgcatcgagcacaacatcggcccctgcagctctgtgctggatgtgggcggcgctgtgacagctgtgtctgtgtgccctgtgctgcaccccagccagcgctacgtggtggccgtgggcctggagtgtgggaagatctgcctgtacacctggaagaagacagaccaggtgcctgagatcaatgactggacccactgtgtggagaccagccagagccagagccacaccctggccatcaggaagctgtgctggaagaactgcagcggcaagacagagcagaaggaggccgagggcgctgagtggctgcactttgccagctgtggggaggaccacacagtgaagatccaccgggtgaacaagtgtgccctgtag

SEQ ID NO: 19377 - DNA, 561 bp, synthetic construct
  source 1..561: mol_type = other DNA; note = Synthetic coding sequence
atggccggggagaactttgccacccccttccacggccacgtgggccgcggggccttcagtgatgtgtatgagcctgctgaggacaccttcctgctgctgaatgccctggaggccgctgctgctgagctggccggcgtggagatctgcctggaggtgggcagcggcagcggcgtggtgtctgccttcctggcctccatgattggcccccaggccctgtacatgtgcacagacatcaaccctgaggccgccgcctgcaccctggagacagcccgctgcaacaaggtgcacatccagcctgtgatcacagacctggtgggcagccacggcatcgaggccgcctgggccggcggcaagaatggccgggaggtgatggaccgcttcttccccctggtgcctgacctgctgagccccaagggcctcttctacctggtgaccatcaaggagaacaaccctgaggagatcctgaagatcatgaagaccaagggcctgcagggcaccacagccctgagccggcaggccggccaggagaccctgtctgtgctgaagttcaccaagagctag

SEQ ID NO: 19378 - DNA, 2352 bp, synthetic construct
  source 1..2352: mol_type = other DNA; note = Synthetic coding sequence
atggccaagtacaacacaggaggcaaccccacagaagatgtgtctgtgaacagccggcccttccgggtgacaggccccaacagcagcagcggcatccaggccaggaagaacctcttcaacaaccagggcaatgccagccccccagctggccccagcaatgtgcccaagtttggcagccccaagccccctgtggccgtgaagcccagcagcgaggagaagccagacaaggagcccaagccacccttcctgaagcccaccggggccggccagcgcttcggcaccccagccagcctgaccacccgggaccctgaggccaaggtgggcttcctgaagcctgtgggccccaagcccatcaacctgcccaaggaggacagcaagcccaccttcccctggcccccaggcaacaagcccagcctgcacagcgtgaaccaggaccatgacctgaagcccctgggccccaagagcggccccaccccacccaccagtgaaaatgagcagaagcaggccttccccaagctgactggagtgaagggcaagttcatgtctgccagccaggacctggagcccaagcccctcttccccaagccagccttcggccagaagccacccctgagcacagagaacagccatgaagatgagagccccatgaagaatgtgagcagcagcaagggcagccctgcccccctgggcgtgcgcagcaagagcggccccctgaagccagccagagaagattctgagaacaaggaccatgctggggagatcagcagcctgcccttccctggggtggtgctgaagccagctgccagcagaggaggccctggcctgagcaagaatggagaggagaagaaggaggacaggaagattgatgctgccaagaacaccttccagagcaagatcaaccaggaggagctggccagcggcaccccaccagcccgcttccccaaggcccccagcaagctgactgtgggcggcccctggggccagagccaggagaaggagaagggggacaagaacagcgccacccccaagcagaagcccctgcccccactcttcaccctgggccccccaccacccaagcccaacagacctccaaatgtggacctgaccaagttccacaagaccagcagcggcaacagcaccagcaagggccagaccagctacagcaccaccagcctgcccccacctccacccagccacccagccagccagccccccctgcctgccagccaccccagccagccccctgtgcccagcctgccccccaggaacatcaagcccccatttgacctgaagagccctgtgaatgaagacaaccaggatggagtgacccacagtgatggagctggcaacctggatgaggagcaggacagcgagggggagacctatgaagatattgaggccagcaaggagcgggagaagaagcgggagaaggaggagaagaagaggctggagctggagaagaaggagcagaaggagaaggagaagaaggagcaggagatcaagaagaagttcaagctgaccggccccatccaggtgatccacctggccaaggcctgctgtgatgtgaagggcggcaagaatgagctgtccttcaagcagggcgagcagatcgagatcatccgcatcacagacaaccctgagggcaagtggctgggccgcacagcccggggcagctatggctacatcaagaccacagctgtggagattgattatgacagcctgaagctgaagaaggacagcctgggcgcccccagccggcccattgaagatgaccaggaggtgtatgatgatgtggccgagcaggatgacatcagcagccacagccagagcggcagcggcggcatcttccccccacctccagatgatgacatctatgatggcatcgaggaggaggatgctgatgatggcttccctgccccacccaagcagctggacatgggagatgaggtgtatgatgatgtggacaccagtgacttccctgtgtcctctgctgagatgagccagggcaccaacgtgggcaaggccaagacagaggagaaggacctgaagaagctgaagaagcaggagaaggaggagaaggacttcaggaagaagttcaagtatgatggagagatccgggtgctgtacagcaccaaggtgaccaccagcatcaccagcaagaagtggggcacccgggacctgcaggtgaagccaggagagagcctggaggtgatccagaccacagatgacaccaaggtgctgtgcagaaatgaggagggcaagtatggctacgtgctgcggagctacctggccgacaatgatggagagatctatgatgacattgctgatggctgcatctatgacaatgactag

SEQ ID NO: 19379 - DNA, 1722 bp, synthetic construct
  source 1..1722: mol_type = other DNA; note = Synthetic coding sequence
atgatccccccccaggaggccagcgccaggagaagagaaattgaggacaagctgaagcaggaggaggagaccctgtccttcatccgggacagcctggagaagagtgaccagctgaccaagaacatggtgtccatcctgagcagctttgagagccggctgatgaagctggagaacagcatcatccctgtgcacaagcagacagagaacctgcagaggctgcaggagaatgtggagaagaccctgagctgcctggaccacgtgatctcctactaccacgtgatctctggagatgatgacctggaggcccaggaggatgtgaccctggagcacctgcctgagagcgtgctgcaggacgtcatccgcatcagccgctggctggtggagtatggaagaaaccaggacttcatgaatgtgtactaccagatccgcagcagccagctggacaggagcatcaagggcctgaaggagcacttccacaagagcagcagcagcagtggagtgccctacagccctgccatccccaacaagaggaaggacacccccaccaagaagcctgtgaagaggcctggaagagatgacatgctggatgtggagacagatgcctacatccactgtgtgtctgcctttgtgaagctggcccagagcgagtaccagctgctggccgacatcatccctgagcaccaccagaagaagacctttgacagcctcatccaggatgccctggatggcctgatgctggagggagaaaatattgtgtctgctgccaggaaggccatcgtgagacatgacttcagcacagtgctgactgtgttccccatcctgcggcacctgaagcagaccaagccagagtttgaccaggtgctgcagggcacagctgccagcaccaagaacaagctgcccggcctcatcacctccatggagaccatcggggccaaggccctggaggactttgctgacaacatcaagaatgaccctgacaaggagtacaacatgcccaaggatggcaccgtgcatgagctgaccagcaatgccatcctcttcctgcagcagctgctggacttccaggagacagctggggccatgctggccagccaggagaccagcagcagcgccaccagctacagcagcgagttcagcaagaggctgctgagcacctacatctgcaaggtgctgggcaacctgcagctgaacctgctgagcaagagcaaggtgtatgaggaccctgccctgagcgccatcttcctgcacaacaactacaactacatcctgaagagcctggagaagtctgagctgatccagctggtggccgtgacccagaagacagctgagaggagctaccgggagcacatcgagcagcagatccagacctaccagaggtcctggctgaaggtgacagactacatcgccgagaagaacctgcccgtcttccagcccggggtgaagctgcgggacaaggagcggcagatcatcaaggagcgcttcaagggcttcaatgatggcctggaggagctgtgcaagatccagaaggcctgggccatcccagacacagagcagagggaccgcatccggcaggcccagaagaccatcgtgaaggagacctacggggccttcctgcagaagtttggatctgtgcccttcaccaagaaccctgagaagtacatcaagtatggagtggagcaggtgggggacatgattgaccggctgtttgacaccagcgcctag

SEQ ID NO: 19380 - DNA, 2475 bp, synthetic construct
  source 1..2475: mol_type = other DNA; note = Synthetic coding sequence
atgatgcagaatgtgcacctggcccctgagacagatgaagatgacctgtacagcggctacaatgactacaaccccatctatgacatcgaggagctggagaatgatgctgccttccagcaggccgtgaggaccagccacggccggcggccccccatcacagccaagatcagcagcacagctgtgacccggcccatcgccaccggctacggcagcaagaccagcctggccagcagcatcggccggcccatgaccggggccatccaggatggagtgacccggcccatgacagctgtgcgggctgctggcttcaccaaggccgccctgcggggcagcgcctttgaccccctgagccagagccggggccctgccagccccctggaggccaagaagaaggacagccctgaggagaagatcaagcagctggagaaggaggtgaatgagctggtggaggagagctgcatcgccaacagctgtggggacctgaagctggccctggagaaggccaaggatgctggcaggaaggagcgggtgctggtgcggcagcgggagcaggtgaccaccccagagaacatcaacctggacctgacctacagcgtgctcttcaacctggccagccagtacagcgtgaatgagatgtatgcagaggccctgaacacctaccaggtgattgtgaagaacaagatgttcagcaatgccggcatcctgaagatgaacatgggcaacatctacctgaagcagaggaactacagcaaggccatcaagttctacaggatggccctggaccaggtgcccagcgtgaacaagcagatgaggatcaagatcatgcagaacatcggcgtgaccttcatccaggccggccagtacagtgatgccatcaacagctatgagcacatcatgtccatggcccccaacctgaaggccggctacaacctgaccatctgctactttgccatcggggaccgggagaagatgaagaaggccttccagaagctgatcaccgtgcccctggagattgatgaggacaagtacatcagccccagtgatgacccccacaccaacctggtgacagaggccatcaagaatgaccacctgcggcagatggagcgggagaggaaggccatggccgagaagtacatcatgaccagcgccaagctgattgcccctgtgattgagaccagctttgctgctggctatgactggtgtgtggaggtggtgaaggccagccagtatgtggagctggccaatgacctggagatcaacaaggctgtgacctacctgcggcagaaggactacaaccaggccgtggagatcctgaaggtgctggagaagaaggacagccgggtgaagtctgctgctgccaccaacctgagcgccctgtactacatgggcaaggactttgcccaggccagcagctatgctgacattgctgtgaacagcgaccgctacaacccagctgccctgaccaacaagggcaacacagtgtttgccaatggagactatgagaaggctgctgagttctacaaggaggccctgagaaatgacagcagctgcacagaggccctgtacaacatcggcctgacctatgagaagctgaaccggctggatgaggccctggactgcttcctgaagctgcacgccatcctgagaaattctgctgaggtgctgtaccagatcgccaacatctatgagctgatggagaaccccagccaggccatcgagtggctgatgcaggtggtgtctgtcatccccacagacccccaggtgctgagcaagctgggggagctgtatgaccgggagggggacaagagccaggccttccagtactactatgagagctaccgctacttcccctgcaacatcgaggtgattgagtggctgggcgcctactacatcgacacccagttctgggagaaggccatccagtactttgagcgggccagcctcatccagcccacccaggtgaagtggcagctgatggtggccagctgcttcagaagaagtggcaactaccagaaggccctggacacctacaaggacacccacaggaagtttcctgaaaatgtggagtgcctgcgcttcctggtgcggctgtgcacagacctgggcctgaaggatgcccaggagtatgccaggaagctgaagaggctggagaagatgaaggagatccgggagcagaggatcaagagcggcagagatggcagcggcggcagccggggcaagcgggagggcagcgccagcggggacagcggccagaactacagcgccagcagcaagggggagcggctgagcgcccggctgcgggccctgcccggcaccaatgagccctatgagagcagcagcaacaaggagattgatgccagctatgtggaccccctgggcccccagatcgagcggcccaagacagctgccaagaagagaattgatgaagatgactttgctgatgaggagctgggagatgacctgctgcctgagtag

SEQ ID NO: 19381 - DNA, 2850 bp, synthetic construct
  source 1..2850: mol_type = other DNA; note = Synthetic coding sequence
atgctgaggacagctggaagagatggcctgtgccgcctgagcacctacctggaggagctggaggccgtggagctgaagaagttcaagctgtacctgggcacagccacagagctgggggagggcaagatcccctggggctccatggagaaggccggccccctggagatggcccagctgctgatcacccacttcggccctgaggaggcctggaggctggccctgagcacctttgagcgcatcaacaggaaggacctgtgggagcggggccagcgggaggacctggtgcgggacaccccacctgggggccccagcagcctgggcaaccagagcacctgcctgctggaggtgtccctggtgacccccaggaaggacccccaggagacctacagagattatgtgcggaggaagttccggctgatggaggacagaaatgcccggctgggagaatgtgtgaacctgagccaccgctacacccggctgctgctggtgaaggagcacagcaaccccatgcaggtgcagcagcagctgctggacaccggccggggccacgccaggacagtgggccaccaggccagccccatcaagattgagaccctgtttgagccagatgaggagaggcctgagccccccaggacagtggtgatgcagggcgctgctggcatcggcaagtccatgctggcccacaaggtgatgctggactgggcagatggcaagctgttccagggccgctttgactacctgttctacatcaactgccgggagatgaaccagagcgccacagaatgttccatgcaggacctgatcttcagctgctggccagagcccagcgcccccctgcaggagctgatccgggtgcctgagcggctgctcttcatcattgatggctttgatgagctgaagcccagcttccatgacccccagggcccctggtgcctgtgctgggaggagaagaggcccacagagctgctgctgaacagcctcatcaggaagaagctgctgcctgagctgagcctgctgatcaccacccggcccacagccctggagaagctgcaccggctgctggagcaccccaggcatgtggagatcctgggcttcagcgaggccgagaggaaggagtacttctacaagtacttccacaatgctgagcaggccggccaggtgttcaactacgtgcgggacaatgagcccctcttcaccatgtgctttgtgcccctggtgtgctgggtggtgtgcacctgcctgcagcagcagctggagggcggcggcctgctgcggcagaccagcaggaccaccacagctgtgtacatgctgtacctgctgagcctgatgcagcccaagccaggggccccccggctgcagcccccacccaaccagaggggcctgtgcagcctggccgcagatggcctgtggaaccagaagatcctgtttgaggagcaggacctgaggaagcacggcctggatggagaagatgtgtctgccttcctgaacatgaacatcttccagaaggacatcaactgtgagcgctactacagcttcatccacctgtccttccaggagttctttgctgccatgtactacatcctggatgaaggagagggcggggccggccctgaccaggatgtgacccggctgctgacagaatatgccttcagcgagaggagcttcctggccctgaccagccgcttcctgtttggcctgctgaatgaggagaccaggagccacctggagaagagcctgtgctggaaggtgagcccccacatcaagatggacctgctgcagtggatccagagcaaggcccagagtgatggcagcaccctgcagcagggcagcctggagttcttcagctgcctgtatgagatccaggaggaggagttcatccagcaggccctgagccacttccaggtgattgtggtgagcaacatcgccagcaagatggagcacatggtgtcctccttctgcctgaagcgctgccgcagcgcccaggtgctgcacctgtatggagccacctacagcgcagatggagaagatcgggcccgctgcagcgctggggcccacaccctgctggtgcagctgcctgagaggacagtgctgctggatgcctacagcgagcacctggccgccgccctgtgcaccaaccccaacctgattgagctgagcctgtacagaaatgccctgggcagcagaggagtgaagctgctgtgccagggcctgcggcaccccaactgcaagctgcagaacctgcggctgaagcgctgccgcatcagcagcagcgcctgtgaggacctgtctgctgccctgattgccaacaagaacctgaccaggatggacctgtctggaaatggagtgggcttccctggcatgatgctgctgtgtgagggcctgcggcacccccagtgccgcctgcagatgatccagctgaggaagtgccagctggagagcggggcctgccaggagatggcctctgtgctgggcaccaacccccacctggtggagctggacctgactggaaatgccctggaggacctgggcctgcggctgctgtgccagggcctgcggcaccctgtgtgccgcctgcggaccctgtggctgcagctggacagctgtggcctgacagccaaggcctgtgagaacctgtacttcaccctgggcatcaaccagaccctgacagacctgtacctgaccaacaatgccctgggggacacaggagtgcggctgctgtgcaagaggctgagccaccctggctgcaagctgcgggtgctgtggctgtttggcatggacctgaacaagatgacccacagccggctggccgccctgcgggtgaccaagccctacctggacatcggctgctag

SEQ ID NO: 19382 - DNA, 5796 bp, synthetic construct
  source 1..5796: mol_type = other DNA; note = Synthetic coding sequence
atggccgcccggagcgcccccagctgccacctgcggctggagtgggtgtatggctaccggggccaccagtgcaggaacaacctgtactacacagctgccaaggagatcgtgtactttgtggccggcgtgggcgtggtgtacagcccccgggagcaccggcagaagttctaccggggccacagtgatgacatcatcagcctggccctgcaccctgagcgggtgctggtggccaccggccaggtgggcaaggagccctacatctgcatctgggacagctacacagtgcagaccatctctgtgctgaaggatgtgcacacccatggaattgcctgcctggcctttgacctggatggccagaggctggtgtctgtgggcctggacagcaagaatgctgtgtgtgtgtgggactggaagaggggcaagatgctgtccatggcccctggccacacagaccgcatctttgacatctcctgggacctgtaccagcccaacaagctggtgtcctgtggggtgaagcacatcaagttctggagcctgtgtggaaatgccctgacccccaagaggggcgtgtttgggaagacaggagacctgcagaccatcctgtgcctggcctgtgccagagatgagctgacctacagcggggccctgaatggagacatctacgtgtggaagggcatcaacctgatccgcaccatccagggcgcccatgctgctggcatcttctccatgaatgcctgtgaggagggctttgccaccggcggcagagatggctgcatccggctgtgggacctgaccttcaagcccatcaccgtcatcgacctgcgggagacagaccagggctacaagggcctgtctgtgcgctctgtgtgctggaggggggaccacatcctggtgggcacccaggacagcgagatctttgagatcgtggtgcaggagaggaacaagcccttcctgatcatgcagggccactgtgagggggagctgtgggccctggccgtgcaccccaccaagcccctggccgtgacaggcagtgatgacagatctgtgcgcatctggagcctggtggaccacgccctgattgcccgctgcaacatggaggagcccatccgctgtgccgctgtgaatgctgatggcatccacctggccctgggcatgaaggatggcagcttcaccgtgctgcgggtgcgggacatgacagaggtggtgcacatcaaggacaggaaggaggccatccacgagctgaagtacagcccagatggcacctacctggccgtgggctgcaatgacagctctgtggacatctatggagtggcccagcgctacaagaaggtgggggagtgcctgggcagcctgtccttcatcacccacctggactggagcagtgacagccgctacctgcagaccaatgatggaaatggcaagaggctcttctacaggatgcctgggggcaaggaggtgaccagcacagaggagatcaagggcgtgcactgggcctcctggacctgtgtgtctggcctggaggtgaatggcatctggcccaagtacagcgacatcaatgacatcaacagcgtggatggcaactacatcggccaggtgctggtgacagcagatgattatggcatcatcaagctgttccgctacccctgcctgaggaagggggccaagttcaggaagtacatcggccacagcgcccacgtgaccaacgtgcgctggagccatgactaccagtgggtgatcagcattggaggagctgaccacagcgtcttccagtggaagttcatccctgagaggaagctgaaggatgctgtgcacatcgccccccaggagagcctggccgacagccacagtgatgaaagtgacagcgacctgagtgatgtgcctgagctggacagcgagattgagcaggagacccagctgacctaccgccggcaggtgtacaaggaggacctgccccagctgaaggagcagtgcaaggagaagcagaagagcgccaccagcaagaggcgggagcgggcccctggcaacagcatccggctgcactttgtgcacggctaccggggctatgactgccgcagcaacctcttctacacccagattggagagatcgtgtaccacgtggccgctgtgggcgtcatctacaaccggcagcagaacacccagcgcttctacctgggccatgatgatgacatcctgtgcctgaccatccaccccctgaaggactatgtggccaccggccaggtgggccgggaccccagcatccacatctgggacacagagaccatcaagcccctgagcatcctgaagggccaccaccagtatggagtgtctgctgtggacttcagcgcagatggcaagaggctggcctctgtgggcattgatgacagccacacagtggtgctgtgggactggaagaagggggagaagctgagcatcgcccggggcagcaaggacaagatctttgtggtgaagatgaacccctacgtgcctgacaagctgatcacagctggcatcaagcacatgaagttctggaggaaggctggagatgtgtgcatctggagggacatcttcctggtgaagacagtgaaggcccatgatggccctgtgttctccatgcacgccctggagaagggctttgtgactggaggcaaggatggcatcgtggccctgtgggatgacagctttgagcgctgcctgaagacctacgccatcaagagagctgccctggcccctggcagcaagggcctgctgctggaggacaaccccagcatccgggccatcagcctgggccacggccacatcctggtgggcaccaagaatggagagatcctggaggtggacaagagcggccccatcaccctgctggtgcagggccacatggagggggaggtgtggggcctggccacccacccctacctgcccatctgtgccaccgtgtctgatgacaagaccctgcgcatctgggacctgagccccagccactgcatgctggccgtgaggaagctgaagaagggcggccgctgctgctgcttctccccagatggcaaggccctggccgtgggcctgaatgatggcagcttcctgatggccaatgctgacaccctggaggacctggtgtccttccaccacaggaaggacatgatcagtgacatccgcttcagccctggcagcggcaagtacctggccgtggccagccatgacagcttcatcgacatctacaacgtgatgagcagcaagagggtgggcatctgcaagggggccaccagctacatcacccacatcgactgggacatccggggcaagctgctgcaggtgaacacaggagccaaggagcagctgttctttgaggccccccggggcaagaagcagaccatccccagcgtggaggtggagaagatcgcctgggcctcctggacctctgtgctgggcctgtgctgtgagggcatctggcctgtgattggagaggtgacagatgtgacagccagctgcctgaccagtgacaagatggtgctggccactggagatgacctgggctttgtgaagctgttccgctaccccaccaagggcaagtttgggaagttcaagcgctacgtggcccacagcacccacgtgaccaacgtgcgctggacctatgatgacagcatgctggtgaccctgggcggcacagacatgagcctgatggtgtggaccaatgagatggagggctaccgggagaagaggccctgtgacagcgaggagagtgacatcgacagcgaggaggatggcggctatgacagtgatgtgaccagagaaaatgagatctcctacaccatccgggccctgagcaccaacatccggcccatgctgggcatcaagccccacctgcagcagaaggagcccagcattgatgagcggccccctgtgtcccgggccccaccccagcctgagaagctgcagaccaacaacgtgggcaagaagaagaggcccatcgaggacctggtgctggagctgatcttcggctaccggggccgggactgcagaaataatgtgcactacctgaatgatggagatgacatcatctaccacacagcctctgtgggcatcctgcacaacgtggccaccggcagccagagcttctaccaggagcacaatgatgacatcctgtgcctgactgtgaaccagcaccccaagttcatcaacatcgtggccaccggccaggtggtgctgagctgcagcctgctgaccacagcccccagcatccacatctgggatgccatgaacaagcagaccctgagcatcctgcgctgctaccacagcaagggcgtgtgcagcgtgtccttcagcgccaccgggaagctgctgctgtctgtgggcctggaccctgagcacaccatcaccatctggcgctggcaggagggcgccaagatcgccagccgggccggccacaaccagaggatctttgtggccgagttccggccagacagcgacacccagtttgtgtctgtgggcgtgaagcacgtgaagttctggaccctggccggccgggccctgctgagcaagaagggcctgctgagcaccctggaggatgccaggatgcagaccatgctggccatcgccttcggggccaacaacctgaccttcaccggcaccatctctggagatgtgtgtgtgtggaaggaccacatcctgtgccgcatcgtggcccgggcccacaacggccctgtgtttgccatgtacaccaccctgagagatggcctgattgtgactggaggcaaggagcggcccagcaaggagggcggcgctgtgaagctgtgggaccaggagctgcggcgctgccgggccttccggctggagaccggccaggccacagactgtgtgcgctctgtgtgccggggcaagggcaagatcctggtgggcaccagaaatgctgagatcatcgaggtgggggagaagaatgctgcctgcaacatcctggtgaatggccacgtggatggccccatctggggcctggccacccaccccagccgggacttcttcctgtctgctgctgaagatggcaccgtgcggctgtgggacattgctgacaagaagatgctgaacaaggtgaacctgggccatgctgccaggacagtgtgctacagccctgagggggacatggtggccatcggcatgaagaatggagagttcatcatcctgctggtgagcagcctgaagatctggggcaagaagagggaccggcgctgtgccatccatgacatccgcttctccccagacagccgctacctggccgtgggcagcagcgagaacagcgtggacttctatgacctgaccctgggccccaccctgaaccgcatctcctactgcaaggacatccccagctttgtgatccagatggacttctctgctgacagcagctacctgcaggtgagcagcggctgctacaagagacatgtgtatgaggtgcccagcggcaagcacctgatggaccatgctgccatcgaccgcatcacctgggccacctggaccagcatcctgggagatgaggtgctgggcatctggagcagacatgctgagaaggcagatgtgaactgtgcctgtgtgagccacagcggcatcagcctggtgactggagatgactttggcatggtgaagctgtttgacttcccctgcccagagaagtttgccaagcacaagcgcttcctgggccacagcccccacgtgaccaacatccgcttcaccagcggggacagacatgtggtgtctgctggaggagatgactgcagcctgtttgtgtggaagtgtgtgcacaccccccactag

SEQ ID NO: 19383 - DNA, 429 bp, synthetic construct
  source 1..429: mol_type = other DNA; note = Synthetic coding sequence
atgagcatcagcagtgatgaggtgaacttcctggtgtaccgctacctgcaggagagcggcttcagccacagcgccttcaccttcggcatcgagagccacatcagccagagcaacatcaacggggccctggtgcccccagctgccctgatcagcatcatccagaagggcctgcagtatgtggaggccgaggtgtccatcaatgaagatggcaccctgtttgatggccggcccatcgagagcctgagcctgattgatgctgtgatgccagatgtggtgcagacccggcagcaggcctacagagacaagctggcccagcagcaggccgctgctgctgctgctgctgctgctgctgccagccagcagggcagcgccaagaatggagagaacacagccaacggggaggagaatggagcccacaccatcgcctag

SEQ ID NO: 19384 - DNA, 1704 bp, synthetic construct
  source 1..1704: mol_type = other DNA; note = Synthetic coding sequence
atggagttcttcaccatgccacccaggacctggttcatgaggcagctgcagaggatgtggttcctgcggcccagcatggccatcatggtgttcaggatgattgaggagcggcccacccacgccatcaccgtgcgggtgtcctacctggagatctacaatgaaagcctgtttgacctgctgagcaccctgccctacgtgggccccagcgtgacccccatgaccatcgtggagaacccccagggcgtcttcatcaagggcctgtctgtgcacctgaccagccaggaggaggatgccttcagcctgctgtttgaaggagagaccaaccgcatcatcgccagccacaccatgaacaagaacagcagccgcagccactgcatcttcaccatctacctggaggcccacagcaggaccctgtctgaggagaagtacatcaccagcaagatcaacctggtggacctggccggcagcgagcggctgggcaagagcggcagcgagggccaggtgctgaaggaggccacctacatcaacaagagcctgtccttcctggagcaggccatcatcgccctgggggaccagaagagggaccacatccccttccggcagtgcaagctgacccacgccctgaaggacagcctgggcggcaactgcaacatggtgctggtgaccaacatctatggagaggccgcccagctggaggagaccctgagcagcctgcgctttgccagcaggatgaagctggtgaccacagagcccgccatcaatgagaagtatgatgctgagaggatggtgaagaacctggagaaggagctggccctgctgaagcaggagctggccatccatgacagcctgaccaacagaacatttgtgacctatgaccccatggatgagatccagattgctgagatcaacagccaggtgcggcgctacctggagggcaccctggatgaaattgacatcatcagcctgcggcagatcaaggaggtgttcaaccagttccgggtggtgctgagccagcaggagcaggaggtggagagcaccctgcggaggaagtacaccctgattgacagaaatgactttgctgccatcagcgccatccagaaggccggcctggtggatgtggatggccacctggtgggggagcctgagggccagaactttggcctgggcgtggcccccttcagcaccaagccaggcaagaaggccaagagcaagaagaccttcaaggagcccctgcggccagacaccccacccagcaagcctgtggcctttgaggagttcaagaatgagcagggcagcgagatcaaccgcatcttcaaggagaacaagagcatcctgaatgaaagaaggaagagggccagcgagaccacccagcacatcaatgccatcaagcgggagattgatgtgaccaaggaggccctgaacttccagaagagcctgcgggagaagcagggcaagtatgaaaataaaggcctgatgatcattgatgaggaggagttcctgctgatcctgaagctgaaggacctgaagaagcagtacagaagtgagtaccaggacctgcgggacctgcgggcagagatccagtactgccagcacctggtggaccagtgccgccaccggctgctgatgggcgccaccgtgggcaagaacctgaccagcggcaccatgagccccctgagcagcctgcggacctgccgctggcactag

SEQ ID NO: 19385 - DNA, 1428 bp, synthetic construct
  source 1..1428: mol_type = other DNA; note = Synthetic coding sequence
atggccgagggctctgtgatgttcagtgatgtgtccattgacttcagccaggaggagtgggactgcctggaccctgtgcagagggacctgtacagagatgtgatgctggagaactacggcaacctggtgtccatgggcctgtacacccccaagccccaggtgatcagcctgctggagcagggcaaggagccctggatggtgggccgggagctgacccggggcctgtgcagcgacctggagagcatgtgtgagaccaagctgctgagcctgaagaaggaggtgtatgaaattgagctgtgccagcgggagatcatgggcctgaccaagcacggcctggagtacagcagctttggagatgtgctggagtaccgcagccacctggccaagcagctgggctacccaaatggccacttcagccaggagatcttcaccccagagtacatgcccaccttcatccagcagaccttcctgaccctgcaccagatcatcaacaatgaagatcggccctatgagtgcaagaagtgtgggaaggccttcagccagaacagccagttcatccagcaccagaggatccacatcggggagaagagctatgagtgcaaggaatgtgggaagttcttcagctgtggcagccacgtgaccaggcacctgaagatccacactggagagaagccctttgagtgcaaggaatgtgggaaggccttcagctgcagcagctacctgagccagcaccagaggatccacacaggcaagaagccctatgagtgcaaggaatgtgggaaggccttctcctactgcagcaacctgattgaccaccagaggatccacactggagagaagccctatgagtgcaaggtgtgtgggaaggccttcaccaagagcagccagctgttccagcacgcccgcatccacactggagagaagccctatgagtgcaaggaatgtgggaaggccttcacccagagcagcaagctggtgcagcaccagaggatccacactggagagaagccctatgagtgcaaggaatgtgggaaggccttcagcagcggcagcgccctgaccaaccaccagaggatccacactggagagaagccctatgactgcaaggaatgtgggaaggccttcacccagagcagccagctgcggcagcaccagagaattcatgctggggagaagccctttgaatgtctggagtgtgggaaggccttcacccagaacagccagctgttccagcaccagaggatccacacagatgagaagccctatgaatgtaatgaatgtgggaaggccttcaacaagtgcagcaacctgaccaggcacctgcgcatccacactggagagaagccctacaactgcaaggaatgtgggaaggccttcagcagcggcagtgacctgatccgccaccagggcatccacaccaacaagtag

SEQ ID NO: 19386 - DNA, 462 bp, synthetic construct; identical to SEQ ID NO: 18420
  source 1..462: mol_type = other DNA; note = Synthetic coding sequence

SEQ ID NO: 19387 - DNA, 2616 bp, synthetic construct
  source 1..2616: mol_type = other DNA; note = Synthetic coding sequence
atgggagagggcggcctgcccccagccttccagctgctgctgcgggcctgtgaccagggcgacacagaaacagcccggcggctgctggagcctggagctgctgagcctgctgagagaggagctgagcctgaggccggggctgagcctgctggagctgaggtggccggccctggagctgctgctgctggagctgtgggcgcccctgtgcctgtggactgcagtgatgaagctggcaacacagccctgcagtttgctgctgctgggggccacgagcccctggtgcgcttcctgctgcggcggggggcctctgtgaacagcaggaaccactacggctggagcgccctgatgcaggccgccaggtttggacatgtgtctgtggcccacctgctgctggaccatggagcagatgtgaatgcccagaaccggctgggcgcctctgtgctgactgtggccagccggggcggccacctgggcgtggtgaagctgctgctggaggccggggcctttgtggaccaccaccaccccagcggggagcagctgggcctgggcggcagcagagatgagcccctggacatcacagccctgatggccgccatccagcacggccatgaagctgtggtgcggctgctgatggagtggggcgctgaccccaaccacgccgccaggacagtgggctggagccccctgatgctggccgccctgaccggccgcctgggcgtggcccagcagctggtggagaagggggccaacccagaccacctgtctgtgctggagaagacagcctttgaggtggccctggactgcaagcaccgggacctggtggactacctggaccccctgaccaccgtgcggcccaagacagatgaggagaagaggaggccagacatcttccacgccctgaagatgggcaacttccagctggtgaaggagattgctgatgaggaccccagccacgtgaacctggtgaatggagatggagccacccccctgatgctggccgctgtgacaggccagctggccctggtgcagctgctggtggagagacatgctgatgtggacaagcaggacagcgtgcacggctggacagccctgatgcaggccacctaccacggcaacaaggagatcgtgaagtacctgctgaaccagggcgcagatgtgaccctgcgggccaagaatggctacacagcctttgacctggtgatgctgctgaatgaccctgacacagagctggtgcggctgctggcctctgtgtgcatgcaggtgaacaaggacaagggccggcccagccaccagccccccctgccccacagcaaggtgcggcagccctggagcatccctgtgctgcctgatgacaagggcggcctgaagtcctggtggaacaggatgagcaaccgcttcaggaagctgaagctgatgcagaccctgccccggggcctgagcagcaaccagcccctgcccttcagtgatgagcctgagcccgccctggacagcaccatgagagctgccccccaggacaagaccagccgcagcgccctgcctgatgctgcccctgtgaccaaggacaatggacctggcagcaccagaggagagaaggaggacaccctgctgaccaccatgctgagaaatggagcccccctgacccggctgcccagcgacaagctgaaggccgtcatcccccccttcctgccccccagcagctttgagctgtggagcagtgacaggagcaggaccaggcacaacgggaaggctgaccccatgaagacagccctgccccagagggccagccggggccaccctgtgggcggcggcggcacagacaccacccctgtgcggcctgtgaagttccccagcctgcccaggagccctgccagcagcgccaacagcggcaacttcaaccacagcccccacagcagcggcggcagcagcggcgtgggcgtgtccagacatggaggagagctgctgaacagaagtggcggcagcattgacaacgtgctgagccagattgctgcccagaggaagaaggccgccggcctgctggagcagaagcccagccacaggagcagccctgtgggccctgcccctggcagcagccccagcgagctgcctgccagccctgctgggggcagcgcccctgtgggcaagaagctggagaccagcaagaggcctcccagcggcaccagcaccaccagcaagagcaccagccccaccctgacccccagccccagccccaagggccacacagctgagagctctgtgagcagcagcagcagccaccggcagagcaagagcagcggcggcagcagcagcggcaccatcacagatgaagatgagctgaccggcatcctgaagaagctgagcctggagaagtaccagcccatctttgaggagcaggaggtggacatggaggccttcctgaccctgacagatggagacctgaaggagctgggcatcaagacagatggcagccggcagcagatcctggccgccatcagcgagctgaatgctgggaagggccgggagcggcagatcctgcaggagaccatccacaacttccacagcagctttgagagcagcgccagcaacacccgggcccctggcaacagcccctgtgcctag

SEQ ID NO: 19388 - DNA, 1359 bp, synthetic construct
  source 1..1359: mol_type = other DNA; note = Synthetic coding sequence
atgtctgccagcctgaactacaagagcttcagcaaggagcagcagaccatggacaacctggagaagcagctgatctgccccatctgcctggagatgttcaccaagcctgtggtgatcctgccctgccagcacaacctgtgcaggaaatgtgccagtgacatcttccaggccagcaacccctacctgcccacccggggcggcaccaccatggccagcggcggccgcttccgctgccccagctgcagacatgaggtggtgctggacagacatggagtgtatggcctgcagaggaacctgctggtggagaacatcatcgacatctacaagcaggagagcaccaggcctgagaagaagagtgaccagcccatgtgtgaggagcacgaggaggagcgcatcaacatctactgcctgaactgtgaggtgcccacctgcagcctgtgcaaggtgtttggagcccacaaggactgccaggtggcccccctgacccacgtgttccagaggcagaagtctgagctgagtgatggcatcgccatcctggtgggcagcaatgacagagtgcagggcgtcatcagccagctggaggacacctgcaagaccatcgaggagtgctgcaggaagcagaagcaggagctgtgtgagaagtttgactacctgtatggcatcctggaggagaggaagaatgagatgacccaggtgatcaccaggacccaggaggagaagctggagcacgtgcgggccctgatcaagaagtacagcgaccacctggagaatgtgtccaagctggtggagagcggcatccagttcatggatgagcctgagatggctgtgttcctgcagaatgccaagaccctgctgaagaagatcagcgaggccagcaaggccttccagatggagaagattgagcacggctatgagaacatgaaccacttcaccgtgaacctgaaccgggaggagaagatcatccgggagattgacttctacagagaagatgaagatgaggaggaggaggagggcggggagggggagaaggagggggagggggaggtgggcggggaggccgtggaggtggaggaggtggagaatgtgcagacagagttccctggagaagatgaaaatcctgagaaggccagcgagctgagccaggtggagctgcaggccgcccctggggccctgcctgtgagcagccctgagcccccaccagccctgcccccagctgctgatgcccctgtgacccagattggatttgaggccccacccctgcagggccaggccgccgccccagccagcggcagcggggctgacagcgagcccgcccggcacatcttctccttctcctggctgaacagcctgaatgaatag

SEQ ID NO: 19389 - DNA, 492 bp, synthetic construct
  source 1..492: mol_type = other DNA; note = Synthetic coding sequence
atgcccagcatcaagctgcagagcagtgatggagagatctttgaggtggatgtggagatcgccaagcagagcgtgaccatcaagaccatgctggaggacctgggcatggatgatgaaggagatgatgatcctgtgcccctgcccaacgtgaatgctgccatcctgaagaaggtgatccagtggtgcacccaccacaaggatgatcctcctcctccagaagatgatgagaacaaggagaagaggacagatgacatccctgtgtgggaccaggagttcctgaaggtggaccagggcaccctgtttgagctgatcctggccgccaactacctggacatcaagggcctgctggatgtgacctgcaagacagtggccaacatgatcaagggcaagaccccagaggagatcaggaagaccttcaacatcaagaatgacttcacagaggaggaggaggcccaggtgaggaaggagaaccagtggtgtgaggagaagtag

SEQ ID NO: 19390 - DNA, 1200 bp, synthetic construct
  source 1..1200: mol_type = other DNA; note = Synthetic coding sequence
atggccgcccccagccccagcggcggcggcggcagcggcggcggcagcggcagcggcaccccaggccctgtgggcagccctgcccctggccaccctgctgtgtcctccatgcagggcaagaggaaggccctgaagctgaactttgccaacccccccttcaagagcacagcccgcttcaccctgaaccccaaccccaccggggtgcagaacccccacatcgagcggctgcggacccacagcattgagagcagcggcaagctgaagatcagccctgagcagcactgggacttcaccgctgaggacctgaaggacctgggggagatcggccgcggggcctacggctctgtgaacaagatggtgcacaagcccagcggccagatcatggctgtgaagaggatccgcagcacagtggatgagaaggagcagaagcagctgctgatggacctggatgtggtgatgaggagcagtgactgcccctacatcgtgcagttctatggagccctcttccgggagggggactgctggatctgcatggagctgatgagcaccagctttgacaagttctacaagtatgtgtacagcgtgctggatgatgtgattcctgaggagatcctgggcaagatcaccctggccaccgtgaaggccctgaaccacctgaaggagaacctgaagatcatccaccgggacatcaagcccagcaacatcctgctggacaggagcggcaacatcaagctgtgtgactttggcatcagcggccagctggtggacagcatcgccaagaccagagatgctggctgccggccctacatggcccctgagagaattgaccccagcgccagccggcagggctatgatgtgcggagtgatgtgtggagcctgggcatcaccctgtatgagctggccaccggccgcttcccctaccccaagtggaacagcgtgtttgaccagctgacccaggtggtgaagggggaccccccccagctgagcaacagcgaggagcgggagttcagccccagcttcatcaactttgtgaacctgtgcctgaccaaggatgagagcaagaggcccaagtacaaggagctgctgaagcaccccttcatcctgatgtatgaggagagagctgtggaggtggcctgctacgtgtgcaagatcctggaccagatgcctgccacccccagcagccccatgtatgtggactag

SEQ ID NO: 19391 - DNA, 1122 bp, synthetic construct
  source 1..1122: mol_type = other DNA; note = Synthetic coding sequence
atggcccaggagagccccaagaacagcgctgctgagatccctgtgaccagcaatggagaggtggatgacagccgggagcacagcttcaacagagacctgaagcacagcctgcccagcggcctgggcctgtctgagacccagatcaccagccacggctttgacaacaccaaggagggcgtgattgaagctggggccttccagggcagccctgccccacccctgcccagcgtgatgagccccagccgggtggccgccagccggctggcccagcagggcagtgacctgattgtgcctgctgggggccagaggacccagaccaagagcggccctgtgatcctggctgatgagatcaagaacccagccatggagaagctggagctggtgaggaagtggagcctgaacacctacaagtgcacccggcagatcatcagcgagaagctgggccggggcagcaggacagtggacctggagctggaggcccagattgacatcctgcgggacaacaagaagaagtatgagaacatcctgaagctggcccagaccctgagcacccagctgttccagatggtgcacacccagaggcagctgggagatgcctttgctgacctgagcctgaagagcctggagctgcacgaggagtttggctacaatgctgacacccagaagctgctggccaagaatggagagaccctgctgggcgccatcaacttcttcatcgcctctgtgaacaccctggtgaacaagaccatcgaggacaccctgatgacagtgaagcagtatgagagcgccagaattgaatatgatgcctacagaacagacctggaggagctgaacctgggccccagagatgccaacaccctgcccaagattgagcagagccagcacctgttccaggcccacaaggagaagtatgacaagatgagaaatgatgtgtctgtgaagctgaagttcctggaggagaacaaggtgaaggtgctgcacaaccagctggtgctcttccacaatgccatcgccgcctactttgctggcaaccagaagcagctggagcagaccctgaagcagttccacatcaagctgaagaccccaggagtggatgcccccagctggctggaggagcagtag

SEQ ID NO: 19392 - DNA, 654 bp, synthetic construct
  source 1..654: mol_type = other DNA; note = Synthetic coding sequence
atgtacagcctgaaccaggagatcaaggccttcagcaggaacaacctgaggaagcagtgcaccagggtgaccaccctgaccgggaagaagatcatcgagacctggaaggatgcccgcatccacgtggtggaggaggtggagcccagcagcggcggcggctgcggctacgtgcaggacctgagcagtgacctgcaggtgggcgtcatcaagccctggctgctgctgggcagccaggatgctgcccatgacctggacaccctgaagaagaacaaggtgacccacatcctgaatgtggcctacggcgtggagaatgccttcctgagtgacttcacctacaagagcatcagcatcctggacctgcctgagaccaacatcctgagctacttcccagaatgttttgagttcatcgaggaggccaagaggaaggatggagtggtgctggtgcactgcaatgctggggtgtccagagctgctgccatcgtcatcggcttcctgatgaacagcgagcagaccagcttcaccagcgccttcagcctggtgaagaatgcccggcccagcatctgccccaacagcggcttcatggagcagctgcggacctaccaggagggcaaggagagcaacaagtgtgaccgcatccaggagaacagcagctag

SEQ ID NO: 19393 - DNA, 2679 bp, synthetic construct
  source 1..2679: mol_type = other DNA; note = Synthetic coding sequence
atgctgaggacagctggaagagatggcctgtgccgcctgagcacctacctggaggagctggaggccgtggagctgaagaagttcaagctgtacctgggcacagccacagagctgggggagggcaagatcccctggggctccatggagaaggccggccccctggagatggcccagctgctgatcacccacttcggccctgaggaggcctggaggctggccctgagcacctttgagcgcatcaacaggaaggacctgtgggagcggggccagcgggaggacctggtgcgggacaccccacctgggggccccagcagcctgggcaaccagagcacctgcctgctggaggtgtccctggtgacccccaggaaggacccccaggagacctacagagattatgtgcggaggaagttccggctgatggaggacagaaatgcccggctgggagaatgtgtgaacctgagccaccgctacacccggctgctgctggtgaaggagcacagcaaccccatgcaggtgcagcagcagctgctggacaccggccggggccacgccaggacagtgggccaccaggccagccccatcaagattgagaccctgtttgagccagatgaggagaggcctgagccccccaggacagtggtgatgcagggcgctgctggcatcggcaagtccatgctggcccacaaggtgatgctggactgggcagatggcaagctgttccagggccgctttgactacctgttctacatcaactgccgggagatgaaccagagcgccacagaatgttccatgcaggacctgatcttcagctgctggccagagcccagcgcccccctgcaggagctgatccgggtgcctgagcggctgctcttcatcattgatggctttgatgagctgaagcccagcttccatgacccccagggcccctggtgcctgtgctgggaggagaagaggcccacagagctgctgctgaacagcctcatcaggaagaagctgctgcctgagctgagcctgctgatcaccacccggcccacagccctggagaagctgcaccggctgctggagcaccccaggcatgtggagatcctgggcttcagcgaggccgagaggaaggagtacttctacaagtacttccacaatgctgagcaggccggccaggtgttcaactacgtgcgggacaatgagcccctcttcaccatgtgctttgtgcccctggtgtgctgggtggtgtgcacctgcctgcagcagcagctggagggcggcggcctgctgcggcagaccagcaggaccaccacagctgtgtacatgctgtacctgctgagcctgatgcagcccaagccaggggccccccggctgcagcccccacccaaccagaggggcctgtgcagcctggccgcagatggcctgtggaaccagaagatcctgtttgaggagcaggacctgaggaagcacggcctggatggagaagatgtgtctgccttcctgaacatgaacatcttccagaaggacatcaactgtgagcgctactacagcttcatccacctgtccttccaggagttctttgctgccatgtactacatcctggatgaaggagagggcggggccggccctgaccaggatgtgacccggctgctgacagaatatgccttcagcgagaggagcttcctggccctgaccagccgcttcctgtttggcctgctgaatgaggagaccaggagccacctggagaagagcctgtgctggaaggtgagcccccacatcaagatggacctgctgcagtggatccagagcaaggcccagagtgatggcagcaccctgcagcagggcagcctggagttcttcagctgcctgtatgagatccaggaggaggagttcatccagcaggccctgagccacttccaggtgattgtggtgagcaacatcgccagcaagatggagcacatggtgtcctccttctgcctgaagcgctgccgcagcgcccaggtgctgcacctgtatggagccacctacagcgcagatggagaagatcgggcccgctgcagcgctggggcccacaccctgctggtgcagctgcctgagaggacagtgctgctggatgcctacagcgagcacctggccgccgccctgtgcaccaaccccaacctgattgagctgagcctgtacagaaatgccctgggcagcagaggagtgaagctgctgtgccagggcctgcggcaccccaactgcaagctgcagaacctgcggctgaagcgctgccgcatcagcagcagcgcctgtgaggacctgtctgctgccctgattgccaacaagaacctgaccaggatggacctgtctggaaatggagtgggcttccctggcatgatgctgctgtgtgagggcctgcggcacccccagtgccgcctgcagatgatccagctgaggaagtgccagctggagagcggggcctgccaggagatggcctctgtgctgggcaccaacccccacctggtggagctggacctgactggaaatgccctggaggacctgggcctgcggctgctgtgccagggcctgcggcaccctgtgtgccgcctgcggaccctgtgctggatgctgtttggcatggacctgaacaagatgacccacagccggctggccgccctgcgggtgaccaagccctacctggacatcggctgctag

SEQ ID NO: 19394 - DNA, 945 bp, synthetic construct
  source 1..945: mol_type = other DNA; note = Synthetic coding sequence
atgcagaccttcctgaagggcaagagggtgggctactggctgtctgagaagaagatcaagaagctgaacttccaggcctttgctgagctgtgcaggaagaggggcatggaggtggtgcagctgaacctgagccggcccatcgaggagcagggccccctggatgtgatcatccacaagctgacagatgtgatcctggaggccgaccagaatgacagccagagcctggagctggtgcaccgcttccaggagtacattgatgcccaccctgagaccatcgtgctggaccccctgcctgccatccgcaccctgctggacaggagcaagagctatgagctgatcaggaagattgaggcctacatggaggatgaccgcatctgcagcccccccttcatggagctgaccagcctgtgtggagatgacaccatgaggctgctggagaagaatggcctgaccttccccttcatctgcaagaccagggtggcccacggcaccaacagccatgagatggccatcgtgttcaaccaggagggcctgaatgccatccagcccccctgtgtggtgcagaacttcatcaaccacaatgctgtgctgtacaaggtgtttgtggtgggggagagctacacagtggtgcagaggcccagcctgaagaacttctctgctggcaccagtgaccgggagagcatcttcttcaacagccacaacgtgtccaagccagagagcagctctgtgctgacagagctggacaagattgagggcgtgtttgagcggcccagtgatgaagtcatccgggagctgagccgggccctgcggcaggccctgggcgtgtccctgtttggcatcgacatcatcatcaacaaccagacaggccagcacgccgtcatcgacatcaatgccttccctggggactgccaggtgtgcttcatcgagggctggaagacagactag

SEQ ID NO: 19395 - DNA, 630 bp, synthetic construct
  source 1..630: mol_type = other DNA; note = Synthetic coding sequence
atgcctgtggccgtgatggccgagagcgccttctccttcaagaagctgctggaccagtgtgagaaccaggagctggaggcccctgggggcatcgccaccccacctgtgtatggccagctgctggccctgtacctgctgcacaatgacatgaacaatgcccgctacctgtggaagagaattcctccagccatcaagagcgccaacagcgagctgggcggcatctggagcgtgggccagaggatctggcagagggacttccctggcatctacaccaccatcaatgcccaccagtggagcgagaccgtgcagcccatcatggaggccctgagagatgccaccaggagaagagcctttgccctggtgtcccaggcctacaccagcatcatcgcagatgactttgctgcctttgtgggcctgcctgtggaggaggccgtgaagggcatcctggagcagggctggcaggccgacagcaccaccaggatggtgctgcccaggaagcctgtggccggggccctggatgtgtccttcaacaagttcatccccctgtctgagcccgcccctgtgccccccatccccaatgagcagcagctggcccggctgacagattatgtggccttcctggagaactag

SEQ ID NO: 19396 - DNA, 4935 bp, synthetic construct
  source 1..4935: mol_type = other DNA; note = Synthetic coding sequence
atgttctggtgtggcacctgctttgtgaccaacaacatgaagggcagcgaggtgtccctggagaagaagaagaagatcaagatgcctgtgaagaggctgcgggaggtggtgtcccagaaccacggggaccacctggtgctgctgaaggatgagctgccctgtgtgcccccagccctgagcgccaacaagaggctgcctgtgggcaccggcaccagcctgaatggcaccagccggggcagcagtgacctgaccagcgccaggaactgctaccagcccctgctggagaaccccatggtgtctgagagtgacttcagcaaggatgtggccgtgcaggtgctgcccctggacaagattgaggagaacaacaagcagaaggccaatgacatcttcatcagccagtacaccatgggccagaaggatgccctgaggacagtgctgaagcagaatgtgtccctgtgcctgaccggctggagcgaccacagcggggtcatcaccacccactgcagcctgtacctgctgcggctgatgaggagcagccacctgagcctgcccagctcctgggactaccgggcccagagcatgcctgtgttcaaggaggtgaaggtgcacctgctggaggatgctggcatcgagaaggatgctgtgacccaggagacccgcatcagccccagcggcatcgacagcgccaccaccgtggccgccgccacagctgctgccatcgccacagctgcccccctcatcaaggtgcagagcgacctggaggccaaggtgaacagcgtgacagagctgctgagcaagctgcaggagacagacaagcacctgcagagggtgacagagcagcagaccagcatccagaggaagcaggagaagctgcactgccacgaccacgagaagcagatgaatgtgttcatggagcagcacatccgccacctggagaagctgcagcagcagcagattgacatccagacccacttcatctctgctgccctgaagaccagcagcttccagcctgtgtccatgcccagcagcagagctgtggagaagtacagcgtgaagccagagcaccccaacctgggcagctgcaaccccagcctgtacaacacctttgccagcaagcaggcccccctgaaggaggtggaggacaccagctttgacaagcagaagagccccctggagaccccagcccccaggagatttgcccctgtgcctgtgtccagagatgatgagctgagcaagcgggagaacctgctggaggagaaggagaacatggaggtgtcctgccacagaggaaatgtgcggctgctggagcagatcctgaacaacaatgacagcctgaccaggaagtctgagagcagcaacaccaccagcctgaccaggagcaagattggctggaccccagagaagaccaaccgcttccccagctgtgaggagctggagaccaccaaggtgaccatgcagaagagtgatgatgtgctgcatgacctgggccagaaggagaaggagaccaacagcatggtgcagcccaaggagagcctgtccatgctgaagctgcctgacctgccccagaacagcgtgaagctgcagaccaccaacaccaccaggtctgtgctgaaggatgctgagaagatcctgcggggcgtgcagaacaacaagaaggtgctggaggagaacctggaggccatcatccgggccaaggatggagctgccatgtacagcctcatcaatgccctgagcaccaaccgggagatgtctgagaagatccgcatcaggaagacagtggatgagtggatcaagaccatctctgctgagatccaggatgagctgagcaggacagattatgagcagaagagatttgaccagaagaaccagaggaccaagaagggccagaacatgaccaaggacatccgcaccaacacccaggacaagacagtgaacaagagcgtcatccccaggaagcacagccagaagcagatcgaggagcacttcaggaacctgcccatgaggggcatgcctgccagcagcctgcagaaggagaggaaggagggcctgctgaaggccaccaccgtcatccaggatgaggactacatgctgcaggtgtatggcaagcctgtgtaccagggccacaggagcaccctgaagaagggcccctacctgcgcttcaacagccccagccccaagagccggccccagaggcccaaggtgattgagcgggtgaagggcaccaaggtgaagagcatccgcacccagacagacttctacgccaccaagcccaagaagatggacagcaagatgaagcacagcgtgcctgtgctgccccatggagaccagcagtacctgttcagccccagccgggagatgcccaccttcagcggcaccctggagggccacctgatccccatggccatcctgctgggccagacccagagcaacagcgacaccatgcctcctgctggggtcatcgtgtccaagccccaccctgtgacagtgaccaccagcatcccccccagcagcaggaaggtggagaccggggtgaagaagcccaacatcgccatcgtggagatgaagtctgagaagaaggaccccccccagctgactgtgcaggtgctgcccagcgtggacatcgacagcatcagcaacagcagcgcagatgtgctgagccccctgagcagccccaaggaggccagcctgccccctgtgcagacctggatcaagaccccagagatcatgaaggtggatgaggaggaggtgaagtttcctggcaccaactttgatgagatcattgatgtgatccaggaggaggagaagtgtgatgagatcccagacagcgagcccatcctggagttcaacagatctgtgaaggctgacagcaccaagtacaacggcccccccttcccccctgtggccagcaccttccagcccacagctgacatcctggacaaggtgattgaaaggaaggagaccctggagaacagcctcatccagtgggtggagcaggagatcatgagccgcatcatcagcggcctcttccctgtgcagcagcagatcgcccccagcatctctgtgtctgtgtctgagaccagcgagcccctgaccagtgacatcgtggagggcaccagcagcggggccctgcagctgtttgtggatgctggggtgcctgtgaacagcaatgtcatcaagcactttgtgaatgaggccctggccgagaccatcgctgtgatgctgggggaccgggaggccaagaagcagggccctgtggccactggagtgtctggagatgccagcaccaatgagacctacctgcctgcccgggtgtgcacccccctgcccaccccccagcccaccccaccctgcagccccagcagccctgccaaggaatgtgtgctggtgaagaccccagacagcagcccctgtgacagcgaccatgacatggccttccctgtgaaggagatctgtgccgagaagggagatgacatgcctgccatcatgctggtgaacacccccaccgtgacccccaccaccaccccacctcctgctgctgctgtgttcacccccaccctgagtgacatcagcattgacaagctgaaggtgagcagccctgagctgcccaagccctggggagatggagacctgcccctggaggaggagaaccccaacagcccccaggaggagctgcacccccgggccatcgtgatgtctgtggccaaggatgaggagcctgagagcatggacttccctgcccagcccccacctcctgagcctgtgcccttcatgcccttccctgctggcaccaaggcccccagccccagccagatgcctggcagtgacagcagcaccctggagagcaccctgtctgtgacagtgacagaaacagagaccctggacaagcccatcagcgagggggagatcctcttcagctgtggccagaagctggcccccaagatcctggaggacatcggcctgtacctgaccaacctgaatgacagcctgagcagcaccctgcatgatgctgtggagatggaggatgatcctccttctgagggccaggtgatccgcatgagccacaagaagttccacgcagatgccatcctgagctttgccaagcagaaccaggagagcgctgtgtcccagcaggccgtgtaccacagcgaggacctggagaacagcgtgggggagctgtctgagggccagaggccccagctgacagctgctgctgagaacatcctgatgggccacagcctgtacatgcagccccctgtgaccaacacccagagcctggaccagcagtgtgaccccaagcccctgagccggcagtttgacacagtgtctggcagcatctatgaggacagctgtgccagccacggccccatgagcctgggggagctggagctggagcccaacagcaagctggtgctgcccaccaccctgctgacagcccaggagaatgatgtgaacctgcctgtggccgctgaggacttcagccagtaccagctgaagcagaaccaggatgtgaagcaggtggagcacaagcccagccagagctacctgcgggtgaggaacaagagtgacatcgcccccagccagcagcaggtgtcccctggggacatggacaggacccagatcgagctgaacccctacctgacctgtgtgttttctggcctgggcgtgcacgtgaagaaggtgtcctgcatcggcaagctgggcctgtggaggtttgtgatccagatcatcagcagcccccgctgggagagcagcgccaccctgcgcttcacagatgccccctgccaggatgtgtctgatgctgctgtgtctgagccccggggcctgctgtctgtgtctgagagccagcacaatgctgggggccatggagtgtttggaggccgctacctgctgaatggcaagaggcagcctgcccagtgcctgtgccactggttctag

SEQ ID NO: 19397 - DNA, 3138 bp, synthetic construct
  source 1..3138: mol_type = other DNA; note = Synthetic coding sequence
atgctgactgtgcaggtgaagaccagcagcgccatcgagctgcctgacagcctggccttcctgtggatcatccccatgtggtactgtgagggcaaggagctggagaacagcccagacatccacatcgtgcaggccggcaacctgcacagcctgaccatcgccgaggcctttgaggaggacaccggccgctacagctgctttgccagcaacatctacggcacagacagcaccagcgctgagatctacattgaaggagtgagcagcagtgacagcgagggggaccccaacaaggaggagatgaaccgcatccagaagcccaatgaggtgagcagcccccccaccaccagcgctgtgatccccccagctgtgccccaggcccagcacctggtggcccagccccgggtggccaccatccagcagtgccagagccccaccaactacctgcagggcctggatggcaagcccatcatcgccgcccctgtgttcaccaagatgctgcagaacctgagcgccagcgagggccagctggtggtgtttgagtgccgggtgaagggggcccccagccccaaggtggagtggtaccgggagggcaccctgattgaggacagcccagacttccgcatcctgcagaagaagcccaggtccatggccgagcctgaggagatctgcaccctggtgattgctgaggtgtttgctgaagattctggctgcttcacctgcacagccagcaacaagtatggcaccgtgagcagcatcgcccagctgcacgtgagaggaaatgaagacctgagcaacaacggcagcctgcacagcgccaacagcaccaccaacctggccgccatcgagccccagcccagccccccccacagcgagccccccagcgtggagcagccccccaagcccaagctggagggcgtgctggtgaaccacaatgagcccaggagcagcagcagaattggcctgcgggtgcacttcaacctgcctgaagatgacaagggcagcgaggccagcagcgaggccggcgtggtgaccacccggcagaccaggccagacagcttccaggagcgcttcaacggccaggccaccaagaccccagagcccagcagccctgtgaaggagcccccacctgtgctggccaagcccaagctggacagcacccagctgcagcagctgcacaaccaggtgctgctggagcagcaccagctgcagaaccccccacccagcagccccaaggagttccccttctccatgacagtgctgaacagcaatgcccctcctgctgtgaccaccagcagcaagcaggtgaaggcccccagcagccagaccttcagcctggcccggcccaagtacttcttccccagcaccaacaccacagctgccaccgtggcccccagcagcagccctgtgttcaccctgagcagcaccccccagaccatccagaggacagtgtccaaggagagcctgctggtgagccaccccagcgtgcagaccaagagccctgggggcctgagcatccagaatgagcccctgcccccaggccccacagagcccaccccaccacccttcaccttcagcatccccagcggcaaccagttccagccccgctgtgtgagccccatccctgtgagccccaccagccgcatccagaaccctgtggccttcctgagctctgtgctgcccagcctgcctgccatcccccccaccaatgccatgggcctgcccaggtctgcccccagcatgcccagccagggcctggccaagaagaacaccaagagcccccagcctgtgaatgatgacaacatccgggagaccaagaatgctgtgatccgggacctgggcaagaagatcaccttcagtgatgtgcggcccaaccagcaggagtacaagatcagcagctttgagcagaggctgatgaatgaaattgagttccggctggagaggacccctgtggatgaaagtgatgatgagatccagcatgatgagatccccaccgggaagtgcatcgcccccatctttgacaagaggctgaagcacttccgggtgacagagggcagccctgtgaccttcacctgcaagatcgtgggcatccctgtgcccaaggtgtactggttcaaggatggcaagcagatcagcaagagaaatgagcactgcaagatgaggcgggagggagatggcacctgcagcctgcacatcgagagcaccaccagtgatgatgatggcaactacaccatcatggccgccaacccccagggccgcatcagctgcagcggccacctgatggtgcagagcctgcccatccgcagccggctgaccagcgctggccagagccaccggggccgcagccgggtgcaggagcgggacaaggagcccctgcaggagcgcttcttccggccccacttcctgcaggcccctggggacatggtggcccacgagggccgcctgtgccgcctggactgcaaggtgtctggcctgcccccacctgagctgacctggctgctgaatggccagcctgtgctgcctgatgccagccacaagatgctggtgcgggagactggagtgcacagcctgctgattgaccccctgacccagagagatgctggcacctacaagtgcatcgccaccaacaagacaggccagaacagcttcagcctggagctgtctgtggtggccaaggaggtgaagaaggcccctgtgatcctggagaagctgcagaactgtggggtgcctgagggccaccctgtgcggctggagtgccgggtgattggcatgcctcctcctgtgttctactggaagaaggacaatgagaccatcccctgcacccgggagcgcatctccatgcaccaggacaccaccggctacgcctgcctgctgatccagcctgccaagaagagtgatgctggctggtacaccctgagcgccaagaatgaagctggcatcgtgtcctgcacagcccggctggacatctatgcccagtggcaccaccagatccccccacccatgtctgtgcggcccagcggcagccgctatggcagcctgaccagcaagggcctggacatcttcagcgccttcagctccatggagagcaccatggtgtacagctgcagcagccgctctgtggtggagagtgatgagctgtag

SEQ ID NO: 19398 - DNA, 951 bp, synthetic construct
  source 1..951: mol_type = other DNA; note = Synthetic coding sequence
atgacccccagcgagggcgcccgggccggcaccggccgggagctggagatgctggacagcctgctggccctgggcggcctggtgctgctgcgggacagcgtggagtgggagggccgcagcctgctgaaggccctggtgaagaagagcgccctgtgtggggagcaggtgcacatcctgggctgtgaggtgtctgaggaggagttccgggagggctttgacagcgacatcaacaaccggctggtgtaccatgacttcttccgggaccccctgaactggagcaagacagaggaggccttccctgggggccccctgggcgccctgcgggccatgtgcaagaggacagatcctgtgcctgtgaccatcgccctggacagcctgtcctggctgctgctgcggctgccctgcaccaccctgtgccaggtgctgcatgctgtgagccaccaggacagctgccctggggacagcagctctgtgggcaaggtgtctgtgctgggcctgctgcacgaggagctgcacggccctggccctgtgggcgccctgagcagcctggcccagacagaggtgaccctgggcggcaccatgggccaggccagcgcccacatcctgtgccggcggccccggcagaggcccacagaccagacccagtggttcagcatcctgcctgacttcagcctggacctgcaggagggccccagcgtggagagccagccctacagcgacccccacatcccccctgtggaccccaccacccacctgaccttcaacctgcacctgagcaagaaggagcgggaggcccgggacagcctcatcctgcccttccagttcagcagcgagaagcagcaggccctgctgcggccccggcccggccaggccaccagccacatcttctatgagccagatgcctatgatgacctggaccaggaggaccctgatgatgacctggacatctag

SEQ ID NO: 19399 - DNA, 1473 bp, synthetic construct; identical to SEQ ID NO: 18917
  source 1..1473: mol_type = other DNA; note = Synthetic coding sequence

SEQ ID NO: 19400 - DNA, 1428 bp, synthetic construct
  source 1..1428: mol_type = other DNA; note = Synthetic coding sequence
atggaggccctgctggagggcatccagaacagaggacatggaggcggcttcctgaccagctgtgaggccgagctgcaggagctgatgaagcagattgacatcatggtggcccacaagaagtctgagtgggagggccgcacccacgccctggagacctgcctgaagatccgggagcaggagctgaagagcctgcggagccagctggatgtgacccacaaggaggtgggcatgctgcaccagcaggtggaggagcacgagaagatcaagcaggagatgaccatggagtacaagcaggagctgaagaagctgcacgaggagctgtgcatcctgaagaggagctatgagaagctgcagaagaagcagatgagggagttccggggcaacaccaagaaccaccgggaggacagaagtgaaattgagcggctgacagccaagattgaggagttccggcagaagagcctggactgggagaagcagaggctcatctaccagcagcaggtgagcagcctggaggcccagaggaaggccctggccgagcagagcgagatcatccaggcccagctggtgaacaggaagcagaagctggagagcgtggagctgagcagccagagcgagatccagcacctgagcagcaagctggagcgggccaatgacaccatctgtgccaatgagctggagattgagcggctgaccatgagggtgaatgacctggtgggcacctccatgacagtgctgcaggagcagcagcagaaggaggagaagctgcgggagagcgagaagctgctggaggccctgcaggaggagaagcgggagctgaaggccgccctgcagagccaggagaacctgatccacgaggcccgcatccagaaggagaagctgcaggagaaggtgaaggccaccaacacccagcacgctgtggaggccatcagcctggagagcgtgtctgccacctgcaagcagctgagccaggagctgatggagaagtatgaggagctgaagaggatggaggcccacaacaatgagtacaaggccgagatcaagaagctgaaggagcagatcctgcagggcgagcagagctacagcagcgccctggagggcatgaagatggagatcagccacctgacccaggagctgcaccagagggacatcaccatcgccagcaccaagggcagcagcagtgacatggagaagaggctgcgggcagagatgcagaaggccgaggacaaggctgtggagcacaaggagatcctggaccagctggagagcctgaagctggagaacagacacctgtctgagatggtgatgaagctggagctgggcctgcacgagcgctggggcttcaccatgctgagcagcctggtgctgaactttggcatccaggccatccggcagccccagaggcccaaggtgctggagctgcaggtgtag

SEQ ID NO: 19401 - DNA, 2340 bp, synthetic construct
  source 1..2340: mol_type = other DNA; note = Synthetic coding sequence
atgagaattgaggagaggaagagccagcacctgaccggcctgacagatgagaaggtgaaggcctacctgagcctgcacccccaggtgctggatgaatttgtgtctgagagcgtgtctgctgagaccgtggagaagtggctgaagaggaagaacaacaagtcagaagatgagagcgcccccaaggaggtgagccgctaccaggacaccaacatgcagggcgtggtgtatgagctgaacagctacatcgagcagaggctggacaccggcggggacaaccagctgctgctgtatgagctgagcagcatcatcaagatcgccaccaaggcagatggctttgccctgtacttcctgggggagtgcaacaacagcctgtgcatcttcaccccacctggcatcaaggagggcaagcccaggctcatcccagctggccccatcacccagggcaccaccgtgtctgcctacgtggccaagagcaggaagaccctgctggtggaggacatcctgggagatgagcgcttcccccggggcaccggcctggagagcggcacccgcatccagagcgtgctgtgcctgcccatcgtgacagccatcggggacctgattggcatcctggagctgtaccgccactggggcaaggaggccttctgcctgagccaccaggaggtggccacagccaacctggcctgggcctctgtggccatccaccaggtgcaggtgtgccggggcctggccaagcagacagagctgaatgacttcctgctggatgtgtccaagacctactttgacaacatcgtggccatcgacagcctgctggagcacatcatgatctatgccaagaacctggtgaatgctgacagatgtgccctcttccaggtggaccacaagaacaaggagctgtacagcgacctgtttgacatcggggaggagaaggagggcaagcctgtgttcaagaagaccaaggagatccgcttcagcattgagaagggcattgctggccaggtggccaggactggagaggtgctgaacatcccagatgcctatgctgacccccgcttcaaccgggaggtggacctgtacacaggctacaccaccaggaacatcctgtgcatgcccatcgtgtcccggggctctgtgattggagtggtgcagatggtgaacaagatcagcggcagcgccttcagcaagacagatgagaacaacttcaagatgtttgctgtgttctgtgccctggccctgcactgtgccaacatgtaccaccgcatccgccacagcgagtgcatctacagagtgaccatggagaagctgagctaccacagcatctgcaccagcgaggagtggcagggcctgatgcagttcaccctgcctgtgcggctgtgcaaggagattgagctgttccactttgatattggcccctttgagaacatgtggccaggcatctttgtgtacatggtgcacaggagctgtggcaccagctgctttgagctggagaagctgtgccgcttcatcatgtctgtgaagaagaactaccgccgggtgccctaccacaactggaagcatgctgtgacagtggcccactgcatgtatgccatcctgcagaacaaccacaccctcttcacagacctggagaggaagggcctgctgattgcctgcctgtgccacgacctggaccaccggggcttcagcaacagctacctgcagaagtttgaccaccccctggccgccctgtacagcaccagcaccatggagcagcaccacttcagccagacagtgtccatcctgcagctggagggccacaacatcttcagcaccctgagcagcagtgaatatgagcaggtgctggagatcatcaggaaggccatcatcgccacagacctggccctgtactttggaaacaggaagcagctggaggagatgtaccagacaggcagcctgaacctgaacaaccagagccaccgggacagagtcatcggcctgatgatgacagcctgtgacctgtgcagcgtgaccaagctgtggcctgtgaccaagctgacagccaatgacatctatgcagagttctgggccgagggagatgagatgaagaagctgggcatccagcccatccccatgatggaccgggacaagaaggatgaggtgccccagggccagctgggcttctacaatgctgtggccatcccctgctacaccaccctgacccagatcctgcccccaacagagcccctgctgaaggcctgccgggacaacctgagccagtgggagaaggtgatccggggggaggagacagccacctggatcagcagccccagcgtggcccagaaggctgctgccagcgaggactag

SEQ ID NO: 19402 - DNA, 2112 bp, synthetic construct
  source 1..2112: mol_type = other DNA; note = Synthetic coding sequence
atggctgctgccactggagaccccggcctgagcaagctgcagtttgcccccttcagcagcgccctggatgtgggcttctggcatgagctgacccagaagaagctgaatgagtaccgcctggatgaggcccccaaggacatcaagggctactactacaatggagacagcgctggcctgcctgcccggctgaccctggagttcagcgcctttgacatgtctgcccccaccccagcccgctgctgcccagccatcggcaccctgtacaacaccaacaccctggagagcttcaagacagctgacaagaagctgctgctggagcaggccgccaatgagatctgggagagcatcaagagcggcacagccctggagaaccctgtgctgctgaacaagttcctgctgctgacctttgctgacctgaagaagtaccacttctactactggttctgctacccagccctgtgcctgcctgagagcctgcccctcatccagggccctgtgggcctggaccagcgcttcagcctgaagcagatcgaggccctggagtgtgcctatgacaacctgtgccagacagagggcgtgacagccctgccctacttcctgatcaagtatgatgagaacatggtgctggtgtccctgctgaagcactacagcgacttcttccagggccagaggaccaagatcaccatcggcgtgtatgacccctgcaacctggcccagtacccaggctggcccctgaggaacttcctggtgctggccgcccaccgctggagcagcagcttccagagcgtggaggtggtgtgcttccgggacaggaccatgcagggcgccagagatgtggcccacagcatcatctttgaggtgaagctgcctgagatggccttctccccagactgccccaaggctgtgggctgggagaagaaccagaagggcggcatgggccccaggatggtgaacctgtctgagtgcatggaccccaagaggctggccgagagctctgtggacctgaacctgaagctgatgtgctggaggctggtgcccaccctggacctggacaaggtggtgtctgtgaagtgcctgctgctgggcgccggcaccctgggctgcaatgtggcccggaccctgatgggctggggcgtgcgccacatcacctttgtggacaatgccaagatctcctacagcaaccctgtgcggcagcccctgtatgaatttgaggactgcctgggcggcggcaagcccaaggccctggccgctgctgaccggctgcagaagatcttccctggggtgaatgcccggggcttcaacatgagcatccccatgcctggccaccctgtgaacttcagctctgtgaccctggagcaggccaggagagatgtggagcagctggagcagctgattgagagccatgatgtggtgttcctgctgatggacacccgggagagccgctggctgcctgctgtgattgctgccagcaagaggaagctggtgatcaatgctgccctgggctttgacacctttgtggtgatgagacatggcctgaagaagcccaagcagcagggcgctggggacctgtgccccaaccaccctgtggccagcgctgacctgctgggcagcagcctgtttgccaacatccctggctacaagctgggctgctacttctgcaatgatgtggtggcccctggggacagcacccgggacaggaccctggaccagcagtgcaccgtgtccaggcctggcctggccgtgattgctggggccctggccgtggagctgatggtgtctgtgctgcagcaccctgagggcggctacgccatcgccagcagcagtgatgacaggatgaatgaaccacccaccagcctgggcctggtgccccaccagatccggggcttcctgagcagatttgacaacgtgctgcctgtgtccctggcctttgataaatgtacagcctgcagcagcaaggtgctggaccagtatgagcgggagggcttcaacttcctggccaaggtgttcaacagcagccacagcttcctggaggacctgaccggcctgaccctgctgcaccaggagacccaggccgctgagatctgggacatgtctgatgatgagaccatctag

SEQ ID NO: 19403 - DNA, 3246 bp, synthetic construct
  source 1..3246: mol_type = other DNA; note = Synthetic coding sequence
atggagagcgctggcctggagcagctgctgcgggagctgctgctgcctgacacagagcgcatccggcgggccacagagcagctgcagatcgtgctgcgggccccagctgccctgcctgccctgtgtgacctgctggccagcgctgctgacccccagatccggcagtttgctgctgtgctgacccggcggcggctgaacacccgctggaggcggctggccgctgagcagcgggagagcctgaagagcctcatcctgacagccctgcagcgggagacagagcactgtgtgtccctgagcctggcccagctgagcgccaccatcttcaggaaggagggcctggaggcctggccccagctgctgcagctgctgcagcacagcacccacagcccccacagccctgagcgggagatgggcctgctgctgctgtctgtggtggtgaccagcaggcctgaggccttccagccccaccaccgggagctgctgcggctgctgaatgagaccctgggggaggtgggcagccctggcctgctcttctacagcctgcggaccctgaccaccatggccccctacctgagcacagaagatgtgcccctggccaggatgctggtgcccaagctgatcatggccatgcagaccctcatccccattgatgaggccaaggcctgtgaggccctggaggccctggatgagctgctggagagcgaggtgcctgtgatcaccccctacctgtctgaggtgctgaccttctgcctggaggtggccagaaatgtggccctgggcaatgccatccgcatccgcatcctgtgctgcctgaccttcctggtgaaggtgaagagcaaggccctgctgaagaaccggctgctgccccccctgctgcacaccctcttccccatcgtggccgctgagcccccacctggccagctggaccctgaggaccaggacagcgaggaggaggagctggagattgagctgatgggagagacccccaagcactttgctgtgcaggtggtggacatgctggccctgcacctgcccccagagaagctgtgcccccagctgatgcccatgctggaggaggccctgcggtctgagagcccctaccagaggaaggccggcctgctggtgctggccgtgctgagtgatggagctggggaccacatccggcagaggctgctgccccccctgctgcagatcgtgtgcaagggcctggaggaccccagccaggtggtgagaaatgctgccctgtttgccctgggccagttcagcgagaacctgcagccccacatcagcagctacagccgggaggtgatgcccctgctgctggcctacctgaagtctgtgcccctgggccacacccaccacctggccaaggcctgctacgccctggagaactttgtggagaacctgggccccaaggtgcagccctacctgcctgagctgatggagtgcatgctgcagctgctgaggaaccccagcagcccccgggccaaggagctggccgtgtctgccctgggcgccatcgccacagctgcccaggccagcctgctgccctacttccctgccatcatggagcacctgcgggagttcctgctgaccggccgggaggacctgcagcctgtgcagatccagagcctggagaccctgggcgtgctggcccgggctgtgggggagcccatgaggcccctggccgaggagtgctgccagctgggcctgggcctgtgtgaccaggtggatgatcctgacctgcggcgctgcacctacagcctgtttgctgccctgagcggcctgatgggagagggcctggccccccacctggagcagatcaccaccctgatgctgctgagcctgcggagcacagagggcatcgtgccccagtatgatggcagcagcagcttcctgctgtttgatgatgaaagtgatggagaggaggaggaggagctgatggatgaagatgtggaggaggaggatgacagcgagatcagcggctacagcgtggagaatgccttctttgatgagaaggaggacacctgtgccgctgtgggggagatctctgtgaacacctctgtggccttcctgccctacatggagagcgtgtttgaggaggtgttcaagctgctggagtgcccccacctgaatgtgaggaaggccgcccacgaggccctgggccagttctgctgtgccctgcacaaggcctgccagagctgccccagcgagcccaacacagctgccctgcaggccgccctggcccgggtggtgcccagctacatgcaggccgtgaaccgggagcgggagcggcaggtggtgatggctgtgctggaggccctgactggagtgctgcggagctgtggcaccctgaccctgaagcccccaggccgcctggccgagctgtgtggggtgctgaaggctgtgctgcagaggaagacagcctgccaggacacagatgaggaggaggaggaggaggatgatgaccaggccgagtatgatgccatgctgctggagcacgccggggaggccatcccagccctggccgctgctgctggaggagacagctttgcccccttctttgctggcttcctgcccctgctggtgtgcaagaccaagcagggctgcaccgtggccgagaagagctttgctgtgggcaccctggccgagaccatccagggcctgggcgccgccagcgcccagtttgtgtcccggctgctgcctgtgctgctgagcacagcccaggaggccgaccctgaggtgcgcagcaatgccatcttcggcatgggcgtgctggccgagcacggcggccacccagcccaggagcacttccccaagctgctgggcctgctcttccccctgctggcccgggagagacatgacagagtgcgggacaacatctgtggggccctggcccggctgctgatggccagccccaccaggaagccagagccccaggtgctggccgccctgctgcacgccctgcccctgaaggaggacctggaggagtgggtgaccatcggccgcctcttctccttcctgtaccagagcagcccagaccaggtgattgatgtggcccctgagctgctgcgcatctgcagcctcatcctggccgacaacaagatccccccagacaccaaggccgccctgctgctgctgctgaccttcctggccaagcagcacacagacagcttccaggccgccctgggcagcctgcctgtggacaaggcccaggagctgcaggccgtgctgggcctgtcctag

SEQ ID NO: 19404 - DNA, 7224 bp, synthetic construct
  source 1..7224: mol_type = other DNA; note = Synthetic coding sequence
atggtgggggagagacatgctggggacctgatggtgcccctgggcccccggctgcaggcctacccagaggagctgatccggcagaggcctggccatgatggccaccctgagtacctgatccgctggagcgtgctgaagtgtggggaggtgggcaaggtgggcgtggaggagggcaaggccgagcacatcctgatgtggctgagcgcccctgaggtgtatgccaactgccccggcctgctgggggagcgggccctgagcaagggcctgcagcacgagcctgctggggtgtctggcagcttcccccgggaccccggcggcctggatgaggtggccatgggagagatggaggctgatgtgcaggccctggtgcggcgggccgcccggcagctggccgagagcggcacccccagcctgacagctgctgtgctgcacaccatccacgtgctgagcgcctatgccagcatcggccccctgactggagtcttccgggagactggagccctggacctgctgatgcacatgctgtgcaaccctgagccccagatcagaagatctgctgggaagatgctgcaggccctggccgcccatgatgctggcagccgggcccacgtgctgctgagcctgagccagcaggacggcatcgagcagcacatggactttgacagccgctacaccctgctggagctgtttgctgagaccaccagcagcgaggagcactgcatggcctttgagggcatccacctgccccagatccctgggaagctgctcttcagcctggtgaagcgctacctgtgtgtgaccagcctgctggaccagctgaacagcagccctgagctgggcgctggggaccagagcagcccctgtgccacccgggagaagagccggggccagcgggagctggagttctccatggctgtgggcaacctgatcagcgagctggtgcgctccatgggctgggccaggaacctgtctgagcagggcatgagccccccccggcccaccaggagcatcttccagccctacatcagcggccccagcctgctgctgcccaccatcgtgaccaccccccggcggcagggctgggtgttccggcagaggtctgagttcagcagccgcagcggctatggagaatatgtgcagcagaccctgcagcccggcatgagggtgaggatgctggatgattatgaggagatctctgctggagatgaaggagagttccggcagagcaacaacggcatcccccctgtgcagaccctgggggagaaggccctgggggagatctctgtgtctgtggagatggccgagagcctgctgcaggtgctgagcagcagatttgagggcagcaccctgaatgacctgctgaacagccagatctacaccaagtatggcctgctgagcaatgagcccagcagcagcagcaccagcaggaaccacagctgcaccccagaccctgaggaggagagcaagtctgaggccagcttcagcgaggaggagacagagagcctgaaggccaaggccgaggcccccaagacagaagctgagcccaccaagaccaggacagagacccccatggcccagagcgacagccagctgttcaaccagctgctggtgacagagggcatgaccctgcccacagagatgaaggaggccgccagcgagatggcccgggccctgcggggccctggccccaggagcagcctggaccagcacgtggccgctgtggtggccaccgtgcagatcagcagcctggacaccaacctgcagctgagcggcctgagcgccctgagccaggccgtggaggaggtgacagagcgggaccaccccctggtgcggccagacaggagcctgcgggagaagctggtgaagatgctggtggagctgctgaccaaccaggtgggggagaagatggtggtggtgcaggccctgcggctgctgtacctgctgatgaccaagcatgagtggaggcccctgtttgcccgggagggcggcatctatgctgtgctggtgtgcatgcaggagtacaagacctctgtgctggtgcagcaggccggcctggccgccctgaagatgctggccgtggccagcagcagcgagatccccacctttgtgacaggccgggacagcatccacagcctgtttgatgcccagatgacccgggagatctttgccagcattgattctgccaccaggcctggcagcgagagcctgctgctgactgtgcctgctgctgtgatcctgatgctgaacacagagggctgcagcagcgctgccagaaatggcctgctgctgctgaacctgctgctgtgcaaccaccacaccctgggggaccagatcatcacccaggagctgcgggacaccctcttccgccacagcggcatcgcccccaggacagagcccatgcccaccaccaggaccatcctgatgatgctgctgaaccgctacagcgagcccccaggcagccctgagcgggccgccctggagacccccatcatccagggccaggacggcagccctgagctgctgatccgcagcctggtgggcggccccagcgctgagctgctgctggacctggagcgggtgctgtgccgggagggcagccctggaggagctgtgcggcccctgctgaagaggctgcagcaggagacccagcccttcctgctgctgctgcggaccctggatgcccctggccccaacaagaccctgctgctgtctgtgctgcgggtcatcacccggctgctggacttccctgaggccatggtgctgccctggcatgaggtgctggagccctgcctgaactgcctgagcggccccagcagtgacagcgagatcgtgcaggagctgacctgcttcctgcaccggctggcctccatgcacaaggactatgctgtggtgctgtgctgcctgggcgccaaggagatcctgagcaaggtgctggacaagcacagcgcccagctgctgctgggctgtgagctgcgggacctggtgacagaatgtgagaagtatgcccagctgtacagcaacctgaccagcagcatcctggccggctgcatccagatggtgctgggccagatcgaggaccacaggaggacccaccagcccatcaacatccccttctttgatgtgttcctgcggcacctgtgccagggcagctctgtggaggtgaaggaggacaagtgctgggagaaggtggaggtgagcagcaacccccaccgggccagcaagctgacagaccacaaccccaagacctactgggagagcaatggcagcacaggcagccactacatcaccctgcacatgcaccggggcgtgctggtgcggcagctgaccctgctggtggccagcgaggacagcagctacatgcctgcccgggtggtggtgtttggaggagacagcaccagctgcattggaacagagctgaacacagtgaatgtgatgcccagcgccagcagggtcatcctgctggagaacctgaaccgcttctggcccatcatccagatccgcatcaagcgctgccagcagggcggcatcgacaccagggtgcggggcgtggaggtgctgggccccaagcccaccttctggcccctcttccgggagcagctgtgcaggaggacctgcctcttctacaccatccgggcccaggcctggagccgggacattgctgaggaccaccggcggctgctgcagctgtgcccccggctgaacagagtgctgcggcatgagcagaactttgctgaccgcttcctgcctgatgatgaagctgcccaggccctgggcaagacctgctgggaggccctggtgagccccctggtgcagaacatcaccagcccagatgctgagggcgtgtctgccctgggctggctgctggaccagtacctggagcagcgggagaccagcaggaaccccctgagcagagctgccagctttgccagccgggtgcggcggctgtgccacctgctggtgcacgtggagcccccacctggccccagccctgagcccagcacccggcccttcagcaagaacagcaagggccgggacaggagccctgcccccagccctgtgctgcccagcagcagcctgaggaacatcacccagtgctggctgtctgtggtgcaggagcaggtgagccgcttcctggccgccgcctggagggccccagactttgtgccccgctactgcaagctgtatgagcacctgcagagagctggcagcgagctgtttggcccccgggccgccttcatgctggccctgcggagcggcttcagcggggccctgctgcagcagagcttcctgacagctgcccacatgtctgagcagtttgcccgctacatcgaccagcagatccagggcggcctcatcggcggggcccctggggtggagatgctgggccagctgcagaggcacctggagcccatcatggtgctgagcggcctggagctggccaccacctttgagcacttctaccagcactacatggctgaccggctgctgagctttggcagctcctggctggagggcgctgtgctggagcagatcggcctgtgcttccccaaccggctgccccagctgatgctgcagagcctgagcaccagcgaggagctgcagaggcagttccacctgttccagctgcagaggctggacaagctgttcctggagcaggaggatgaggaggagaagaggctggaggaggaggaggaggaggaggaggaggaggaggccgagaaggagctgttcatcgaggaccccagccctgccatcagcatcctggtgctgagcccccgctgctggcctgtgagccccctgtgctacctgtaccaccccaggaagtgcctgcccacagagttctgtgatgccctggaccgcttcagcagcttctacagccagagccagaaccaccctgtgctggacatgggcccccaccggcggctgcagtggacctggctgggccgggcagagctgcagtttgggaagcagatcctgcacgtgtccacagtgcagatgtggctgctgctgaagttcaaccagacagaggaggtgtctgtggagaccctgctgaaggacagcgacctgagccctgagctgctgctgcaggccctggtgcccctgaccagcggaaatggccccctgaccctgcacgagggccaggacttcccccacggcggcgtgctgcggctgcacgagcccggcccccagaggtctggagaggccctgtggctgatccccccccaggcctacctgaatgtggagaaggatgagggccgcaccctggagcagaagaggaacctgctgagctgcctgctggtgcgcatcctgaaggcccatggagagaagggcctgcacatcgaccagctggtgtgcctggtgctggaggcctggcagaagggccccaaccccccaggcaccctgggccacacagtggccggcggcgtggcctgcaccagcacagatgtgctgagctgcatcctgcacctgctgggccagggctacgtgaagagaagagatgaccggccccagatcctgatgtatgctgcccctgagcccatgggcccctgccggggccaggctgatgtgcccttctgtggcagccagagcgagaccagcaagcccagccctgaggccgtggccaccctggccagcctgcagctgcctgctggccgcaccatgagcccccaggaggtggagggcctgatgaagcagacagtgcggcaggtgcaggagaccctgaacctggagccagatgtggcccagcacctgctggcccacagccactggggcgctgagcagctgctgcagagctacagcgaggaccctgagcccctgctgctggccgccggcctgtgtgtgcaccaggcccaggccgtgcctgtgcggccagaccactgccctgtgtgtgtgagccccctgggctgtgatgatgacctgcccagcctgtgctgcatgcactactgctgcaagagctgctggaatgagtacctgaccaccagaattgagcagaacctggtgctgaactgcacctgccccatcgctgactgcccagcccagcccactggagccttcatccgggccatcgtgagcagccctgaggtgatcagcaaatatgagaaggccctgctgcggggctacgtggagagctgcagcaacctgacctggtgcaccaacccccagggctgtgaccgcatcctgtgccggcagggcctgggctgcggcaccacctgcagcaaatgtggctgggccagctgcttcaactgcagcttccctgaggcccactacccagccagctgtggccacatgagccagtgggtggatgatggcggctactatgatggcatgtctgtggaggcccagagcaagcacctggccaagctgatcagcaagcgctgccccagctgccaggcccccatcgagaagaatgaaggctgcctgcacatgacctgtgccaagtgcaaccacggcttctgctggcgctgcctgaagtcctggaagcccaaccacaaggactactacaactgcagcgccatggtgtccaaggccgcccggcaggagaagcgcttccaggactacaatgaacgctgcaccttccaccaccaggcccgggagtttgctgtgaacctgaggaacagagtgtctgccatccacgaggtgcccccacccaggagcttcaccttcctgaatgatgcctgccagggcctggagcaggccaggaaggtgctggcctatgcctgtgtgtacagcttctacagccaggatgctgagtacatggatgtggtggagcagcagacagagaacctggagctgcacaccaatgccctgcagatcctgctggaggagaccctgctgcgctgccgggacctggccagcagcctgcggctgctgcgggctgactgcctgagcacaggcatggagctgctgcggcgcatccaggagcggctgctggccatcctgcagcacagcgcccaggacttccgggtgggcctgcagagccccagcgtggaggcctgggaggccaagggccccaacatgcctggcagccagccccaggccagcagcggccctgaggccgaggaggaggaggaggatgatgaagatgatgtgcctgagtggcagcaggatgaatttgatgaggagctggacaatgacagcttctcctatgatgaaagtgagaacctggaccaggagaccttcttctttggagatgaggaggaggatgaagatgaggcctatgactag

SEQ ID NO: 19405 - DNA, 672 bp, synthetic construct
  source 1..672: mol_type = other DNA; note = Synthetic coding sequence
atggaggatgtgaagctggagttccccagcctgccccagtgcaaggaggatgctgaggagtggacctaccccatgaggcgggagatgcaggagatcctgcccggcctcttcctgggcccctacagcagcgccatgaagagcaagctgcctgtgctgcagaagcacggcatcacccacatcatctgcatccggcagaacatcgaggccaacttcatcaagcccaacttccagcagctgttccgctacctggtgctggacattgctgacaaccctgtggagaacatcatccgcttcttccccatgaccaaggagttcattgatggcagcctgcagatgggcggcaaggtgctggtgcatggaaatgccggcatcagccgctctgctgccttcgtcatcgcctacatcatggagaccttcggcatgaagtacagagatgcctttgcctacgtgcaggagcggcgcttctgcatcaaccccaatgccggctttgtgcaccagctgcaggagtatgaggccatctacctggccaagctgaccatccagatgatgagccccctgcagatcgagaggagcctgtctgtgcacagcggcaccaccggcagcctgaagaggacccatgaggaggaggatgactttggcaccatgcaggtggccacagcccagaatggatag

SEQ ID NO: 19406 - DNA, 1689 bp, synthetic construct
  source 1..1689: mol_type = other DNA; note = Synthetic coding sequence
atggatgacaagggggaccccagcaatgaggaggcccccaaggccatcaagcccaccagcaaggagttcaggaagacctggggcttccggaggaccaccatcgccaagcgggagggcgctggagatgctgaggccgaccccctggagcccccaccaccccagcagcagctgggcctgagcctgcggcgcagcggccggcagcccaagaggacagagcgggtggagcagttcctgaccatcgccaggagaagaggccgccgctccatgcctgtgtccctggaggacagcggggagcccaccagctgcccagccacagatgctgagacagccagcgagggctctgtggagagcgccagcgagaccaggagcggcccccagagcgccagcacagctgtgaaggagaggcctgccagcagcgagaaggtgaagggaggagatgaccatgatgacaccagtgacagcgacagtgatggcctgaccctgaaggagctgcagaaccggctgcggaggaagcgggagcaggagcccacagagcggcccctgaagggcatccagagccggctgaggaagaagaggcgggaggagggccctgctgagaccgtgggcagcgaggccagtgacacagtggagggcgtgctgcccagcaagcaggagccagaaaatgaccagggcgtggtgtcccaggccggcaaggatgaccgggagagcaagctggagggcaaggccgcccaggacatcaaggatgaggagcccggggacctgggccggcccaagccagaatgtgagggctatgaccccaatgccctgtactgcatctgccggcagccccacaacaaccgcttcatgatctgctgtgacagatgtgaggagtggttccatggagactgtgtgggcatcagcgaggcccggggccgcctgctggagagaaatggagaggactacatctgccccaactgcaccatcctgcaggtgcaggatgagacccacagcgagacagctgaccagcaggaggccaagtggaggcctggagatgctgatggaacagactgcaccagcatcggcaccatcgagcagaagagcagcgaggaccagggcatcaagggccgcatcgagaaggccgccaaccccagcggcaagaagaagctgaagatcttccagcctgtgattgaggcccctggggccagcaagtgcatcggccctggctgctgccacgtggcccagcctgacagcgtgtactgcagcaatgactgcatcctgaagcacgccgccgccaccatgaagttcctgagcagcggcaaggagcagaagcccaagcccaaggagaagatgaagatgaagccagagaagcccagcctgcccaagtgtggggcccaggccggcatcaagatcagctctgtgcacaagaggcctgcccctgagaagaaggagaccaccgtgaagaaggctgtggtggtgcctgcccggtctgaggccctgggcaaggaggccgcctgtgagagcagcacccccagctgggccagtgaccacaactacaatgctgtgaagccagagaagacagctgcccccagccccagcctgctgtacaagtgcatgtaccacctgggcgtgggcctgctggaccccagccgctccttctggatcgccatcccctgggcctgccccggcctgggcgtggccgccctgtgctag

SEQ ID NO: 19407 - DNA, 360 bp, synthetic construct
  source 1..360: mol_type = other DNA; note = Synthetic coding sequence
atgatcctgcagcagcccctgcagaggggcccccagggcggggcccagaggctgcccagggctgccctgggcgtgacctggggcctggatgcccgggagcccctgaggaagcagttcctgtctgaggagaacatggccacccacttcagccagctgagcctgcacaatgaccacccctactgcagcccccccatgaccttctccccagccctgccccccctgcggagcccctgcagcgagctgctgctgtggagatacccaggcagcctcatccctgaggccctgcggctgctgcggctgggggacacccccagccccccctacccagccaccccagctggggacatcatggagctgtag

SEQ ID NO: 19408 - DNA, 1794 bp, synthetic construct
  source 1..1794: mol_type = other DNA; note = Synthetic coding sequence
atggtgcctgaggagcggcgggtgggcctgagcagtgatgagaccagcagtgacagcctgaagtcctggcacagcatctgtgtgctggacagcaaggagcagcccctggcctgccagcagaagcagaggcagtttgtgaagcctgtgacagagagcgagcagcccaccgtgctggagctgctgctggccgagctgcggaccctcttctctgctgtgctgcaggacagcagccctgctgcctggagatacctgcatgctgtgctgggcctgctgcccccctaccgggagctgctggtgggccacctggacctgctgcccttcctggagcagctgtactgctgggccccctgggtgcagacccacctgcacctggacctgctgggcgccatcgtgcaggccttccccccagacagcagcctgctggacagcgccagccatgctgactgctgcccccagaagaggcggctgcaccaccggcccccctgcccagcctgcccctttgtgcaggcccagtggagccggcagcaggtgaaggaggagctggccacctggctgcggcccctgaccctgcctgagctgcagcgctgcctgggcatcgtgggcgcccaggtggccctggaggaggccgtgtggctggatggcctgagcctgctgcccctggccctggccgctgacatccctgtgcgctatgagagcagtgacacagacaatgctgaggtggagcctgtgggcaggaaggagaccaggagccagctggactatgaggtgccccgggagaaggccttccagaagagcagcacaggcttcagccctgagaccagcttcctggacagccaggtgatgacagccctgaagatggagcgctacctgaagaagatccacttcctgtacctgaatgtggcccccagccgctacttccggccctacagcctgatggtggtgcccccagacaaggtgaaccctgagcactacatcttcagccccttcggcatcctgcacgtgcaccctgtggagggcagcgagaccatgaccctgggcacctggcaccaccactgtgtgctgtggcagcagctgcagttcatccccttcttcaagtactgcctgctgaggaagagcttcacctgctggaagaagaatgtgcggctgcagggcctgcaccggctgcagaagttcctggagaaccacctgctgctggccgtgccccactttggagctggcctgctgcacatcagccggctgctgcaggagctgcacagcgtgtcctggctgccccaggagctggaccgctgctatgagctgctggacctgcagacagccctggccgaggagaagcacaaggccctgcggctgctgcaccgctgcctgaacctgtgcaccagcatcctgcggctggtgcatgaggacacctaccacatgcagcagtgcctgcaggagcgggtgcagaactgtgaccgcatcagaacaggccagggcagcatctacctgcagagggtgcagcacaagcagctggagcagaagctgaagcaggccgaggcctggtggctgcagctgggcaagtttgcccggctggtggactacatgatctgccagagcctcatctctgtgctggaggagcagatcaccagctttgtggccaacatcctgcaggccccccggcagaagcccttcctgagcagccagctggtgtttgatgaccacggccagctgagccacgtgccctgtgtggagaacatgatccagaccctgactggaggcctgcagagcgtgaagaccagcgccctgcaggtgttctag

SEQ ID NO: 19409 - DNA, 591 bp, synthetic construct
  source 1..591: mol_type = other DNA; note = Synthetic coding sequence
atggaggacctgtttgagaccttccaggatgagatgggcttcagcaacatggaggatgatggccctgaggaggaggagcgggtggccgagccccaggccaacttcaacaccccccaggccctgcgctttgaggagctgctggccaacctgctgaatgagcagcaccagatcgccaaggagctgtttgagcagctgaagatgaagaagcccagcgccaagcagcagaaggaggtggagaaggtgaagccccagtgcaaggaggtgcaccagaccctcatcctggaccctgcccagaggaagaggctgcagcagcagatgcagcagcacgtgcagctgctgacccagatccacctgctggccacctgcaaccccaacctgaaccctgaggccagcagcacccgcatctgcctgaaggagctgggcacctttgcccagagcagcatcgccctgcaccaccagtacaaccccaagttccagaccctcttccagccctgcaacctgatgggcgccatgcagctgattgaggacttcagcacccacgtgtccattgactgcagcccccacaagacagtgaagaagacagtgtgctag

SEQ ID NO: 19410 - DNA, 888 bp, synthetic construct; identical to SEQ ID NO: 19226
  source 1..888: mol_type = other DNA; note = Synthetic coding sequence

SEQ ID NO: 19411 - DNA, 915 bp, synthetic construct
  source 1..915: mol_type = other DNA; note = Synthetic coding sequence
atgaagagggcccaccctgagtacagcagcagtgacagcgagctggatgagaccatcgaggtggagaaggagagcgcagatgaaaatggaaacctgagcagcgccctgggctccatgagccccaccaccagcagccagatcctggccaggaagagaagaagaggcatcatcgagaagagaagaagagaccgcatcaacaacagcctgtctgagctgcggcggctggtgcccagcgcctttgagaagcagggcagcgccaagctggagaaggccgagatcctgcagatgacagtggaccacctgaagatgctgcacacagctgggggcaagggctactttgatgcccacgccctggccatggactaccgcagcctgggcttcagagaatgtctggccgaggtggcccgctacctgagcatcatcgagggcctggatgccagtgaccccctgcgggtgcggctggtgagccacctgaacaactatgccagccagcgggaggccgccagcggggcccatgctggcctgggccacatcccctggggcaccgtgtttggccaccacccccacatcgcccaccccctgctgctgccccagaatggacatggaaatgccggcaccacagccagccccacagagccccaccaccagggccgcctgggcagcgcccaccctgaggccccagccctgcgggccccacccagcggcagcctgggccctgtgctgcctgtggtgaccagcgccagcaagctgagcccccccctgctgagctctgtggccagcctgagcgccttccccttctcctttggcagcttccacctgctgagccccaatgccctgagccccagcgcccccacccaggccgccaacctgggcaagccctaccggccctggggcacagaaattggagccttctag

SEQ ID NO: 19412 - DNA, 2529 bp, synthetic construct
  source 1..2529: mol_type = other DNA; note = Synthetic coding sequence
atgtgtggcagcgagcgcatcctgcaggccggcaacatcctggagatccgggtgggccaggccggggcccggcgggtggccaccatgaccagccctgtgctggtggacatccgggaggaggtgacctgccccatctgcctggagctgctgacagagcccctgagcattgactgtggccacagcttctgccaggcctgcatcacccccaacggccgggagagcgtcatcggccaggagggggagaggagctgccctgtgtgccagaccagctaccagcccggcaacctgcggcccaacagacacctggccaacatcgtgcggcggctgcgggaggtggtgctgggccctgggaagcagctgaaggctgtgctgtgtgccgaccacggggagaagctgcagctgttctgccaggaggatggcaaggtgatctgctggctgtgtgagaggagccaggagcaccggggccaccacaccttcctggtggaggaggtggcccaggagtaccaggagaagttccaggagagcctgaagaagctgaagaatgaggagcaggaggccgagaagctgacagccttcatccgggagaagaagacctcctggaagaaccagatggagcctgagcgctgccgcatccagacagagttcaaccagctgaggaacatcctggacagagtggagcagcgggagctgaagaagctggagcaggaggagaagaagggcctgcgcatcatcgaggaggccgagaatgacctggtgcaccagacccagagcctgcgggagctgatcagtgacctggagcggcgctgccagggcagcaccatggagctgctgcaggatgtgtctgatgtgacagagaggtctgagttctggaccctgaggaagccagaggccctgcccaccaagctgcgctccatgttccgggccccagacctgaagaggatgctgcgggtgtgccgggagctgacagatgtgcagagctactgggccatccagggcagcctgacccggcgggagcggcgggccagcggcgtgaggaccaggaggagccagggcagcagcgccatggccagcaagatcctgctgaatgtgcaggaggaggtgacctgccccatctgcctggagctgctgacagagcccctgagcctggactgtggccacagcctgtgccgggcctgcatcaccgtgagcaacaaggaggccgtgacctccatgggcggcaagagcagctgccctgtgtgtggcatctcctacagctttgagcacctgcaggccaaccagcacctggccaacatcgtggagcggctgaaggaggtgaagctgagcccagacaacgggaagaagagggacctgtgtgaccaccacggggagaagctgctgctcttctgcaaggaggacaggaaggtgatctgctggctgtgtgagaggagccaggagcaccggggccaccacacagtgctgacagaggaggtgttcaaggagtgccaggagaagctgcaggccgtgctgaagaggctgaagaaggaggaggaggaggccgagaagctggaggccgacatccgggaggagaagacctcctggaagtaccaggtgcagacagagcggcagaggatccagacagaatttgaccagctgcggagcatcctgaacaatgaggagcagcgggagctgcagaggctggaggaggaggagaagaagaccctggacaagtttgctgaggccgaggatgagctggtgcagcagaagcagctggtgcgggagctgatcagtgatgtggagtgccgcagccagtggagcaccatggagctgctgcaggacatgagcggcatcatgaagtggagcgagatctggaggctgaagaagcccaagatggtgtccaagaagctgaagacagtgttccacgccccagacctgagcaggatgctgcagatgttccgggagctgacagctgtgcgctgctactgggtggatgtgaccctgaacagcgtgaacctgaacctgaacctggtgctgtctgaggaccagaggcaggtgatctctgtgcccatctggcccttccagtgctacaactacggcgtgctgggcagccagtacttcagcagcggcaagcactactgggaggtggatgtgtccaagaagacagcctggatcctgggcgtgtactgcaggacctacagccgccacatgaagtatgtggtgagaagatgtgccaaccggcagaacctgtacaccaagtaccggcccctgtttggctactgggtgattggcctgcagaacaagtgcaagtatggagtgtttgaggagagcctgagcagtgaccctgaggtgctgaccctgtccatggctgtgcccccctgccgggtgggcgtcttcctggactatgaagctggcatcgtgtccttcttcaacgtgaccagccacggcagcctcatctacaagttcagcaagtgctgcttcagccagcctgtgtacccctacttcaacccctggaactgcccagcccccatgaccctgtgcccccccagcagctag

SEQ ID NO: 19413 - DNA, 1497 bp, synthetic construct
  source 1..1497: mol_type = other DNA; note = Synthetic coding sequence
atgaatggagccctggaccacagcgaccagcctgaccctgatgccatcaagatgtttgtgggccagatccccaggtcctggagcgagaaggagctgaaggagctgtttgagccctatggagctgtgtaccagatcaacgtgctgcgggacaggagccagaaccccccccagagcaagggctgctgctttgtgaccttctacaccaggaaggccgccctggaggcccagaatgccctgcacaacatcaagaccctgcccggcatgcaccaccccatccagatgaagccagctgacagcgagaagagcaatgctgtggaggacaggaagctgttcatcggcatggtgtccaagaagtgcaatgaaaatgacatccgggtgatgttcagccccttcggccagatcgaggagtgccgcatcctgcggggcccagatggcctgagccggggctgtgcctttgtgaccttcagcacccgggccatggcccagaatgccatcaaggccatgcaccagagccagaccatggagggctgcagcagccccatcgtggtgaagtttgctgacacccagaaggacaaggagcagaggcggctgcagcagcagctggcccagcagatgcagcagctgaacacagccacctggggcaacctgaccggcctgggcggcctgaccccccagtacctggccctgctgcagcaggccaccagcagcagcaacctgggcgccttcagcggcatccagcagatggccggcatgaatgccctgcagctgcagaacctggccaccctggccgctgctgctgctgctgcccagaccagcgccaccagcaccaatgccaaccccctgagcaccaccagcagcgccctgggcgccctgaccagccctgtggccgccagcacccccaacagcacagctggggccgccatgaacagcctgaccagcctgggcaccctgcagggcctggccggggccaccgtgggcctgaacaacatcaatgccctggccgcccccaggagcaagaggctgctgctgcccaaggacaacaacggcatggccgccctgaatggaggcctgggcgccaccggcctgaccaacggcacagctggcaccatggatgccctgacccaggcctacagcggcatccagcagtatgctgctgctgccctgcccaccctgtacagccagagcctgctgcagcagcagagcgctgctggcagccagaaggagggccctgagggcgccaacctcttcatctaccacctgccccaggagtttggagaccaggacatcctgcagatgttcatgccctttggaaatgtcatcagcgccaaggtgttcatcgacaagcagaccaacctgagcaagtgcttcggctttgtgtcctatgacaaccctgtgtctgcccaggccgccatccaggccatgaatggcttccagatcggcatgaagaggctgaaggtgcagctgaagaggagcaagaatgacagcaagccctactag

SEQ ID NO: 19414 - DNA, 2580 bp, synthetic construct
  source 1..2580: mol_type = other DNA; note = Synthetic coding sequence
atgctggaggtgctggaggagatctggagcgtgcgggcccggcgggcccaccggccctgccccggccccagcctggctgatgacacagatgccaacagcaatggcagcagtggaaatgaaagcaatggccacgagagcagaggagccagccagaggagcagccacagcagcagcagtggaaatggcaaggacagcgccctgctggagaccacagagagcagcaagagcaccaacagccagagccccagcccccccagcagcagcatcgcctacagcctgctgagcgccagcagcgagcaggacaaccccagcaccagcggctgcagcagcgagcagagcgcccgggcccggacccagaaggagctgatgacagccctgcgggagctgaagctgcggctgcccccagagcggcggggcaagggccgcagcggcaccctggccaccctgcagtatgccctggcctgtgtgaagcaggtgcaggccaaccaggagtactaccagcagtggagcctggaggagggggagccctgcagcatggacatgagcacctacaccctggaggagctggagcacatcaccagcgagtacaccctgcagaaccaggacaccttctctgtggccgtgtccttcctgaccggcagaattgtgtacatcagcgagcaggccgctgtgctgctgcgctgcaagagagatgtgttccggggcacccgcttcagcgagctgctggccccccaggatgtgggcgtcttctacggcagcacagcccccagccggctgcccacctggggcaccggggccagcgctggcagcggcctgcgggacttcacccaggagaagagcgtcttctgccgcatccggggcggccctgaccgggaccccggcccccgctaccagcccttccggctgaccccctacgtgaccaagatccgggtgtctgatggagccccagcccagccctgctgcctgctgattgctgagcgcatccacagcggctatgaggccccccgcatccccccagacaagaggatcttcaccaccaggcacacccccagctgcctcttccaggatgtggatgaaagagctgcccccctgctgggctacctgccccaggacctgctgggcgcccctgtgctgctcttcctgcaccctgaggaccggcccctgatgctggccatccacaagaagatcctgcagctggccggccagccctttgaccacagccccatccgcttctgtgccagaaatggagaatatgtgaccatggacacctcctgggccggctttgtgcacccctggagcaggaaggtggcctttgtgctgggccgccacaaggtgaggacagcccccctgaatgaagatgtgttcaccccaccagcccccagccctgcccccagcctggacacagacatccaggagctgtctgagcagatccaccggctgctgctgcagcctgtgcacagccccagccccaccggcctgtgtggggtgggcgctgtgaccagccctggccccctgcacagccctggcagcagcagtgacagcaatggaggagatgctgagggccctggccccccagcccctgtgaccttccagcagatctgcaaggatgtgcacctggtgaagcaccagggccagcagctgttcatcgagagccgggcccggccccagagccggccccggctgcctgccaccggcaccttcaaggccaaggccctgccctgccagagcccagaccctgagctggaggccggcagcgcccctgtgcaggcccccctggccctggtgcctgaggaggccgagaggaaggaggccagcagctgcagctaccagcagatcaactgcctggacagcatcctgcgctacctggagagctgcaacctgcccagcaccaccaagaggaaatgtgccagcagcagcagctacaccaccagcagcgccagtgatgatgaccggcagaggacaggccctgtgtctgtgggcaccaagaaggaccccccatctgctgccctgtctggagagggcgccacccccaggaaggagcctgtggtgggcggcaccctgagccccctggccctggccaacaaggccgagagcgtggtgtctgtgaccagccagtgcagcttcagcagcaccatcgtgcacgtgggggacaagaagcccccagagagtgacatcatcatgatggaggacctgcccggcctggcccctggccctgcccccagccctgcccccagccccaccgtggccccagaccctgccccagatgcctacagacctgtgggcctgaccaaggctgtgctgagcctgcacacccagaaggaggagcaggccttcctgagccgcttccgggacctgggccgcctgcggggcctggacagcagcagcacagcccccagcgccctgggggagcggggcagccacctgggccccccaggggcctgccccctgcccagcctgggcctggactgctggggcgtgggcctgaagggcggcgtgtctgcccctggcacccaggccggcgtggccagcaccacccggccctgcctgggcaccggccccagcctggccagcccccactag

SEQ ID NO: 19415 - DNA, 1266 bp, synthetic construct
  source 1..1266: mol_type = other DNA; note = Synthetic coding sequence
atggccagcagctctgtgcccccagccaccgtgtctgctgccacagctggccctggccctggcttcggctttgccagcaagaccaagaagaagcactttgtgcagcagaaggtgaaggtgttccgggctgctgaccccctggtgggcgtcttcctgtggggcgtggcccacagcatcaatgagctgagccaggtgcccccacctgtgatgctgctgcctgatgacttcaaggccagcagcaagatcaaggtgaacaaccacctgttccaccgggagaacctgcccagccacttcaagttcaaggagtactgcccccaggtgttcaggaacctgcgggacagatttggaattgatgaccaggactacctggtgtccctgaccaggaacccccccagcgagagcgagggcagtgatggccgcttcctgatctcctatgacaggaccctggtgatcaaggaggtgtccagtgaagatattgctgacatgcacagcaacctgagcaactaccaccagtacatcgtgaagtgccacggcaacaccctgctgccccagttcctgggcatgtacagagtgtctgtggacaatgaagacagctacatgctggtgatgaggaacatgttcagccaccggctgcctgtgcacaggaaatatgacctgaagggcagcctggtgtcccgggaggccagtgacaaggagaaggtgaaggagctgcccaccctgaaggacatggacttcctgaacaagaaccagaaggtgtacatcggggaggaggagaagaagatcttcctggagaagctgaagagagatgtggagttcctggtgcagctgaagatcatggactacagcctgctgctgggcatccatgacatcatccggggcagcgagcctgaggaggaggcccctgtgcgggaggatgaaagtgaggtggatggagactgcagcctgaccggccccccagccctggtgggcagctatggcaccagccctgagggcatcggcggctacatccacagccaccggcccctgggccctggagaatttgagagcttcattgatgtgtatgccatccgctctgctgagggcgccccccagaaggaggtgtacttcatgggcctgattgacatcctgacccagtatgatgccaagaagaaggccgcccacgccgccaagacagtgaagcacggggccggggctgagatcagcacagtgcaccctgagcagtatgccaagcgcttcctggacttcatcaccaacatctttgcctag

SEQ ID NO: 19416 - DNA, 2031 bp, synthetic construct
  source 1..2031: mol_type = other DNA; note = Synthetic coding sequence
atggctgctgccactggagaccccggcctgagcaagctgcagtttgcccccttcagcagcgccctggatgtgggcttctggcatgagctgacccagaagaagctgaatgagtaccgcctggatgaggcccccaaggacatcaagggctactactacaatggagacagcgctggcctgcctgcccggctgaccctggagttcagcgcctttgacatgtctgcccccaccccagcccgctgctgcccagccatcggcaccctgtacaacaccaacaccctggagagcttcaagacagctgacaagaagctgctgctggagcaggccgccaatgagatctgggagagcatcaagagcggcacagccctggagaaccctgtgctgctgaacaagttcctgctgctgacctttgctgacctgaagaagtaccacttctactactggttctgctacccagccctgtgcctgcctgagagcctgcccctcatccagggccctgtgggcctggaccagcgcttcagcctgaagcagatcgaggccctggagtgtgcctatgacaacctgtgccagacagagggcgtgacagccctgccctacttcctgatcaagtatgatgagaacatggtgctggtgtccctgctgaagcactacagcgacttcttccagggccagaggaccaagatcaccatcggcgtgtatgacccctgcaacctggcccagtacccaggctggcccctgaggaacttcctggtgctggccgcccaccgctggagcagcagcttccagagcgtggaggtggtgtgcttccgggacaggaccatgcagggcgccagagatgtggcccacagcatcatctttgaggtgaagctgcctgagatggccttctccccagactgccccaaggctgtgggctgggagaagaaccagaagggcggcatgggccccaggatggtgaacctgtctgagtgcatggaccccaagaggctggccgagagctctgtggacctgaacctgaagctgatgtgctggaggctggtgcccaccctggacctggacaaggtggtgtctgtgaagtgcctgctgctgggcgccggcaccctgggctgcaatgtggcccggaccctgatgggctggggcgtgcgccacatcacctttgtggacaatgccaagatctcctacagcaaccctgtgcggcagcccctgtatgaatttgaggactgcctgggcggcggcaagcccaaggccctggccgctgctgaccggctgcagaagatcttccctggggtgaatgcccggggcttcaacatgagcatccccatgcctggccaccctgtgaacttcagctctgtgaccctggagcaggccaggagagatgtggagcagctggagcagctgattgagagccatgatgtggtgttcctgctgatggacacccgggagagccgctggctgcctgctgtgattgctgccagcaagaggaagctggtgatcaatgctgccctgggctttgacacctttgtggtgatgagacatggcctgaagaagcccaagcagcagggcgctggggacctgtgccccaaccaccctgtggccagcgctgacctgctgggcagcagcctgtttgccaacatccctggctacaagctgggctgctacttctgcaatgatgtggtggcccctggggacagcacccgggacaggaccctggaccagcagtgcaccgtgtccaggcctggcctggccgtgattgctggggccctggccgtggagctgatggtgtctgtgctgcagcaccctgagggcggctacgccatcgccagcagcagtgatgacaggatgaatgaaccacccaccagcctgggcctggtgccccaccaggtgctggaccagtatgaaagagagggcttcaacttcctggccaaggtgttcaacagcagccacagcttcctggaggacctgaccggcctgaccctgctgcaccaggagacccaggccgctgagatctgggacatgtctgatgatgagaccatctag

SEQ ID NO: 19417 - DNA, 1329 bp, synthetic construct
  source 1..1329: mol_type = other DNA; note = Synthetic coding sequence
atggccagtgatggagccagcgccctgcccggccctgacatgtccatgaagcccagcgctgcccccagccccagccctgccctgcccttcctgccccccaccagtgaccccccagaccaccccccccgggagcccccaccccagcccatcatgcccagcgtcttctccccagacaaccccctgatgctgagcgccttccccagcagcctgctggtgactggagatggcggcccctgcctgtctggagctggagctgggaaggtgattgtgaaggtgaagacagagggcggcagcgctgagcccagccagacccagaacttcatcctgacccagacagccctgaacagcacagcccctggcaccccctgtggcggcctggagggccctgcccccccatttgtgacagccagcaatgtgaagaccatcctgcccagcaaggctgtgggcgtgtcccaggagggccccccaggcctgcccccccagcccccacctcctgtggcccagctggtgcccatcgtgcccctggagaaggcctggccaggcccccacggcaccaccggggagggcggccctgtggccaccctgagcaagcccagcctgggggacaggagcaagatcagcaaggatgtgtatgagaacttccggcagtggcagcgctacaaggccctggcccggcggcacctgagccagagcccagacacagaggccgtgaaggagtatgtggacatcatggagtggctggtgggcacccacctggccaccggggagagtgatggcaagcaggaggaggagggccagcagcaggaggaggagggcatgtacccagaccccggcctgctgagctacatcaatgagctgtgcagccagaaggtgtttgtgtccaaggtggaggccgtcatccacccccagttcctggccgacctgctgagccctgagaagcagagggaccccctggccctgattgaggagctggagcaggaggagggcctgaccctggcccagctggtgcagaagaggctgatggccctggaggaggaggaggatgctgaggccccacccagcttcagcggggcccagctggacagcagccccagcggctctgtggaggatgaagatggagatggccgcctgcggcccagccctggcctgcagggcgctgggggcgccgcctgcctgggcaaggtgagcagcagcggcaagagggcccgggaggtgcacggcggccaggagcaggccctggacagcccccggggcatgcacagagatggcaacaccctgcccagccccagctcctgggacctgcccaccaatggagagagccagtgctag

SEQ ID NO: 19418 - DNA, 666 bp, synthetic construct
  source 1..666: mol_type = other DNA; note = Synthetic coding sequence
atgcaggtgcaggatgatggagtgaacctgatcccctttgccaagtgcagccgggtggtgagccgcagccccccaccccggctgcccagccagagcctgcggcccatgccccagagatatggagatgtgttctggaagaacctgaaccagaggcccacccccacctggctggaggagcagcacatcccccccatgctgctgcccccacctgagatgctgtggaggaggaagaagagaagaccctgcctggagggcatgcagcagcagggcctgggcggcgtgcctgcccgggtgcgggctgtgacctaccacctggaggacctgcggcggcggcagagcatcatcaatgagctgaagaaggcccagtggggcagcagcggggccgccagcgagcctgtggtgctgggggaggagggctgcggcttccccagcaccaatgagtacccagacctggaggaggagcgggccacctacccccaggaggaggaccgcttcctgaccccaggccgggcccagctgctgtggagcccctggagccccctggaccaggaggaggcctgtgccagccggcagctgcacagcctggccagcttcagcacagtgacagcccggaggaaccccctgcacaacccctggggcatggagctggccgccagcgaggagtag

SEQ ID NO: 19419 - DNA, 480 bp, synthetic construct
  source 1..480: mol_type = other DNA; note = Synthetic coding sequence
atgcagagggtgggcaacaccttcagcaatgaaagccgggtggccagccgctgccccagcgtgggcctggccgagaggaacagagtggccaccatgcctgtgcggctgctgcgggacagccctgctgcccaggaggacaatgaccacgccagagatggcttccagatgaagctggatgcccacggctttgcccctgaggagctggtggtgcaggtggatggccagtggctgatggtgacaggccagcagcagctggatgtgcgggaccctgagcgggtgtcctacaggatgagccagaaggtgcacaggaagatgctgcccagcaacctgagccccacagccatgacctgctgcctgacccccagcggccagctgtgggtgcggggccagtgtgtggccctggccctgcctgaggcccagacaggccccagcccccggctgggcagcctgggcagcaaggccagcaacctgaccaggtag

SEQ ID NO: 19420 - DNA, 1782 bp, synthetic construct
  source 1..1782: mol_type = other DNA; note = Synthetic coding sequence
atggagaagctgagcgccctgcaggagcagaagggggagctgaggaagaggctgagctacaccacccacaagctggagaagctggagacagaatttgacagcaccaggcactacctggagattgagctgcggcgggcccaggaggagctggagaaggtgacagagaagctgcggcgcatccagagcaactacatggccctgcagaggatcaaccaggagctggaggacaagctgtacaggatgggccagcactatgaggaggagaagagggccctgagccatgagatcgtggccctgaacagccacctgctggaggccaaggtgaccatcgacaagctgtctgaagataatgagctgtacaggaaggactgcaacctggccgcccagctgctgcagtgcagccagacctacggccgggtgcacaaggtgtctgagctgcccagcgacttccaggagcgggtgtccctgcacatggagaagcacggctgcagcctgcccagccccctgtgccacccagcctatgctgacagcgtgcccacctgtgtgattgccaaggtgctggagaagccagaccctgccagcctgagcagccggctgagtgatgccagcgcccgggacctggccttctgtgatggagtggagaagccaggcccccggcccccctacaagggggacatctactgcagcgacacagccctgtactgcccagaggagcggcggcgggacagaagacccagcgtggatgcccctgtgacagatgtgggcttcctgcgggcccagaacagcacagattctgctgctgaggaggaggaggaggccgaggccgccgccttccctgctggcttccagcacgaggccttccccagctatgccggcagcctgcccaccagcagcagctacagcagcttcagcgccaccagcgaggagaaggagcacgcccaggccagcaccctgacagccagccagcaggccatctacctgaacagcagagatgagctgtttgacaggaagcccccagccaccacctatgagggcagccccaggtttgccaaggccacagctgctgtggccgcccccctggaggccgaggtggcccctggcttcggccgcaccatgagcccctacccagctgagaccttccgcttccctgccagccctggcccccagcaggccctgatgccacccaacctgtggagcctgcgggccaagccaggcacagcccggctgcccggggaggacatgaggggccagtggaggcccctgtctgtggaggacatcggggcctacagctaccctgtgtctgctgctggccgggccagcccctgcagcttcagcgagcgctactatggaggagctgggggcagccctgggaagaaggcagatggccgggccagccccctgtatgccagctacaaggctgacagcttctctgaaggagatgacctgagccagggccacctggccgagccctgcttcctgcgggccggcggggacctgagcctgagccctggccgctctgctgaccccctgcccggctacgcccccagcgagggcggagatggagaccggctgggcgtgcagctgtgtggcacagccagcagccctgagcctgagcagggcagccgggacagcctggagcccagctccatggaggccagccctgagatgcaccctgctgcccggctgagcccccagcaggccttccccaggactggaggcagcggcctgagcaggaaggacagcctgaccaaggcccagctgtatggcaccctgctgaactag

SEQ ID NO: 19421 - DNA, 2610 bp, synthetic construct
  source 1..2610: mol_type = other DNA; note = Synthetic coding sequence
atgggcaaccgggagatggaggagctgatccccctggtgaaccggctgcaggatgccttcagcgccctgggccagagctgcctgctggagctgccccagattgctgtggtgggcggccagagcgctgggaagagctctgtgctggagaactttgtgggccgggacttcctgccccggggcagcggcatcgtgacccggcggcccctggtgctgcagctggtgaccagcaaggccgagtatgcagagttcctgcactgcaagggcaagaagttcacagactttgatgaggtgcggctggagattgaagctgagacagacagagtgacaggcatgaacaagggcatcagcagcatccccatcaacctgcgggtgtacagcccccacgtgctgaacctgaccctgattgacctgcccggcatcaccaaggtgcctgtgggggaccagcccccagacatcgagtaccagatccgggagatgatcatgcagttcatcacccgggagaactgcctgatcctggccgtgaccccagccaacacagacctggccaacagtgatgccctgaagctggccaaggaggtggacccccagggcctgcggaccatcggggtcatcaccaagctggacctgatggatgagggcacagatgccagagatgtgctggagaacaagctgctgcccctgcggcggggctacgtgggcgtggtgaacagaagccagaaggacattgatggcaagaaggacatcaaggccgccatgctggccgagaggaagttcttcctgagccacccagcctaccgccacatcgctgacaggatgggcaccccccacctgcagaaggtgctgaaccagcagctgaccaaccacatccgggacaccctgcccaacttcaggaacaagctgcagggccagctgctgagcattgaacatgaggtggaggcctacaagaacttcaagccagaggaccccaccaggaagaccaaggccctgctgcagatggtgcagcagtttgctgtggactttgagaagagaattgagggcagcggggaccaggtggacaccctggagctgtctggaggagccaagatcaaccgcatcttccacgagcgcttcccctttgagatcgtgaagatggagttcaatgagaaggagctgcggcgggagatctcctatgccatcaagaacatccacggcatcagaacaggcctcttcaccccagacatggcctttgaggccatcgtgaagaagcagatcgtgaagctgaagggccccagcctgaagtctgtggacctggtgatccaggagctgatcaacacagtgaagaagtgcaccaagaagctggccaacttcccccggctgtgtgaggagacagaaagaattgtggccaaccacatccgggagcgggagggcaagaccaaggaccaggtgctgctgctgattgacatccaggtgtcctacatcaacaccaaccacgaggacttcatcggctttgccaatgcccagcagaggagcagccaggtgcacaagaagaccaccgtgggcaaccagggcaccaacctgccccccagccggcagatcgtcatcaggaagggctggctgaccatcagcaacatcggcatcatgaagggcggcagcaagggctactggtttgtgctgacagctgagagcctgtcctggtacaaggatgatgaggagaaggagaagaagtacatgctgcccctggacaacctgaaggtgagagatgtggagaagagcttcatgagcagcaagcacatctttgccctcttcaacacagagcagagaaatgtgtacaaggactaccgcttcctggagctggcctgtgacagccaggaggatgtggacagctggaaggccagcctgctgcgggccggcgtgtacccagacaagtctgtggctgaaaatgatgaaaatggccaggccgagaacttctccatggacccccagctggagcggcaggtggagaccatccggaacctggtggacagctacatgagcatcatcaacaagtgcatccgggacctgatccccaagaccatcatgcacctgatgatcaacaacgtgaaggacttcatcaacagcgagctgctggcccagctgtacagcagcgaggaccagaacaccctgatggaggagagcgctgagcaggcccagaggagagatgagatgctgaggatgtaccaggccctgaaggaggccctgggcatcatcggggacatcagcacagccaccgtgtccaccccagcccctcctcctgtggatgacagctggatccagcacagcagaagaagccccccacccagccccaccacccagaggcggcccaccctgagcgcccccctggcccggcccaccagcggccggggccctgccccagccatccccagccctggcccccacagcggggcccctcctgtgcccttccggcccggccccctgccccccttccccagcagcagtgacagctttggagccccaccccaggtgcccagccggcccacccgggccccacccagcgtgcccagccggcggcccccacccagccccacccggcccaccatcatccggcccctggagagcagcctgctggactag

SEQ ID NO: 19422 - DNA, 1896 bp, synthetic construct
  source 1..1896: mol_type = other DNA; note = Synthetic coding sequence
atgaacagcagtgatgaggagaagcagctgcagctgatcaccagcctgaaggagcaggccatcggggagtatgaggacctgcgggcagagaaccagaagaccaaggagaagtgtgacaagatccggcaggagagagatgaggccgtgaagaagctggaggagttccagaagatcagccacatggtgattgaggaggtgaacttcatgcagaaccacctggagattgagaagacctgccgggagagcgctgaggccctggccaccaagctgaacaaggagaacaagaccctgaagaggatctccatgctgtacatggccaagctgggcccagatgtgatcacagaggagatcaacattgatgatgaggacagcaccacagacacagatggagctgctgagacctgtgtgtctgtgcagtgccagaagcagatcaaggagctgcgggaccagatcgtgtctgtgcaggaggagaagaagatcctggccatcgagctggagaacctgaagagcaagctggtggaggtgattgaggaggtgaacaaggtgaagcaggagaagacagtgctgaacagcgaggtgctggagcagaggaaggtgctggagaagtgcaacagagtgtccatgctggccgtggaggagtatgaggagatgcaggtgaacctggagctggagaaggacctgaggaagaaggccgagagctttgcccaggagatgttcatcgagcagaacaagctgaagaggcagagccacctgctgctgcagagcagcatcccagaccagcagctgctgaaggccctggatgaaaatgccaagctgacccagcagctggaggaggagcgcatccagcaccagcagaaggtgaaggagctggaggagcagctggagaatgagaccctgcacaaggagatccacaacctgaagcagcagctggagctgctggaggaggacaagaaggagctggagctgaagtaccagaacagcgaggagaaggccaggaacctgaagcacagcgtggatgagctgcagaagagggtgaaccagagtgaaaattctgtgcccccacctcctcctcctcctccacccctgcccccacctccacccaaccccatccgcagcctgatgtccatgatcaggaagaggagccaccccagcggcagcggggccaagaaggagaaggccacccagcctgagaccacagaggaggtgacagacctgaagaggcaggccgtggaggagatgatggaccgcatcaagaagggcgtgcacctgcggcctgtgaaccagacagcccggcccaagaccaagccagagagcagcaagggctgtgagagcgctgtggatgagctgaagggcatcctgggcaccctgaacaagagcaccagcagccgcagcctgaagagcctggaccctgaaaattctgaaacagagctggagcgcatcctgcggcggaggaaggtgacagctgaggccgacagcagcagccccaccggcatcctggccaccagcgagagcaagtccatgcctgtgctgggctctgtgtcctctgtgaccaagacagccctgaacaagaagaccctggaggccgagttcaacagccccagcccccccaccccagagcccggggagggccccaggaagctggagggctgcaccagcagcaaggtgaccttccagccccccagcagcatcggctgcaggaagaagtacattgatggagagaagcaggccgagcctgtggtggtgctggaccctgtgtccacccatgagccccagaccaaggaccaggtggccgagaaggaccccacccagcacaaggaggatgaaggagagatccagcctgagaacaaggaggacagcattgaaaatgtgcgggagacagacagcagcaactgctag

SEQ ID NO: 19423 - DNA, 1701 bp, synthetic construct
  source 1..1701: mol_type = other DNA; note = Synthetic coding sequence
atggacctgcaccgggccgccttcaagatggagaacagcagctacctgcccaaccccctggccagccctgccctgatggtgctggccagcacagctgaggccagcagagatgccagcatcccctgccagcagccccggcccttcggcgtgcctgtgtctgtggacaaggatgtgcacatccccttcaccaacggcagctacacctttgcctccatgtaccaccggcagggcggcgtgcccggcacctttgccaacagagacttcccccccagcctgctgcacctgcacccccagtttgccccacccaacctggactgcacccccatctccatgctgaaccacagcggcgtgggcgccttccggccctttgccagcacagaagatcgggagagctaccagagcgccttcaccccagccaagaggctgaagaactgccacgacacagagagcccccacctgcgcttcagtgatgctgatggcaaggagtatgactttggcacccagctgcccagcagcagccctggcagcctgaaggtggatgacaccgggaagaagatctttgctgtgtctggcctcatcagtgaccgggaggccagcagcagcccagaagatagaaatgaccgctgcaagaagaaggccgccgccctgtttgacagccaggcccccatctgccccatctgccaggtgctgctgcggcccagcgagctgcaggagcacatggagcaggagctggagcagctggcccagctgcccagcagcaagaacagcctgctgaaggatgccatggcccctggcacccccaagagcctgctgctgagcgccagcatcaagcgggagggggagagccccacagccagcccccacagcagcgccacagatgacctgcaccacagcgaccgctaccagaccttcctgcgggtgcgggccaaccggcagacccggctgaatgccagaattggcaagatgaagaggaggaagcaggatgagggccagcgggagggcagctgcatggctgaagatgatgctgtggacattgaacatgagaacaacaacagatttgaggagtatgagtggtgtggccagaagaggatccgggccaccaccctgctggagggcggcttccggggcagcggcttcatcatgtgcagcggcaaggagaacccagacagtgatgctgacctggatgtggatggagatgacaccctggagtatggcaagccccagtacacagaagcagatgtgatcccctgcaccggggaggagcccggggaggccaaggagcgggaggccctgcggggagctgtgctgaatggaggcccccccagcacccgcatcaccccagagttcagcaagtgggccagtgatgagatgcccagcaccagcaatggagagagcagcaagcaggaggccatgcagaagacctgcaagaacagcgacatcgagaagatcacagaagattctgctgtgaccacctttgaggccctgaaggcccgggtgcgggagctggagcggcagctgagcagaggagaccgctacaagtgcctgatctgcatggacagctacagcatgcccctgaccagcatccagtgctggcacgtgcactgtgaggagtgctggctgcggaccctgggcgccaagaagctgtgcccccagtgcaacaccatcacagcccctggggacctgcggcgcatctacctgtag

SEQ ID NO: 19424 - DNA, 1071 bp, synthetic construct
  source 1..1071: mol_type = other DNA; note = Synthetic coding sequence
atgctgagcgccatcaccaacgtggtgcagaacacaggcaagtctgtgctgaccggcggcctggatgccctggagttcatcggcaagaagaccatgaatgtgctggccgagagtgaccccggcttcaagaggaccaagaccctgatggagaggacagtgtccctgagccagatgctgcgggaggccaaggagaaggagaagcagaggctggcccagcagctgaccatggagaggacagcccactacggcatgctgtttgatgagtaccagggcctgagccacctggaggccctggagatcctgagcaatgaaagtgagagcaaggtgcagagcttcctggccagcctggatggagagaagctggagctgctgaagaatgacctgatcagcatcaaggacatctttgctgccaaggagctggagaatgaggagaaccaggaggagcagggcctggaggagaagggggaggagtttgccaggatgctgacagagctgctgtttgagctgcacgtggccgccaccccagacaagctgaacaaggccatgaagagggcccatgactgggtggaggaggaccagacagtggtgtctgtggatgtggccaaggtgtctgaggaggagaccaagaaggaggagaaggaggagaagagccaggacccccaggaggacaagaaggaggagaagaagaccaagaccatcgaggaggtgtacatgagcagcattgagagcctggccgaggtgacagcccgctgcatcgagcagctgcacaaggtggccgagctgatcctgcacggccaggaggaggagaagccagcccaggaccaggccaaggtgctgatcaagctgaccacagccatgtgcaatgaggtggccagcctgagcaagaagttcaccaacagcctgaccaccgtgggcagcaacaagaaggccgaggtgctgaaccccatgatcagctctgtgctgctggagggctgcaacagcaccacctacatccaggatgccttccagctgctgctgcctgtgctgcaggtgagccacatccagaccagctgcctgaaggcccagccctag

SEQ ID NO: 19425 - DNA, 519 bp, synthetic construct
  source 1..519: mol_type = other DNA; note = Synthetic coding sequence
atgagctacaactgctgcagcggcaacttcagcagccgcagctgtggcggctacctgcactacccagccagcagctgtggcttctcctaccccagcaaccaggtgtacagcacagacctgtgcagccccagcacctgccagctgggcagcagcctgtaccggggctgccagcagacctgctgggagcccaccagctgccagaccagctatgtggagagcagcccctgccagaccagctgctaccggcccaggaccagcctgctgtgcagcccctgccagaccacctacagcggcagcctgggcttcggcagcagcagctgccgcagcctgggctacggcagccgcagctgctacagcgtgggctgcggcagcagcggcttccgcagcctgggctacggcggctgcggcttccccagcctgggctacggcgtgggcttctgccggcccacctacctggccagccgcagctgccagagcagctgctaccggcccacctgtggcagcggcttctactactag

SEQ ID NO: 19426 - DNA, 2253 bp, synthetic construct; identical to SEQ ID NO: 19350
  source 1..2253: mol_type = other DNA; note = Synthetic coding sequence

SEQ ID NO: 19427 - DNA, 888 bp, synthetic construct; identical to SEQ ID NO: 19226
  source 1..888: mol_type = other DNA; note = Synthetic coding sequence

SEQ ID NO: 19428 - DNA, 1476 bp, synthetic construct
  source 1..1476: mol_type = other DNA; note = Synthetic coding sequence
atggacaccaagggctgcaccaccaccaacagccccagcaccccctgccagaactgcagccgcatcaccaacgtgtccaccatcagcagcaacaacggctgccaccctgggggcctgactgtgaacaactgccagcctgctggccacgtgctgcgcatcccctgggaccagggctgccagcccaccccccgcttctgcaggaagcccatctacctgatgaacaacttcaatgcccgcttcagcctggatgactgctcctggtacggggagggcatcaacagcaatgagaaggagaccatgcagatcctgaatgaaaggctggccaactacctgcagaaggtgaggatgctggagcgggagaatgctgagctggagagcaagatccaggaggagagcaacaaggagctgcctgtgctgtgcccagactacctgagctactacaccaccatcgaggagctgcagcagaagatcctgtgcaccaaggccgagaacagccggctggtgtcccagattgacaacaccaagctgacagcagatgacctgcgggccaagtatgaagctgaggtgtccctgcggcagctggtggagagtgatgccaacggcctgaagcagatcctgaatgtgctgaccctgggcaaggctgacctggaggcccaggtgcagagcctgaaggaggagctgctgtgcctgaagaacaaccacaaggaggagatcaacagcctgcagtgccagctgggggagcggctggacatcgaggtgacagctgcccccagcgctgacctgaaccaggtgctgcaggagatgcgctgccagtatgagcccatcatggagaccaacaggaaggatgtggagcagtggttcaacacccagatcgaggagctgaaccagcaggtggtgaccagcagccagcagcagcagtgctgccagaaggagatcatcgagctgcggcgctctgtgaacaccctggaggtggagctgcaggcccagcacaggatgagggacagccaggagtgcatcctgacagaaacagaggcccgctacacagccctgctgacccagatccagagcctgattgacaacctggaggcccagctggccgagatccgctgtgccctggagcggcagaaccaggagtatgagatcctgctggatgtgaagagccggctggagtgtgagatcaccacctaccgcagcctgctggagagcagtgatggcaagaggccctgctacccccgggccaccaagtgtgagcccagcccctggaccagctgcaagagcggggccatcgagagcacagccccagcctgcaccagcagcagcccctgcagcctgaaggagcactgcagcgcctgtggccccctgagccgcatcctggtgaagatctgcaccatcaccaaggagatcaaggatggcaaggtgatcagcagctatgaacatgtgcagccctgcttcatcatccggcctgccaaggtgtag

SEQ ID NO: 19429 - DNA, 1287 bp, synthetic construct
  source 1..1287: mol_type = other DNA; note = Synthetic coding sequence
atgaagaggggcggccgggacagcgacaggaacagcagcgaggagggcacagctgagaagagcaagaagctgcggaccaccaatgagcacagccagacctgtgactggggcaacctgctgcaggacatcatcctgcaggtgttcaagtacctgcccctgctggaccgggcccacgccagccaggtgtgcaggaactggaaccaggtgttccacatgccagacctgtggcgctgctttgaatttgagctgaaccagcctgccaccagctacctgaaggccacccaccctgagctgatcaagcagatcatcaagaggcacagcaaccacctgcagtatgtgtccttcaaggtggacagcagcaaggagagcgctgaggccgcctgtgacatcctgagccagctggtgaactgcagcctgaagaccctgggcctcatcagcacagcccggcccagcttcatggacctgcccaagagccacttcatcagcgccctgactgtggtgtttgtgaacagcaagagcctgagcagcctgaagattgatgacacccctgtggatgaccccagcctgaaggtgctggtggccaacaacagcgacaccctgaagctgctgaagatgagcagctgcccccacgtgtccccagctggcatcctgtgtgtggccgaccagtgccacggcctgcgggagctggccctgaactaccacctgctgagtgatgagctgctgctggccctgagcagcgagaagcacgtgcggctggagcacctgagaattgatgtggtgtctgagaaccctggccagacccacttccacaccatccagaagagctcctgggatgccttcatccgccacagccccaaggtgaacctggtgatgtacttcttcctgtatgaggaggagtttgaccccttcttccgctatgagatcccagccacccacctgtacttcggccgctctgtgtccaaggatgtgctgggccgggtgggcatgacctgcccccggctggtggagctggtggtgtgtgccaacggcctgcggcccctggatgaggagctgatcagaattgctgagcgctgcaagaacctgagcgccatcggcctgggggagtgtgaggtgtcctgcagcgcctttgtggagtttgtgaagatgtgtggcggccgcctgagccagctgagcatcatggaggaggtgctgatcccagaccagaagtacagcctggagcagatccactgggaggtgtccaagcacctgggccgggtgtggttcccagacatgatgcccacctggtag

SEQ ID NO: 19430 - DNA, 3603 bp, synthetic construct
  source 1..3603: mol_type = other DNA; note = Synthetic coding sequence
atgaacacagattctgggggctgtgccaggaagagagctgccatgtctgtgaccctgacctctgtgaagagggtgcagagcagccccaacctgctggccgccggccgggacagccagagcccagattctgcctggaggagctacaatgatggcaaccaggagaccctgaatggagatgccacctacagcagcctggccgccaagggcttccgctctgtgcggcccaacctgcaggacaagaggagccccacccagagccagatcaccgtgaatggaaacagcggcggcgctgtgagccccatgagctactaccagaggcccttcagccccagcgcctacagcctgcctgccagcctgaacagcagcatcgtgatgcagcacggcaccagcctggacagcacagacacctacccccagcacgcccagagcctggatggcaccaccagcagcagcatccccctgtaccgcagcagcgaggaggagaagagggtgaccgtcatcaaggccccccactacccaggcatcggccctgtggatgaaagtggcatccccacagccatccgcaccaccgtggaccggcccaaggactggtacaagaccatgttcaagcagatccacatggtgcacaagccagatgatgacacagacatgtacaacaccccctacacctacaatgccggcctgtacaaccccccctacagcgcccagagccaccctgctgccaagacccagacctaccggcccctgagcaagagccacagcgacaacagccccaatgccttcaaggatgccagcagccctgtgcccccaccccacgtgcccccacctgtgccccccctgcggccccgggacaggagcagcacagagaagcatgactgggaccccccagacaggaaggtggacaccaggaagttccgctctgagcccaggagcatctttgaatatgagcccgggaagagcagcatcctgcagcacgagaggcctgccagcctgtaccagagcagcattgacaggagcctggagcggcccatgagcagcgcctccatggccagtgacttcaggaagaggaggaagtctgagcctgctgtgggccccccccggggcctgggggaccagagcgccagcaggaccagccctggccgggtggacctgcccggcagcagcaccaccctgaccaagagcttcaccagcagcagccccagcagccccagccgggccaagggaggagatgacagcaagatctgccccagcctgtgcagctacagcggcctgaatggaaaccccagcagcgagctggactactgcagcacctaccggcagcacctggatgtgccccgggacagcccccgggccatctccttcaagaatggctggcagatggcccggcagaatgctgagatctggagcagcacagaggagaccgtgagccccaagatcaagagccgcagctgtgatgacctgctgaatgatgactgtgacagcttcccagaccccaaggtgaagtctgagagcatgggcagcctgctgtgtgaggaggacagcaaggagagctgccccatggcctggggcagcccctacgtgcctgaggtgcgcagcaatggccgcagccgcatccgccacaggtctgccagaaatgcccctggcttcctgaagatgtacaagaagatgcaccgcatcaacaggaaggacctgatgaacagcgaggtgatctgcagcgtgaagagccgcatcctgcagtatgagagcgagcagcagcacaaggacctgctgcgggcctggagccagtgcagcacagaggaggtgccccgggacatggtgcccacccgcatcagcgagtttgagaagctgatccagaagagcaagtccatgcccaacctgggagatgacatgctgagccctgtgaccctggagcccccccagaatggcctgtgccccaagaggcgcttcagcattgagtacctgctggaggaggagaaccagagcggccccccagcccggggccggcggggctgccagagcaatgccctggtgcccatccacatcgaggtgaccagtgatgagcagccccgggcccacgtggagttcagtgacagcgaccaggatggagtggtgtctgaccacagcgactacatccacctggagggcagcagcttctgcagcgagagtgactttgaccacttctccttcaccagcagcgagagcttctacggcagcagccaccaccaccaccaccaccaccaccaccaccaccgccacctgatcagcagctgcaagggccgctgcccagccagctacacccgcttcaccaccatgctgaagcatgagcgggcccggcatgagaacacagaggagccccggcggcaggagatggaccccggcctgagcaagctggccttcctggtgtcccctgtgcccttccggaggaagaagaacagcgcccccaagaagcagacagagaaggccaagtgcaaggcctctgtgtttgaggccctggacagcgccctgaaggacatctgtgaccagatcaaggccgagaagaagaggggcagcctgcctgacaacagcatcctgcacaggctcatcagcgagctgctgcctgatgtgcctgagaggaacagcagcctgcgggccctgcggcgcagccccctgcaccagcccctgcaccccctgcccccagatggagccatccactgccccccctaccagaatgactgtggccgcatgcccaggtctgccagcttccaggatgtggacacagccaacagcagctgccaccaccaggaccggggcggggccctgcaggaccgggagagccccaggagctacagcagcaccctgacagacatgggccgcagcgccccccgggagcggcggggcaccccagagaaggagaagctgcctgccaaggctgtgtatgacttcaaggcccagaccagcaaggagctgtccttcaagaagggggacacagtgtacatcctgaggaagattgaccagaactggtatgaaggagagcaccacggccgggtgggcatcttccccatctcctatgtggagaagctgaccccacctgagaaggcccagcctgcccggcccccacctccagcccagcctggagagatcggggaggccatcgccaagtacaacttcaatgctgacaccaacgtggagctgagcctgaggaaaggagacagagtcatcctgctgaagagggtggaccagaactggtatgagggcaagatccctggcaccaaccggcagggcatcttccctgtgtcctatgtggaggtggtgaagaagaacaccaagggagctgaggactacccagacccccccatcccccacagctacagcagtgaccgcatccacagcctgagcagcaacaagccccagaggcctgtgttcacccatgagaacatccagggcggcggggagcccttccaggccctgtacaactacaccccaagaaatgaagatgagctggagctgcgggagagtgatgtgattgatgtgatggagaagtgtgatgatggctggtttgtgggcaccagcaggaggaccaagttcttcggcaccttccctggcaactacgtgaagaggctgtag

SEQ ID NO: 19431 - DNA, 1470 bp, synthetic construct
  source 1..1470: mol_type = other DNA; note = Synthetic coding sequence
atggaggacagcgccagcgccagcctgagcagcgctgctgccaccggcaccagcaccagcaccccagctgcccccacagccaggaagcagctggacaaggagcaggtgaggaaggctgtggatgccctgctgacccactgcaagagcaggaagaacaactacggcctgctgctgaatgaaaatgaaagcctcttcctgatggtggtgctgtggaagatccccagcaaggagctgcgggtgcggctgaccctgccccacagcatccgcagtgacagcgaggacatctgcctcttcaccaaggatgagcccaacagcaccccagagaagacagagcagttctacaggaagctgctgaacaagcacggcatcaagacagtgtcccagatcatcagcctgcagaccctgaagaaggagtacaagagctatgaggccaagctgcggctgctgagcagctttgacttcttcctgacagatgcccgcatccggcggctgctgcccagcctgattggccgccacttctaccagaggaagaaggtgcctgtgtctgtgaacctgctgagcaagaacctgagccgggagatcaatgactgcatcggcggcaccgtgctgaacatcagcaagagcggcagctgcagcgccatccgcatcggccacgtgggcatgcagatcgagcacatcatcgagaacatcgtggccgtgaccaagggcctgtctgagaagctgcctgagtgggagagcgtgaagctgctgtttgtgaagacagagaagtctgctgccctgcccatcttcagcagctttgtgagcaactgggatgaggccaccaagaggagcctgctgaacaagaagaagaaggaggcccggaggaagaggcgggagaggaactttgagaagcagaaggagaggaagaagaagaggcagcaggccaggaagacagcctctgtgctgagcaaggatgatgtggcccctgagagcggggacaccaccgtgaagaagccagagagcaagaaggagcagaccccagagcacggcaagaagaagaggggccggggcaaggcccaggtgaaggccaccaatgaaagtgaagatgagatcccccagctggtgcccatcggcaagaagaccccagccaatgagaaggtggagatccagaagcacgccaccgggaagaagagccctgccaagagccccaaccccagcaccccccggggcaagaagaggaaggccctgcctgccagcgagacccccaaggctgctgagagcgagaccccaggcaagagccctgagaagaagcccaagatcaaggaggaggccgtgaaggagaagagccccagcctgggcaagaaggatgcccggcagacccccaagaagccagaggccaagttcttcaccacccccagcaagtctgtgaggaaggccagccacacccccaagaagtggcccaagaagcccaaggtgccccagagcacctag

SEQ ID NO: 19432 - DNA, 3171 bp, synthetic construct
  source 1..3171: mol_type = other DNA; note = Synthetic coding sequence
atggccggggccctgcggcggggccgggccctgggcagccggcccagcggccccaccgtgagcagcagaagaagcccccagtgccctgtggcccaggagggcctgggcgcccggagccggccccgggtggcccccaggagcctggcccgctgtggccccagcagccggctgatgggctggaagcccagcgaggcccggggccagagccagagcttccaggccagcggcctgcagcccaggagcctgaaggccgcccggcgggccaccggccgcccagacaggagcagagctgccccacccaacatggaccctgacccccaggccggcgtgcaggtgggcatgagggtggtgcggggcgtggactggaagtggggccagcaggacggcggggagggcggcgtgggcaccgtggtggagctgggcagacatggcagccccagcaccccagacagaacagtggtggtgcagtgggaccagggcaccaggaccaactacagagctggctaccagggcgcccatgacctgctgctgtatgacaatgcccagattggagtgcgccaccccaacatcatctgtgactgctgcaagaagcacggcctgcggggcatgcgctggaagtgccgggtgtgcctggactatgacctgtgcacccagtgctacatgcacaacaagcatgagctggcccacgcctttgacagatatgaaacagcccacagcaggcctgtgaccctgagcccccggcagggcctgccccgcatccccctgcggggcatcttccagggcgccaaggtggtgcggggccctgactgggagtggggcagccaggacggcggggagggcaagccaggccgggtggtggacatccggggctgggatgtggagaccggccgctctgtggcctctgtgacctgggcagatggcaccaccaacgtgtacagagtgggccacaagggcaaggtggacctgaagtgtgtgggggaggccgccggcggcttctactacaaggaccacctgccccggctgggcaagccagctgagctgcagaggagagtgtctgctgacagccagcccttccagcacggggacaaggtgaagtgcctgctggacacagatgtgctgcgggagatgcaggagggccacggcggctggaaccccaggatggccgagttcatcggccagacaggcaccgtgcaccgcatcacagacagaggagatgtgcgggtgcagttcaaccacgagacccgctggaccttccaccctggggccctgaccaagcaccacagcttctgggtgggagatgtggtgcgggtcatcggggacctggacacagtgaagaggctgcaggccggccatggagagtggacagatgacatggccccagccctgggccgggtgggcaaggtggtgaaggtgtttggagatggcaacctgcgggtggccgtggccggccagcgctggaccttcagccccagctgcctggtggcctacagacctgaggaggatgccaacctggatgtggccgagcgggcccgggagaacaagagcagcctgtctgtggccctggacaagctgcgggcccagaagagtgaccctgagcaccctggccgcctggtggtggaggtggccctgggcaatgctgcccgggccctggacctgctgcggcggcggcctgagcaggtggacaccaagaaccagggccgcacagccctgcaggtggccgcctacctgggccaggtggagctgatccggctgctgctgcaggcccgggccggcgtggacctgcctgatgatgagggcaacacagccctgcactacgccgccctgggcaaccagcctgaggccaccagggtgctgctgtctgctggctgcagagcagatgccatcaacagcacccagagcacagccctgcacgtggccgtgcagaggggcttcctggaggtggtgcgggccctgtgtgagcggggctgtgatgtgaacctgcctgatgcccacagcgacacccccctgcacagcgccatctctgctggcactggagccagcggcatcgtggaggtgctgacagaggtgcccaacattgatgtgacagccaccaacagccagggcttcaccctgctgcaccacgccagcctgaagggccacgccctggccgtgaggaagatcctggcccgggcccggcagctggtggatgccaagaaggaggatggcttcaccgccctgcacctggccgccctgaacaaccaccgggaggtggcccagatcctgatccgggagggccgctgtgatgtgaatgtgaggaacaggaagctgcagagccccctgcacctggccgtgcagcaggcccacgtgggcctggtgcccctgctggtggatgctggctgcagcgtgaatgcagaagatgaggagggggacacagccctgcacgtggccctgcagaggcaccagctgctgcccctggtggctgatggagctggaggagaccccggccccctgcagctgctgagccggctgcaggccagcggcctgcccggcagcgctgagctgactgtgggcgctgctgtggcctgcttcctggccctggagggcgcagatgtgtcctacaccaaccaccggggccgcagccccctggacctggccgctgagggccgggtgctgaaggccctgcagggctgtgcccagcgcttccgggagcggcaggccggcggcggggccgcccctggcccccggcagaccctgggcacccccaacacagtgaccaacctgcacgtgggcgccgcccctggccctgaggccgctgagtgcctggtgtgcagcgagctggccctgctggtgctcttcagcccctgccagcacaggacagtgtgtgaggagtgtgcccggaggatgaagaagtgcatccgctgccaggtggtggtgtccaagaagctgcggccagatggcagcgaggtggccagcgctgccccagcccctggccccccccggcagctggtggaggagctgcagagccgctaccggcagatggaggagcgcatcacctgccccatctgcatcgacagccacatccggctggtgttccagtgtggccacggggcctgtgccccctgtggcagcgccctgagcgcctgccccatctgccggcagcccatccgggaccgcatccagatctttgtgtag

SEQ ID NO: 19433 - DNA, 858 bp, synthetic construct
  source 1..858: mol_type = other DNA; note = Synthetic coding sequence
atgtctgaggccggggaggagcagcccatggagaccactggagccacagaaaatggccacgaggccgtgcctgagggggagagccctgctggggccggcaccggggctgctgctggggccggcggggccacagctgcccctccttctggcaaccagaatggagctgagggggaccagatcaatgccagcaagaatgaagaagatgctgggaagatgtttgtgggcggcctgtcctgggacaccagcaagaaggacctgaaggactacttcaccaagtttggagaggtggtggactgcaccatcaagatggaccccaacacaggccgcagccggggcttcggcttcatcctcttcaaggatgctgcctctgtggagaaggtgctggaccagaaggagcaccggctggatggccgggtcatcgaccccaagaaggccatggccatgaagaaggaccctgtgaagaagatctttgtgggcggcctgaaccctgaggccacagaggagaagatccgggagtactttggagaatttggagaaattgaggccatcgagctgcccatggaccccaagctgaacaagaggcggggctttgtgttcatcaccttcaaggaggaggagcctgtgaagaaggtgctggagaagaagttccacacagtgtctggcagcaaatgtgagatcaaggtggcccagcccaaggaggtgtaccagcagcagcagtatggcagcggcggccggggcaacagaaacagaggcaacagaggcagcggcggcggcggcggcggcggcggccagggcagcaccaactacggcaagagccagaggcggggcggccaccagaacaactacaagccctactag

SEQ ID NO: 19434 - DNA, 1212 bp, synthetic construct; identical to SEQ ID NO: 18994
  source 1..1212: mol_type = other DNA; note = Synthetic coding sequence

SEQ ID NO: 19435 - DNA, 1347 bp, synthetic construct
  source 1..1347: mol_type = other DNA; note = Synthetic coding sequence
atggccacagacagctgggccctggccgtggatgagcaggaggccgctgctgagagcctgagcaacctgcacctgaaggaggagaagatcaagccagacaccaatggagctgtggtgaagaccaatgccaatgctgagaagacagatgaggaggagaaggaggacagagctgcccagagcctgctgaacaagctgatccgcagcaacctggtggacaacaccaaccaggtggaggtgctgcagagggaccccaacagccccctgtacagcgtgaagagctttgaggagctgcggctgccccagaacctgattgcccagagccagagcggcaccgggaagacagctgcctttgtgctggccatgctgagccaggtggagcccgccaacaagtacccccagtgcctgtgcctgagccccacctatgagctggccctgcagacaggcaaggtgattgagcagatgggcaagttctacccagagctgaagctggcctatgctgtgcggggcaacaagctggagcggggccagaagatcagcgagcagatcgtcatcggcaccccaggcaccgtgctggactggtgcagcaagctgaagttcatcgaccccaagaagatcaaggtgtttgtgctggatgaagcagatgtgatgattgccacccagggccaccaggaccagagcatccgcatccagaggatgctgcccaggaactgccagatgctgctcttcagcgccacctttgaagattctgtgtggaagtttgcccagaaggtggtgcctgaccccaacgtcatcaagctgaagcgggaggaggagaccctggacaccatcaagcagtactacgtgctgtgcagcagcagagatgagaagttccaggccctgtgcaacctgtatggagccatcaccatcgcccaggccatgatcttctgccacaccaggaagacagcctcctggctggccgctgagctgagcaaggagggccaccaggtggccctgctgtctggagagatgatggtggagcagagagctgctgtgattgagcgcttccgggagggcaaggagaaggtgctggtgaccaccaacgtgtgtgcccggggcattgatgtggagcaggtgtctgtggtgatcaactttgacctgcctgtggacaaggatggcaacccagacaatgagacctacctgcaccgcatcggccgcacaggccgctttgggaagaggggcctggccgtgaacatggtggacagcaagcacagcatgaacatcctgaaccgcatccaggagcacttcaacaagaagattgaaaggctggacacagatgacctggatgaaattgagaagatcgccaactag

SEQ ID NO: 19436 - DNA, 1248 bp, synthetic construct; identical to SEQ ID NO: 19216
  source 1..1248: mol_type = other DNA; note = Synthetic coding sequence

SEQ ID NO: 19437 - DNA, 1026 bp, synthetic construct
  source 1..1026: mol_type = other DNA; note = Synthetic coding sequence
atggcccaggagagccccaagaacagcgctgctgagatccctgtgaccagcaatggagaggtggatgacagccgggagcacagcttcaacagagacctgaagcacagcctgcccagcggcctgggcctgtctgagacccagatcaccagccacggctttgacaacaccaaggagggcgtgattgaagctggggccttccagggcggccagaggacccagaccaagagcggccctgtgatcctggctgatgagatcaagaacccagccatggagaagctggagctggtgaggaagtggagcctgaacacctacaagtgcacccggcagatcatcagcgagaagctgggccggggcagcaggacagtggacctggagctggaggcccagattgacatcctgcgggacaacaagaagaagtatgagaacatcctgaagctggcccagaccctgagcacccagctgttccagatggtgcacacccagaggcagctgggagatgcctttgctgacctgagcctgaagagcctggagctgcacgaggagtttggctacaatgctgacacccagaagctgctggccaagaatggagagaccctgctgggcgccatcaacttcttcatcgcctctgtgaacaccctggtgaacaagaccatcgaggacaccctgatgacagtgaagcagtatgagagcgccagaattgaatatgatgcctacagaacagacctggaggagctgaacctgggccccagagatgccaacaccctgcccaagattgagcagagccagcacctgttccaggcccacaaggagaagtatgacaagatgagaaatgatgtgtctgtgaagctgaagttcctggaggagaacaaggtgaaggtgctgcacaaccagctggtgctcttccacaatgccatcgccgcctactttgctggcaaccagaagcagctggagcagaccctgaagcagttccacatcaagctgaagaccccaggagtggatgcccccagctggctggaggagcagtag

SEQ ID NO: 19438 - DNA, 1572 bp, synthetic construct
  source 1..1572: mol_type = other DNA; note = Synthetic coding sequence
atggccaacgtgggcctgcagttccaggccagcgctggggacagcgacccccagagccggcccctgctgctgctgggccagctgcaccacctgcaccgggtgccctggagccacgtgcggggcaagctgcagccccgggtgacagaggagctgtggcaggccgccctgagcaccctgaaccccaaccccacagacagctgccccctgtacctgaactatgccaccgtggccgccctgccctgccgggtgagccgccacaacagccccagcgctgcccacttcatcacccggctggtgaggacctgcctgcccccaggggcccaccgctgcatcgtgatggtgtgtgagcagcctgaggtgtttgccagcgcctgtgccctggcccgggccttccccctcttcacccacaggtctggggccagccggcggctggagaagaagacagtgacagtggagttcttcctggtgggccaggacaatggacctgtggaggtgtccaccctgcagtgcctggccaatgccacagatggagtgcggctggccgcccgcatcgtggacaccccctgcaatgagatgaacacagacaccttcctggaggagatcaacaaggtgggcaaggagctgggcatcatccccaccatcatcagagatgaggagctgaagacccggggctttggaggcatctatggagtgggcaaggccgccctgcaccccccagccctggccgtgctgagccacaccccagatggagccacccagaccatcgcctgggtgggcaagggcatcgtgtatgacaccggcggcctgagcatcaagggcaagaccaccatgcctggcatgaagagggactgtggcggcgctgctgctgtgctgggcgccttccgggccgccatcaagcagggcttcaaggacaacctgcatgctgtgttctgcctggccgagaacagcgtgggccccaatgccaccaggccagatgacatccacctgctgtacagcggcaagacagtggagatcaacaacacagatgctgagggccgcctggtgctggctgatggagtgtcctatgcctgcaaggacctgggcgctgacatcatcctggacatggccaccctgaccggggcccagggcatcgccaccgggaagtaccacgccgctgtgctgaccaacagcgctgagtgggaggccgcctgtgtgaaggccggcaggaaatgtggggacctggtgcaccccctggtgtactgcccagagctgcacttcagcgagttcaccagcgctgtggccgacatgaagaacagcgtggccgaccgggacaacagccccagcagctgtgccggcctcttcatcgccagccacatcggctttgactggccaggagtgtgggtgcacctggacattgctgcccctgtgcatgctggggagcgggccaccggcttcggcgtggccctgctgctggccctgtttggccgggccagcgaggaccccctgctgaacctggtgagccccctgggctgtgaggtggatgtggaggagggggacctgggccgggacagcaagagaagaaggctggtgtag

SEQ ID NO: 19439 - DNA, 1371 bp, synthetic construct
  source 1..1371: mol_type = other DNA; note = Synthetic coding sequence
atggctgatggcggcagcgagcgggcagatggaagaattgtgaagatggaggtggactacagcgccaccgtggaccagaggctgcctgaatgtgccaagctggccaaggagggccgcctgcaggaggtgattgagaccctgctgagcctggagaagcagaccaggacagccagtgacatggtgtccaccagccgcatcctggtggccgtggtgaagatgtgctatgaggccaaggagtgggacctgctgaatgaaaacatcatgctgctgagcaagagaagaagccagctgaagcaggccgtggccaagatggtgcagcagtgctgcacctacgtggaggagatcacagacctgcccatcaagctgcggctgattgacaccctgaggatggtgacagagggcaagatctacgtggagattgaaagagcccggctgaccaagaccctggccaccatcaaggagcagaatggagatgtgaaggaggccgccagcatcctgcaggagctgcaggtggagacctacggctccatggagaagaaggagcgggtggagttcatcctggagcagatgaggctgtgcctggccgtgaaggactacatccgcacccagatcatcagcaagaagatcaacaccaagttcttccaggaggagaacacagagaagctgaagctgaagtactacaacctgatgatccagctggaccagcacgagggcagctacctgagcatctgcaagcactaccgggccatctatgacaccccctgcatccaggccgagagcgagaagtggcagcaggccctgaagtctgtggtgctgtatgtgatcctggccccctttgacaatgagcagagcgacctggtgcaccgcatcagcggggacaagaagctggaggagatccccaagtacaaggacctgctgaagctgttcaccaccatggagctgatgcgctggagcaccctggtggaggactatggcatggagctgaggaagggcagcctggagagccctgccacagatgtgtttggcagcacagaggagggggagaagcgctggaaggacctgaagaacagagtggtggagcacaacatccgcatcatggccaagtactacacccgcatcaccatgaagaggatggcccagctgctggacctgtctgtggatgaaagtgaggccttcctgagcaacctggtggtgaacaagaccatctttgccaaggtggaccggctggccggcatcatcaacttccagaggcccaaggaccccaacaacctgctgaatgactggagccagaagctgaacagcctgatgagcctggtgaacaagaccacccacctgattgccaaggaggagatgatccacaacctgcagtag

SEQ ID NO: 19440 - DNA, 1011 bp, synthetic construct
  source 1..1011: mol_type = other DNA; note = Synthetic coding sequence
atgaagattgacatccacagccacatcctgcccaaggagtggccagacctgaagaagagatttggctatggaggctgggtgcagctgcagcaccacagcaagggggaggccaagctgctgaaggatggcaaggtgttccgggtggtgcgggagaactgctgggaccctgaggtgcgcatccgggagatggaccagaagggcgtgacagtgcaggccctgagcacagtgcctgtgatgttctcctactgggccaagccagaggacaccctgaacctgtgccagctgctgaacaatgacctggccagcacagtggtgtcctaccccaggagatttgtgggcctgggcaccctgcccatgcaggcccctgagctggccgtgaaggagatggagcgctgtgtgaaggagctgggcttccctggggtgcagatcggcacccacgtgaatgagtgggacctgaatgcccaggagctgtttcctgtgtatgctgctgctgagcggctgaagtgcagcctgtttgtgcacccctgggacatgcagatggatggccgcatggccaagtactggctgccctggctggtgggcatgcctgctgagaccaccatcgccatctgcagcatgatcatgggcggcgtgtttgagaagttccccaagctgaaggtgtgctttgcccacggcggcggggccttccccttcaccgtgggccgcatcagccacggcttctccatgaggccagacctgtgtgcccaggacaaccccatgaaccccaagaagtacctgggcagcttctacacagatgccctggtgcatgaccccctgagcctgaagctgctgacagatgtgattggcaaggacaaggtgatcctgggcacagactaccccttccccctgggggagctggagcccgggaagctgattgaatccatggaggagtttgatgaggagaccaagaacaagctgaaggctggaaatgccctggccttcctgggcctggagaggaagcagtttgaatag

SEQ ID NO: 19441 - DNA, 1617 bp, synthetic construct
  source 1..1617: mol_type = other DNA; note = Synthetic coding sequence
atggagctgagctaccagaccctgaagttcacccaccaggcccgggaggcctgtgagatgaggacagaggcccggaggaagaacctgctgatcctgatcagccactacctgacccaggagggctacatcgacacagccaatgccctggagcaggagaccaagctgggcctgcggagatttgaggtgtgtgacaacatcgacctggagaccatcctgatggagtatgagagctactactttgtgaagttccagaagtaccccaagatcgtgaagaagagcagtgacacagctgagaacaacctgccccagaggagccggggcaagaccaggaggatgatgaatgacagctgccagaacctgcccaagatcaaccagcagaggcccaggagcaagaccacagctgggaagacaggagacaccaagagcctgaacaaggagcaccccaaccaggaggtggtggacaacacccggctggagagcgccaactttggcctgcacatcagccgcatcaggaaggacagcggggaggagaatgcccacccccggcggggccagatcatcgacttccagggcctgctgacagatgccatcaagggggccaccagcgagctggccctgaacacctttgaccacaacccagaccccagcgagcggctgctgaagcccctgagcgccttcatcggcatgaacagcgagatgagggagctggccgctgtggtgtcccgggacatctacctgcacaaccccaacatcaagtggaatgacatcatcggcctggatgctgccaagcagctggtgaaggaggccgtggtgtaccccatccgctacccccagctgttcaccggcatcctgagcccctggaagggcctgctgctgtatggccccccaggcaccgggaagaccctgctggccaaggctgtggccacagagtgcaagaccaccttcttcaacatcagcgccagcaccatcgtgtccaagtggaggggggacagcgagaagctggtgcgggtgctgtttgagctggcccgctaccacgcccccagcaccatcttcctggatgagctggagagcgtgatgagccagaggggcacagccagcggcggggagcacgagggcagcctgaggatgaagacagagctgctggtgcagatggatggcctggcccggtctgaggacctggtgtttgtgctggccgccagcaacctgccctgggagctggactgtgccatgctgcggcggctggagaagaggatcctggtggacctgcccagccgggaggcccggcaggccatgatctaccactggctgccccctgtgtccaagagccgggccctggagctgcacacagagctggagtacagcgtgctgagccaggagacagagggctacagcggcagtgacatcaagctggtgtgccgggaggccgccatgaggcctgtgaggaagatctttgatgccctggagaaccaccagagcgagagcagtgacctgccccgcatccagctggacatcgtgaccacagctgacttcctggatgtgctgacccacaccaagcccagcgccaagaacctggcccagcgctacagcgactggcagcgggagtttgaatctgtgtag

SEQ ID NO: 19442 - DNA, 507 bp, synthetic construct; identical to SEQ ID NO: 18866
  source 1..507: mol_type = other DNA; note = Synthetic coding sequence

SEQ ID NO: 19443 - DNA, 1764 bp, synthetic construct
  source 1..1764: mol_type = other DNA; note = Synthetic coding sequence
atggccagcgaggacatcgccaagctggccgagaccctggccaagacccaggtggccggcggccagctgtccttcaagggcaagagcctgaagctgaacacagcagaagatgccaaggatgtgatcaaggagattgaggactttgacagcctggaggccctgcggctggagggcaacacagtgggcgtggaggccgcccgggtgattgccaaggccctggagaagaagtctgagctgaagcgctgccactggagcgacatgttcaccggccgcctgaggacagagatccccccagccctgatcagcctgggggagggcctcatcacagctggggcccagctggtggagctggacctgagtgacaatgccttcggcccagatggagtgcagggctttgaggccctgctgaagagcagcgcctgcttcaccctgcaggagctgaagctgaacaactgtggcatgggcatcggcggcggcaagatcctggccgccgccctgacagagtgccacaggaagagcagcgcccagggcaagcccctggccctgaaggtgtttgtggccggcaggaaccggctggagaatgatggagccacagccctggccgaggccttccgggtgattggcaccctggaggaggtgcacatgccccagaatggcatcaaccaccctggcatcacagccctggcccaggcctttgctgtgaaccccctgctgcgggtcatcaacctgaatgacaacaccttcacagagaagggagctgtggccatggccgagaccctgaagaccctgcggcaggtggaggtgatcaactttggagactgcctggtgcgcagcaaaggagctgtggccatcgcagatgccatccggggcggcctgcccaagctgaaggagctgaacctgtccttctgtgagatcaagagagatgctgccctggccgtggccgaggccatggctgacaaggccgagctggagaagctggacctgaatggaaacaccctgggggaggagggctgtgagcagctgcaggaggtgctggagggcttcaacatggccaaggtgctggccagcctgagtgatgatgaagatgaggaggaggaggaggagggggaggaggaggaggaggaggccgaggaggaggaggaggaggatgaggaggaggaggaggaggaggaggaggaggaggaggaggagccccagcagaggggccagggcgagaagagcgccacccccagcaggaagatcctggaccccaacacaggagagcccgcccctgtgctgagcagccccccaccagcagatgtgtccaccttcctggccttccccagccctgagaagctgctgcggctgggccccaagagctctgtgctgattgcccagcagacagacaccagtgaccctgagaaggtggtgtctgccttcctgaaggtgagcagcgtcttcaaggatgaggccaccgtgaggatggctgtgcaggatgctgtggatgccctgatgcagaaggccttcaacagcagcagcttcaacagcaacaccttcctgacccggctgctggtgcacatgggcctgctgaagtctgaggacaaggtgaaggccatcgccaacctgtatggccccctgatggccctgaaccacatggtgcagcaggactacttccccaaggccctggcccccctgctgctggcctttgtgaccaagcccaacagcgccctggagagctgcagctttgcccggcacagcctgctgcagaccctgtacaaggtgtag

SEQ ID NO: 19444 - DNA, 2529 bp, synthetic construct
  source 1..2529: mol_type = other DNA; note = Synthetic coding sequence
atggacatcagcaagggcctgcccggcatgcagggcggcctgcacatctggatcagcgagaacaggaagatggtgcctgtgcctgagggcgcctacggcaacttctttgaggagcactgctacgtgatcctgcacgtgccccagagccccaaggccacccagggcgccagcagtgacctgcactactgggtgggcaagcaggccggggctgaggcccagggcgctgctgaggccttccagcagaggctgcaggatgagctgggcggccagacagtgctgcaccgggaggcccagggccacgagagtgactgcttctgcagctacttccggcccggcatcatctacagaaaaggaggcctggccagtgacctgaagcacgtggagaccaacctcttcaacatccagaggctgctgcacatcaagggcaggaagcacgtgtctgccacagaggtggagctgtcctggaacagcttcaacaagggggacatcttcctgctggacctgggcaagatgatgatccagtggaatggccccaagaccagcatcagcgagaaggcccggggcctggccctgacctacagcctgcgggaccgggagcggggcggcggccgggcccagattggagtggtggatgatgaggccaaggccccagacctgatgcagatcatggaggccgtgctgggcagaagagtgggcagcctgcgggccgccacccccagcaaggacatcaaccagctgcagaaggccaacgtgcggctgtaccacgtgtatgagaagggcaaggacctgctgcaggaggaggacttctacatcctggaccagggcggcttcaagatctacgtgtggcagggccgcatgagcagcctgcaggagaggaaggccgccttcagcagagctgtgggcttcatccaggccaagggctaccccacctacaccaacgtggaggtggtgaatgatggagctgagagcgctgccttcaagcagctgttccgcacctggagcgagaagagaagaagaaaccagaagctgggcggccgggacaagagcatccacgtgaagctggatgtgggcaagctgcacacccagcccaagctggccgcccagctgaggatggtggatgatggcagcggcaaggtggaggtgtggtgcatccaggacctgcaccggcagcctgtggaccccaagagacatggccagctgtgtgccggcaactgctacctggtgctgtacacctaccagaggctgggccgggtgcagtacatcctgtacctgtggcagggccaccaggccacagcagatgaaattgaggccctgaacagcaatgctgaggagctggatgtgatgtatggaggagtgctggtgcaggagcacgtgaccatgggcagcgagcccccccacttcctggccatcttccagggccagctggtgatcttccaggagcgggccggccaccacggcaagggccagagcgccagcaccaccaggctcttccaggtgcagggcacagacagccacaacaccaggaccatggaggtgcctgcccgggccagcagcctgaacagcagtgacatcttcctgctggtgacagcctctgtgtgctacctgtggtttgggaagggctgcaatggagaccagcgggagatggcccgggtggtggtgaccgtcatcagcaggaagaatgaggagaccgtgctggagggccaggagcccccccacttctgggaggccctgggcggccgggccccctaccccagcaacaagaggctgcctgaggaggtgcccagcttccagccccggctgtttgagtgcagcagccacatgggctgcctggtgctggccgaggtgggcttcttcagccaggaggacctggacaagtatgacatcatgctgctggacacctggcaggagatcttcctgtggctgggggaggccgccagcgagtggaaggaggccgtggcctggggccaggagtacctgaagacccaccctgctggccgcagccctgccacccccatcgtgctggtgaagcagggccacgagccccccaccttcatcggctggttcttcacctgggacccctacaagtggaccagccaccccagccacaaggaggtggtggatggcagccctgctgctgccagcaccatcagcgagatcacagctgaggtgaacaacctgcggctgagccgctggccaggaaatggccgggccggggctgtggccctgcaggccctgaagggcagccaggacagcagtgaaaatgacctggtgcgcagccccaagtctgctggcagcaggaccagcagctctgtgagcagcaccagcgccaccatcaatggaggcctgcggcgggagcagctgatgcaccaggccgtggaggacctgcctgagggcgtggaccctgcccggcgggagttctacctgagtgacagcgacttccaggacatctttgggaagagcaaggaggagttctacagcatggccacctggaggcagaggcaggagaagaagcagctgggcttcttctag

SEQ ID NO: 19445 - DNA, 1620 bp, synthetic construct
  source 1..1620: mol_type = other DNA; note = Synthetic coding sequence
atggatgccatggccagccctgggaaggacaactacaggatgaagagctacaagaacaaggccctgaacccccaggagatgagaagaagaagagaggaggagggcatccagctgaggaagcagaagcgggaggagcagctgttcaagagaagaaatgtgtacctgcccagaaatgatgagagcatgctggagagccccatccaggaccctgacatcagcagcacagtgcccatccctgaggaggaggtggtgaccacagacatggtgcagatgatcttcagcaacaatgctgaccagcagctgacagccacccagaagttcaggaagctgctgagcaaggagcccaacccccccatcgaccaggtgatccagaagccaggagtggtgcagagatttgtgaagttcctggagagaaatgaaaactgcaccctgcagtttgaggccgcctgggccctgaccaacatcgccagcggcaccttcctgcacaccaaggtggtgattgaaacaggagctgtgcccatcttcatcaagctgctgaacagcgagcatgaagatgtgcaggagcaggccgtgtgggccctgggcaacattgctggggacaatgcagaatgtcgggactttgtgctgaactgtgagatcctgccccccctgctggagctgctgaccaacagcaaccggctgaccaccaccagaaatgctgtgtgggccctgagcaacctgtgccggggcaagaaccccccacccaacttcagcaaggtgagcccctgcctgaatgtgctgagccggctgctcttcagcagtgaccctgatgtgctggctgatgtgtgctgggccctgagctacctgagtgatggccccaatgacaagatccaggccgtcatcgacagcggcgtgtgccggcggctggtggagctgctgatgcacaatgactacaaggtggtgtccccagccctgcgggctgtgggcaacatcgtgactggagatgacatccagacccaggtgatcctgaactgcagcgccctgccctgcctgctgcacctgctgagcagccccaaggagagcatcaggaaggaggcctgctggacagtgagcaacatcacagctggcaacagagcccagatccaggccgtgattgatgccaacatcttccctgtgctgattgagatcctgcagaaggccgagttccgcaccaggaaggaggccgcctgggccatcaccaatgccaccagcggcggcaccccagagcagatccgctacctggtggccctgggctgcatcaagcccctgtgtgacctgctgactgtgatggacagcaagatcgtgcaggtggccctgaatggcctggagaacatcctgcggctgggggagcaggagagcaagcagaatggcatcggcatcaacccctactgtgccctgattgaggaggcctacggcctggacaagattgagttcctgcagagccatgagaaccaggagatctaccagaaggcctttgacctgattgagcactactttggagtggaggaggatgaccccagcatcgtgccccaggtggatgagaaccagcagcagttcatcttccagcagcaggaggcccccatggatggcttccagctgtag

SEQ ID NO: 19446 - DNA, 3735 bp, synthetic construct
  source 1..3735: mol_type = other DNA; note = Synthetic coding sequence
atgctgatcaaggagtaccacatcctgctgcccatgagcctggatgagtaccaggtggcccagctgtacatgatccagaagaagagccgggaggagagcagcggggagggcagcggcgtggagatcctggccaaccggccctacacagatggccctgggggcagcggccagtacacccacaaggtgtaccacgtgggcagccacatccctggctggttccgggccctgctgcccaaggccgccctgcaggtggaggaggagagctggaatgcctacccctacaccaggacccgctacacctgcccctttgtggagaagttcagcattgaaattgagacctactacctgcctgatggcggccagcagcccaacgtgttcaacctgtctggagctgagcggcggcagaggatcctggacaccattgatattgtgagagatgctgtggcccctggagagtacaaggccgaggaggacccccggctgtaccacagcgtgaagacaggccggggccccctgagtgatgactgggccaggacagctgcccagacaggccccctgatgtgtgcctacaagctgtgcaaggtggagttccgctactggggcatgcaggccaagattgagcagttcatccatgatgtgggcctgcggcgggtgatgctgcgggcccaccggcaggcctggtgctggcaggatgagtggacagagctgtccatggctgacatccgggccctggaggaggagacagccaggatgctggcccagaggatggccaagtgcaacacaggcagcgagggcagcgaggcccagcccccaggcaagcccagcacagaggcccggtctgctgccagcaacacaggcaccccagatggccctgaggcccctcctggcccagatgccagcccagatgccagctttgggaagcagtggagcagcagcagccgcagcagctacagcagccagcacggcggcgctgtgagcccccagagcctgtctgagtggaggatgcagaacatcgcccgggacagcgagaacagcagcgaggaggagttctttgatgcccacgagggcttcagtgacagcgaggaggtgttccccaaggagatgaccaagtggaacagcaatgacttcattgatgcctttgccagccctgtggaggccgagggcaccccagagcccggggctgaggccgccaagggcattgaagatggagcccaggccccccgggacagcgagggcctggatggagctggggagctgggcgctgaggcctgtgctgtgcacgccctcttcctgatcctgcacagcggcaacatcctggacagcggccctggagatgccaacagcaagcaggctgatgtgcagaccctgagcagcgcctttgaggccgtgacccgcatccacttccctgaggccctgggccacgtggccctgcggctggtgccctgcccccccatctgtgccgccgcctatgccctggtgagcaacctgagcccctacagccatgatggagacagcctgagccgcagccaggaccacatccccctggccgccctgcccctgctggccaccagcagcagccgctaccagggcgctgtggccaccgtcatcgcccggaccaaccaggcctacagcgccttcctgcggagccctgagggcgccggcttctgtggccaggtggccctgattggagatggagtgggcggcatcctgggctttgatgccctgtgccacagcgccaatgccggcaccggcagccggggcagcagccggcggggctccatgaacaatgagctgctgagccctgagtttggacctgtgcgggaccccctggctgatggagtggagggcctgggccggggcagccctgagcccagcgccctgcccccccagaggatccccagcgacatggccagccctgagcctgagggcagccagaacagcctgcaggccgccccagccaccaccagctcctgggagccccggcgggccagcacagccttctgccccccagctgccagcagcgaggccccagatggccccagcagcacagcccggctggacttcaaggtgtctggcttcttcctgtttggcagccccctgggcctggtgctggccctgaggaagacagtgatgcctgccctggaggccgcccagatgaggcctgcctgtgagcagatctacaacctcttccacgccgctgacccctgtgccagccggctggagcccctgctggcccccaagttccaggccatcgcccccctgactgtgccccgctaccagaagttccccctgggagatggcagcagcctgctgctggccgacaccctgcagacccacagcagcctcttcctggaggagctggagatgctggtgcccagcacccccaccagcaccagcggggccttctggaagggcagcgagctggccacagaccccccagcccagcctgctgcccccagcaccaccagcgaggtggtgaagatcctggagcgctggtggggcaccaagagaattgactacagcctgtactgcccagaggccctgacagccttccccaccgtgaccctgccccacctgttccacgccagctactgggagagcgcagatgtggtggccttcatcctgcggcaggtgattgagaaggagcggccccagctggccgagtgtgaggagcccagcatctacagccctgccttcccccgggagaagtggcagaggaagaggacccaggtgaagatcagaaatgtgaccagcaaccaccgggccagtgacacagtggtgtgtgagggccggccccaggtgctgagcggccgcttcatgtatggccccctggatgtggtgaccctgaccggggagaaggtggatgtgtacatcatgacccagcccctgagcggcaagtggatccacttcggcacagaggtgaccaacagcagcggccgcctgaccttccctgtgcccccagagcgggccctgggcattggagtgtaccctgtgaggatggtggtgcggggggaccacacctatgcagagtgctgcctgactgtggtggcccggggcacagaggccgtggtgttcagcattgatggcagcttcaccgcctctgtgtccatcatgggcagtgaccccaaggtgcgggccggggctgtggatgtggtgcgccactggcaggacagcggctacctgattgtgtatgtgacaggccgcccagacatgcagaagcaccgggtggtggcctggctgagccagcacaacttcccccatggagtggtgtccttctgtgatggcctgacccatgaccccctgcggcagaaggccatgttcctgcagagcctggtgcaggaggtggagctgaacatcgtggccggctacggcagccccaaggatgtggccgtgtatgctgccctgggcctgagccccagccagacctacatcgtgggccgggctgtgaggaagctgcaggcccagtgccagttcctgagtgatggctacgtggcccacctgggccagctggaggccggcagccacagccacgccagcagcggcccccccagggctgccctgggcaagagcagctatggagtggccgcccctgtggacttcctgaggaagcagagccagctgctgcggagccggggccccagccaggccgagcgggagggccctggcaccccacccaccaccctggcccggggcaaggcccggagcatcagcctgaagctggacagcgaggagtag

SEQ ID NO: 19447 - DNA, 882 bp, synthetic construct
  source 1..882: mol_type = other DNA; note = Synthetic coding sequence
atgacagaggacagccagaggaacttccgctctgtgtactatgagaaggtgggcttccggggcgtggaggagaagaagagcctggagatcctgctgaaggatgaccggctggacacagagaagctgtgcaccttcagccagcgcttccccctgcccagcatgtaccgggccctggtgtggaaggtgctgctgggcatcctgcccccccaccacgagagccacgccaaggtgatgatgtacaggaaggagcagtacctggatgtgctgcacgccctgaaggtggtgcgctttgtgtctgatgccaccccccaggccgaggtgtacctgaggatgtaccagctggagagcggcaagctgcccaggagccccagcttccccctggagccagatgatgaggtgttcctggccatcgccaaggccatggaggagatggtggaggacagcgtggactgctactggatcaccaggagatttgtgaaccagctgaacaccaagtacagagacagcctgccccagctgcccaaggcctttgagcagtacctgaacctggaggatggccgcctgctgacccacctgaggatgtgcagcgctgcccccaagctgccctatgacctgtggttcaagcgctgctttgctggctgcctgcctgagagcagcctgcagagggtgtgggacaaggtggtgtctggcagctgcaagatcctggtgtttgtggccgtggagatcctgctgaccttcaagatcaaggtgatggccctgaacagcgctgagaagatcaccaagttcctggagaacatcccccaggacagcagtgatgccatcgtgtccaaggccatcgacctgtggcacaagcactgcggcacccctgtgcacagcagctag

SEQ ID NO: 19448 - DNA, 249 bp, synthetic construct
  source 1..249: mol_type = other DNA; note = Synthetic coding sequence
atgtctgagggggagagccagacagtgctgagcagcggcagtgaccccaaggtggagagcagcagcagcgcccctggcctgacctctgtgagcccccctgtgaccagcaccaccagcgctgccagccctgaggaggaggaggagagtgaagatgaaagtgagatcctggaggagagcccctgtggccgctggcagaagagaagagaggaggtgaaccagagaaatgtgcccggcattgattctgcctag

SEQ ID NO: 19449 - DNA, 5058 bp, synthetic construct
  source 1..5058: mol_type = other DNA; note = Synthetic coding sequence
atgagcctgcccttctaccagcgctgccaccagcactatgacctgagctacagaaacaaggatgtgcgcagcacagtgagccactaccagcgggagaagaagaggtctgctgtgtacacccagggcagcacagcctacagcagccgcagcagcgctgcccacagaagagagagcgaggccttccggcgggccagcgccagcagcagccagcagcaggccagccagcacgccctgagcagcgaggtgtccaggaaggccgccagcgcctatgactatggcagcagccacggcctgacagacagcagcctgctgctggatgactacagcagcaagctgagccccaagcccaagagggccaagcacagcctgctgtctggagaggagaaggagaacctgcccagcgactacatggtgcccatcttcagcggccggcagaagcacgtgtctggcatcacagacacagaggaggagcgcatcaaggaggccgccgcctacatcgcccagaggaacctgctggccagcgaggagggcatcaccaccagcaagcagagcacagccagcaagcagaccacagccagcaagcagagcacagccagcaagcagagcacagccagcaagcagagcacagccagccggcagagcacagccagccggcagagcgtggtgtccaagcaggccaccagcgccctgcagcaggaggagaccagcgagaagaagagcaggaaggtggtgatccgggagaaggccgagcggctgagcctgaggaagaccctggaggagacagagacctaccacgccaagctgaatgaagaccacctgctgcacgcccctgagttcatcatcaagcccaggagccacacagtgtgggagaaggaaaatgtgaagctgcactgcagcattgctggctggccagagccccgggtgacctggtacaagaaccaggtgcccatcaacgtgcacgccaaccctgggaagtacatcatcgagagccgctatggcatgcacaccctggagatcaatggctgtgactttgaggacacagcccagtaccgggccagcgccatgaatgtgaagggggagctgagcgcctatgcctctgtggtggtgaagcgctacaagggggagtttgatgagacccgcttccacgccggggccagcaccatgcccctgagctttggagtgaccccctacggctacgccagcagatttgagatccactttgatgacaagtttgatgtgtcctttggccgggagggggagaccatgagcctgggctgccgggtggtgatcaccccagagatcaagcacttccagcctgagatccagtggtacagaaatggagtgcccctgagccccagcaagtgggtgcagaccctgtggagcggggagcgggccaccctgaccttcagccacctgaacaaggaggatgagggcctgtacaccatccgggtgaggatgggagagtactatgagcagtacagcgcctacgtgtttgtgagagatgctgatgctgagattgagggcgccccagctgcccccctggatgtgaagtgcctggaggccaacaaggactacatcatcatctcctggaagcagcctgctgtggatggcggcagccccatcctgggctacttcatcgacaagtgtgaggtgggcacagacagctggagccagtgcaatgacacccctgtgaagtttgcccgcttccctgtgacaggcctgattgagggccgcagctacatcttccgggtgcgggctgtgaacaagatgggcatcggcttccccagccgggtgtctgagcctgtggccgccctggaccctgctgagaaggcccggctgaagagccggcccagcgccccctggacaggccagatcatcgtgacagaggaggagcccagcgagggcatcgtgcccggccccccaacagacctgtctgtgacagaggccaccaggagctatgtggtgctgtcctggaagcccccaggccagaggggccacgagggcatcatgtactttgtggagaagtgtgaggccggcacagagaactggcagagggtgaacacagagctgcctgtgaagagccccaggtttgccctgtttgacctggccgagggcaagagctactgcttccgggtgcgctgcagcaacagcgctggggtgggggagcccagcgaggccacagaggtgacagtggtgggggacaagctggacatccccaaggcccctgggaagatcatccccagcaggaacacagacacctctgtggtggtgtcctgggaggagagcaaggatgccaaggagctggtgggctactacatcgaggcctctgtggccggcagcggcaagtgggagccctgcaacaacaaccctgtgaagggcagccgcttcacctgccacggcctggtgacaggccagagctacatcttccgggtgcgggctgtgaatgctgctggcctgtctgagtacagccaggacagcgaggccatcgaggtgaaggccgccatcggcggcggcgtgtccccagatgtgtgcccagccctgagtgatgagcccggcggcctgacagccagccggggccgggtgcatgaggccagcccccccaccttccagaaggatgccctgctgggcagcaagcccaacaagcccagcctgcccagcagcagccagaacctgggccagacagaggtgtccaaggtgtctgagaccgtgcaggaggagctgaccccaccaccccagaaggccgccccccagggcaagagcaagagtgaccccctgaagaagaagacagaccgggccccacccagccccccctgtgacatcacctgcctggagagcttccgggacagcatggtgctgggctggaagcagcctgacaagattggaggagctgagatcaccggctactacgtgaactaccgggaggtgattgatggagtgcctgggaagtggagggaggccaacgtgaaggctgtgtctgaggaggcctacaagatcagcaacctgaaggagaacatggtgtaccagttccaggtggccgccatgaacatggccggcctgggcgcccccagcgctgtgtctgagtgcttcaagtgtgaggagtggaccatcgctgtgcccggccccccccacagcctgaagtgcagcgaggtgaggaaggacagcctggtgctgcagtggaagccccctgtgcacagcggccgcacccctgtgacaggctactttgtggacctgaaggaggccaaggccaaggaggaccagtggaggggcctgaatgaagctgccatcaagaatgtgtacctgaaggtgcggggcctgaaggagggcgtgtcctatgtgttccgggtgcgggccatcaaccaggccggcgtgggcaagcccagcgacctggccggccctgtggtggccgagaccaggcctggcaccaaggaggtggtggtgaatgtggatgatgatggagtcatcagcctgaactttgaatgtgacaagatgacccccaagtctgagttctcctggagcaaggactatgtgtccacagaggacagcccccggctggaggtggagagcaaaggaaacaagaccaagatgaccttcaaggacctgggcatggatgacctgggcatctacagctgtgatgtgacagacacagatggcatcgccagcagctacctgattgatgaggaggagctgaagaggctgctggccctgagccatgagcacaagttccccaccgtgcctgtgaagtctgagctggccgtggagatcctggagaagggccaggtgcgcttctggatgcaggccgagaagctgtctggaaatgccaaggtgaactacatcttcaatgagaaggagatctttgagggccccaagtacaagatgcacatcgacaggaacacaggcatcatcgagatgttcatggagaagctgcaggatgaagatgagggcacctacaccttccagctgcaggacggcaaggccaccaaccacagcacagtggtgctggtgggagatgtgttcaagaagctgcagaaggaggccgagttccagaggcaggagtggatcaggaagcagggcccccactttgtggagtacctgtcctgggaggtgactggagaatgtaatgtgctgctgaagtgcaaggtggccaacatcaagaaggagacccacatcgtgtggtacaaggatgagcgggagatctctgtggatgagaagcatgacttcaaggatggcatctgcaccctgctgatcacagagttcagcaagaaggatgctggcatctatgaggtgatcctgaaggatgaccggggcaaggacaagagccggctgaagctggtggatgaggccttcaaggagctgatgatggaggtgtgcaagaagatcgccctgagcgccacagacctgaagatccagagcacagctgagggcatccagctgtacagctttgtgacctactacgtggaggacctgaaggtgaactggagccacaatggaagtgccatccgctacagcgacagagtgaagacaggagtgactggagagcagatctggctgcagatcaatgagcccaccccaaatgacaagggcaagtatgtgatggagctgtttgatggcaagacaggccaccagaagacagtggacctgagcggccaggcctatgatgaggcctatgcagagttccagaggctgaagcaggccgccatcgccgagaagaacagagcccgggtgctgggcggcctgcctgatgtggtgaccatccaggagggcaaggccctgaacctgacctgcaatgtgtggggagaccccccacctgaggtgtcctggctgaagaatgagaaggccctggccagtgatgaccactgcaacctgaagtttgaagctggccgcacagcctacttcaccatcaacggggtgtccacagctgacagcggcaagtatggcctggtggtgaagaacaagtatggcagcgagaccagtgacttcaccgtgtctgtgttcatccctgaggaggaggccaggatggccgccctggagagcctgaagggcggcaagaaggccaagtag

SEQ ID NO: 19450 - DNA, 5877 bp, synthetic construct
  source 1..5877: mol_type = other DNA; note = Synthetic coding sequence
atggctgacagaacagccccccgctgccagctgcggctggagtgggtgtatggctaccggggccaccagtgcaggaacaacctgtactacacagctgggaaggaggtggtgtactttgtggccggcgtgggcgtggtgtacaacacccgggagcacagccagaagttcttcctgggccacaatgatgacatcatcagcctggccctgcacccagacaagaccctggtggccaccggccaggtgggcaaggagccctacatctgcatctgggacagctacaacgtgcagacagtgtccctgctgaaggatgtgcacacccatggagtggcctgcctggcctttgacagtgatggccagaggctggcctctgtgggcctggatgccaagaacacagtgtgcatctgggactggaggaagggcaagctgctggccagcgccaccggccacagcgaccgcatctttgacatctcctgggacccctaccagcccaacagagtggtgtcctgtggggtgaagcacatcaagttctggaccctgtgtggaaatgccctgacagccaagaggggcatctttgggaagacaggagacctgcagaccatcctgtgcctggcctgtgccaaggaggacatcacctacagcggggccctgaatggagacatctacgtgtggaagggcctgaacctggtgaggaccatccagggcgcccacagcgctggcatcttctccatgtatgcctgtgaggagggctttgccaccggcggcagagatggctgcatccggctgtgggacacagacttcaagcccatcaccaagattgacctgcgggagacagagcagggctacaagggcctgagcatccgctctgtgtgctggaaggctgaccggctgctggccggcacccaggacagcgagatctttgaggtgattgtgcgggagcgggacaagcccatgctgatcctgcagggccactgtgagggggagctgtgggccctggccctgcaccccaagaagcccctggccgtgacaggcagtgatgacagatctgtgcggctgtggagcctggccgaccacgccctgattgcccgctgcaacatggaggaggccgtgcgctctgtggccttctccccagatggcagccagctggccctgggcatgaaggatggcagcttcatcgtgctgcgggtgcgggacatgacagaggtggtgcacatcaaggacaggaaggaggtgatccacgagatgaagttctccccagatggcagctacctggccgtgggcagcaatgatggccctgtggatgtgtatgctgtggcccagcgctacaagaagatcggggagtgcagcaagagcctgtccttcatcacccacatcgactggagcctggacagcaagtacctgcagaccaatgatggagctggggagcggctcttctacaggatgcccagcggcaagcccctgaccagcaaggaggagatcaagggcatcccctgggcctcctggacctgtgtgaagggccctgaggtgtctggcatctggcccaagtacacagaggtgacagacatcaacagcgtggatgccaactacaacagctctgtgctggtgtctggagatgactttggcctggtgaagctgttcaagttcccctgcctgaagagaggagccaagttcagaaaatatgtgggccacagcgcccacgtgaccaacgtgcgctggagccatgacttccagtgggtgctgagcactggaggagctgaccacagcgtcttccagtggaggttcatccctgagggcgtgtccaatggcatgctggagacagccccccaggagggcggcgctgacagctacagcgaggagagtgacagcgacctgagtgatgtgcctgagctggacagcgacatcgagcaggaggcccagatcaactatgaccggcaggtgtacaaggaggacctgccccagctgaagcagcagagcaaggagaagaaccacgctgtgcccttcctgaagcgggagaaggcccctgaggacagcctgaagctgcagttcatccacggctaccggggctatgactgcaggaacaacctcttctacacccaggccggggaggtggtgtaccacatcgctgctgtggccgtggtgtacaaccggcagcagcacagccagaggctgtacctgggccatgatgatgacatcctgagcctgaccatccaccctgtgaaggactatgtggccaccggccaggtgggcagagatgctgccatccacgtgtgggacacccagaccctgaagtgcctgagcctgctgaagggccagcaccagaggggcgtgtgtgccctggacttcagcgcagatggcaagtgcctggtgtctgtgggcctggatgacttccacagcatcgtgttctgggactggaagaagggggagaagatcgccaccacccggggccacaaggacaagatctttgtggtgaagtgcaacccccaccacgtggacaagctggtgacagtgggcatcaagcacatcaagttctggcagcaggccggcggcggcttcaccagcaagaggggcacctttggatctgtgggcaagctggagaccatgatgtgtgtgtcctatggccgcatggaggacctggtgttcagcggggccgccaccggggacatcttcatctggaaggacatcctgctgctgaagacagtgaaggcccatgatggccctgtgtttgccatgtatgccctggacaagggctttgtgactggaggcaaggatggcatcgtggagctgtgggatgacatgtttgagcgctgcctgaagacctacgccatcaagaggtctgccctgagcaccagcagcaagggcctgctgctggaggacaaccccagcatccgggccatcaccctgggccacggccacatcctggtgggcaccaagaatggagagatcctggagattgacaagagcggccccatgaccctgctggtgcagggccacatggagggggaggtgtggggcctggccgcccaccccctgctgcccatctgtgccaccgtgtctgatgacaagaccctgcgcatctgggagctgagcgcccagcacaggatgctggccgtgaggaagctgaagaagggcggccgctgctgtgccttctccccagatggcaaggccctggccgtgggcctgaatgatggcagcttcctggtggtgaatgctgacacagtggaggacatggtgtccttccaccacaggaaggagatgatcagtgacatcaagttcagcaaggacaccgggaagtacctggccgtggccagccatgacaactttgtggacatctacaacgtgctgaccagcaagagggtgggcatctgcaagggggccagcagctacatcacccacatcgactgggacagccggggcaagctgctgcaggtgaacagcggggcccgggagcagctgttctttgaggccccccggggcaagaggcacatcatccggcccagcgagattgagaagattgagtgggacacctggacctgtgtgctgggccccacctgtgagggcatctggccagcccacagcgacatcacagatgtgaatgctgccagcctgaccaaggactgcagcctgctggccactggagatgactttggatttgtgaagctgttctcctaccctgtgaagggccagcacgcccgcttcaagaagtatgtgggccacagcgcccacgtgaccaacgtgcgctggctgcacaatgattctgtgctgctgactgtgggcggcgctgacacagccctgatgatctggacccgggagtttgtgggcacccaggagagcaagctggtggacagcgaggagagtgacacagatgtggaggaggatggcggctatgacagtgatgtggcccgggagaaggccatcgactacaccaccaagatctatgctgtgtccatccgggagatggagggcaccaagccccaccagcagctgaaggaggtgtctgtggaggagcggccccctgtgtccagagctgccccccagcctgagaagctgcagaagaacaacatcaccaagaagaagaagctggtggaggagctggccctggaccacgtgtttggctaccggggctttgactgcaggaacaacctgcactacctgaatgatggagctgacatcatcttccacacagctgctgctggcatcgtgcagaacctgagcacaggcagccagagcttctacctggagcacacagatgacatcctgtgcctgactgtgaaccagcaccccaagtacagaaatgtggtggccaccagccagatcggcaccacccccagcatccacatctgggatgccatgaccaagcacaccctgtccatgctgcgctgcttccacagcaaaggagtgaactacatcaacttcagcgccaccgggaagctgctggtgtctgtgggcgtggaccctgagcacaccatcaccgtgtggcgctggcaggagggcgccaaggtggccagcagaggaggccacctggagcgcatctttgtggtggagttccggccagacagcgacacccagtttgtgtctgtgggcgtgaagcacatgaagttctggaccctggccggcagcgccctgctgtacaagaagggcgtgattggcagcctgggcgccgccaagatgcagaccatgctgtctgtggcctttggagccaacaacctgaccttcaccggggccatcaatggagatgtgtatgtgtggaaggaccacttcctgatccggctggtggccaaggcccacactggacctgtgttcaccatgtacaccaccctgagagatggcctcatcgtgactggaggcaaggagcggcccaccaaggagggcggcgctgtgaagctgtgggaccaggagatgaagcgctgccgggccttccagctggagaccggccagctggtggagtgtgtgcgctctgtgtgccggggcaagggcaagatcctggtgggcaccaaggatggagagatcatcgaggtgggggagaagaatgctgccagcaacatcctgattgatggccacatggagggggagatctggggcctggccacccaccccagcaaggacctcttcatcagcgccagcaatgatggaacagcccgcatctgggacctggccgacaagaagctgctgaacaaggtgtccctgggccacgccgcccgctgtgccgcctacagcccagatggagagatggtggccatcggcatgaagaatggagaatttgtgatcctgctggtgaacagcctgaaggtgtggggcaagaagagggacaggaagagcgccatccaggacatccgcatcagcccagacaaccgcttcctggccgtgggcagcagcgagcacacagtggacttctatgacctgacccagggcaccaacctgaaccgcatcggctactgcaaggacatccccagctttgtgatccagatggacttcagcgcagatggcaagtacatccaggtgtccactggagcctacaagaggcaggtgcatgaggtgcccctgggcaagcaggtgacagaagctgtggtgattgagaagatcacctgggcctcctggacctctgtgctgggagatgaggtgattggcatctggcccagaaatgctgacaaggcagatgtgaactgtgcctgtgtgacccatgctggcctgaacatcgtgactggagatgactttggcctggtgaagctgtttgacttcccctgcacagagaagtttgccaagcacaagcgctacttcggccacagcgcccacgtgaccaacatccgcttctcctatgatgacaagtatgtggtgtccactggaggagatgactgcagcgtgtttgtgtggcgctgcctgtag

SEQ ID NO: 19451 - DNA, 630 bp, synthetic construct
  source 1..630: mol_type = other DNA; note = Synthetic coding sequence
atgaaccccagcatgaagcagaagcaggaggagatcaaggagaacatcaagaacagctctgtgcccaggaggaccctgaagatgatccagcccagcgccagcggcagcctggtgggcagagaaaatgagctgtctgctggcctgagcaagaggaagcacagaaatgaccacctgaccagcaccaccagcagccctggggtcatcgtgcctgagagcagcgagaacaagaacctgggcggcgtgacccaggagagctttgacctgatgatcaaggagaaccccagcagccagtactggaaggaggtggccgagaagaggaggaaggccctgtatgaggccctgaaggaaaatgagaagctgcacaaggagattgagcagaaggacaatgaaattgcccggctgaagaaggagaacaaggagctggccgaggtggccgagcacgtgcagtacatggccgagctgattgagcggctgaatggagagcccctggacaactttgagagcctggacaaccaggagtttgacagcgaggaggagaccgtggaggacagcctggtggaggacagcgagatcggcacctgtgccgagggcaccgtgagcagcagcacagatgccaagccctgcatctag

SEQ ID NO: 19452 - DNA, 1635 bp, synthetic construct
  source 1..1635: mol_type = other DNA; note = Synthetic coding sequence
atgaacaccagcatcccctaccagcagaacccctacaacccccggggcagcagcaatgtcatccagtgctaccgctgtggggacacctgcaagggggaggtggtgcgggtgcacaacaaccacttccacatccgctgcttcacctgccaggtgtgtggctgcggcctggcccagagcggcttcttcttcaagaaccaggagtacatctgcacccaggactaccagcagctgtatggcacccgctgtgacagctgccgggacttcatcaccggggaggtgatcagcgccctgggccgcacctaccaccccaagtgctttgtgtgcagcctgtgcaggaagcccttccccatcggggacaaggtgaccttcagcggcaaggaatgtgtgtgccagacctgcagccagagcatggccagcagcaagcccatcaagatccggggccccagccactgtgccggctgcaaggaggagatcaagcacggccagagcctgctggccctggacaagcagtggcacgtgtcctgcttcaagtgccagacctgcagcgtcatcctgaccggggagtacatcagcaaggatggagtgccctactgtgagagtgactaccacgcccagtttggcatcaagtgtgagacctgtgaccgctacatcagcggccgggtgctggaggccggcggcaagcactaccaccccacctgtgcccgctgtgtgcgctgccaccagatgttcacagaaggagaggagatgtacctgaccggcagcgaggtgtggcaccccatctgcaagcaggccgcccgggcagagaagaagctgaagcacaggaggaccagcgagaccagcatcagccccccaggcagcagcatcggcagccccaacagagtcatctgtgacatctatgagaacctggacctgcggcagaggcgggccagcagccctggctacatcgacagccccacctacagccggcagggcatgagccccaccttcagccgcagcccccaccactactacagaagtggggacctgagcacagccaccaagagcaagaccagcgaggacatcagccagaccagcaagtacagccccatctacagcccagacccctactatgccagcgagagcgagtactggacctaccacggcagccccaaggtgccccgggcccggcgcttcagcagtggaggagaagaagatgactttgaccgctccatgcacaagctgcagagcggcatcggccgcctcatcctgaaggaggagatgaaggcccggagcagcagctatgctgacccctggaccccacccaggagcagcaccagcagccgggaggccctgcacacagctggctatgagatgagcctgaatggcagccccaggagccactacctggccgacagcgaccccctcatcagcaagagcgccagcctgcctgcctacagaagaaatggcctgcacaggacccccagcgctgacctcttccactatgacagcatgaatgctgtgaactggggcatgagggagtacaagatctacccctatgagctgctgctggtgaccacccggggcaggaaccggctgcccaaggatgtggacaggacccggctggagggcaacttctggaagagcggctgcctgtag

SEQ ID NO: 19453 - DNA, 840 bp, synthetic construct
  source 1..840: mol_type = other DNA; note = Synthetic coding sequence
atgacccccagcgagggcgcccgggccggcaccggccgggagctggagatgctggacagcctgctggccctgggcggcctggtgctgctgcgggacagcgtggagtgggagggccgcagcctgctgaaggccctggtgaagaagagcgccctgtgtggggagcaggtgcacatcctgggctgtgaggtgtctgaggaggagttccgggagggctttgacagcgacatcaacaaccggctggtgtaccatgacttcttccgggaccccctgaactggagcaagacagaggaggccttccctgggggccccctgggcgccctgcgggccatgtgcaagaggacagatcctgtgcctgtgaccatcgccctggacagcctgtcctggctgctgctgcggctgccctgcaccaccctgtgccaggtgctgcatgctgtgagccaccaggacagctgccctggggacagcagctctgtgggcaaggtgtctgtgctgggcctgctgcacgaggagctgcacggccctggccctgtgggcgccctgagcagcctggcccagacagaggtgaccctgggcggcaccatgggccaggccagcgcccacatcctgtgccggcggccccggcagaggcccacagaccagacccagtggttcagcatcctgcctgacttcagcctggacctgcaggagggccccagcgtggagagccagccctacagcgacccccacatcccccctgtgtccaagaatgccaaggcccggaccaggaagtgcagcctggtgtctggccacggccgggagaacaagagctgccggggctggggctggggccagggcttctag

SEQ ID NO: 19454 - DNA, 405 bp, synthetic construct
  source 1..405: mol_type = other DNA; note = Synthetic coding sequence
atgtctgaaaatgctgcccctggcctgtgtggggagctgctgctgcagaggggcaccaccaaggtggccaccggcctggtgctgaacagagaccagaggctggcctgggccgagaacagcattgacttcatcagccgggagctgtgtgcccacagcatcaggaagctgcaggcccacgtgctgctgatcaaggctgtgcacggctactttgacagccggcagaactacagcgagaaggagagcctgtccttcatgattgacaccatgaagagcaccctgaaggagcagttccagtttgtggaggtgcccggcaaccactgtgtgcacatgtctgagccccagcacgtggccagcatcatcagcagcttcctgcagtgcacccacatgctgcctgcccagctgtag

SEQ ID NO: 19455 - DNA, 1350 bp, synthetic construct
  source 1..1350: mol_type = other DNA; note = Synthetic coding sequence
atgatgctgggcacagaaggaggagagggctttgtggtgaaggtgcggggcctgccctggagctgcagcgcagatgaggtgcagcgcttcttcagtgactgcaagatccagaatggagcccagggcatccgcttcatctacacccgggagggccggcccagcggggaggcctttgtggagctggagagtgaagatgaggtgaagctggccctgaagaaggaccgggagaccatgggccaccgctacgtggaggtgttcaagagcaacaacgtggagatggactgggtgctgaagcacacaggccccaacagcccagacacagccaatgatggctttgtgcggctgcggggcctgcccttcggctgcagcaaggaggagatcgtgcagttcttcagcggcctggagatcgtgcccaacggcatcaccctgcctgtggacttccagggccgcagcactggagaggcctttgtgcagtttgccagccaggagattgctgagaaggccctgaagaagcacaaggagcgcatcggccaccgctacatcgagatcttcaagagcagcagagctgaggtgaggacccactatgacccccccaggaagctgatggccatgcagaggcctggcccctatgacaggcctggagctggccggggctacaacagcatcggccgcggggccggctttgagaggatgagaagaggagcctacggcggcggctacggcggctatgatgactacaacggctacaatgatggctacggctttggaagtgaccgcttcggccgggacctgaactactgcttcagcggcatgtctgaccacagatatggagatggcggcagcaccttccagagcaccaccggccactgtgtgcacatgaggggcctgccctaccgggccacagaaaatgacatctacaacttcttcagccccctgaaccctgtgcgggtgcacattgaaattggaccagatggccgggtgactggagaggctgatgtggagtttgccacccatgaagatgctgtggccgccatgagcaaggacaaggccaacatgcagcaccgctacgtggagctgttcctgaacagcacagctggggccagcggcggggcctatgagcaccgctacgtggagctgttcctgaacagcacagctggggccagcggcggggcctacggcagccagatgatgggcggcatgggcctgagcaaccagagcagctatggaggccctgccagccagcagctgagcggcggctacggcggcggctacggcggccagagctccatgagcggctatgaccaggtgctgcaggagaacagcagtgacttccagagcaacatcgcctag

SEQ ID NO: 19456 - DNA, 4077 bp, synthetic construct
  source 1..4077: mol_type = other DNA; note = Synthetic coding sequence
atgggcaaccagctggccggcatcgcccccagccagatcctgtctgtggagagctacttcagtgacatccatgactttgaatatgacaagagcctgggcagcacccgcttcttcaaggtggcccgggccaagcaccgggagggcctggtggtggtgaaggtgtttgccatccaggaccccaccctgcccctgaccagctacaagcaggagctggaggagctgaagatccggctgaacagcgcccagaactgcctgcccttccagaaggccagcgagaaggccagcgagaaggccgccatgctgttccggcagtatgtgcgggacaacctgtatgaccgcatcagcacccggcccttcctgaacaacatcgagaagcgctggatcgccttccagatcctgacagctgtggaccaggcccacaagagcggcgtgcgccacggggacatcaagacagaaaatgtgatggtgacctcctggaactgggtgctgctgacagactttgccagcttcaagcccacctacctgcctgaggacaacccagctgacttcaactacttctttgacaccagcagaagaaggacctgctacatcgcccctgagagatttgtggatggcggcatgtttgccacagagctggagtacatgagggaccccagcacccccctggtggacctgaacagcaaccagaggaccagaggagagctgaagagggccatggacatcttctctgctggctgtgtgattgctgagctgttcacagaaggagtgcccctgtttgacctgagccagctgctggcctacagaaatggccacttcttccctgagcaggtgctgaacaagattgaggaccacagcatccgggagctggtgacccagatgatccaccgggagccagacaagaggctggaggccgaggactacctgaagcagcagagaggaaatgccttccctgagatcttctacaccttcctgcagccctacatggcccagtttgccaaggagaccttcctgtctgcagatgagcgcatcctggtgatcaggaaggacctgggcaacatcatccacaacctgtgtggccatgacctgcctgagaaggccgagggggagcccaaggaaaatggcctggtgatcctggtgtctgtcatcaccagctgcctgcagaccctgaagtactgtgacagcaagctggccgccctggagctgatcctgcacctggccccccggctgtctgtggagatcctgctggaccgcatcaccccctacctgctgcacttcagcaatgattctgtgccccgggtgcgggcagaggccctgcggaccctgaccaaggtgctggccctggtgaaggaggtgcccagaaatgacatcaacatctacccagagtacatcctgcccggcatcgcccacctggcccaggatgatgccaccatcgtgcggctggcctatgcagagaacatcgccctgctggccgagacagccctgcgcttcctggagctggtgcagctgaagaacctgaacatggagaatgaccccaacaatgaggagattgatgaggtgacccaccccaatggaaattatgacacagagctgcaggccctgcacgagatggtgcagcagaaggtggtgaccctgctgagtgaccctgaaaatattgtgaagcagaccctgatggagaatggcatcacccggctgtgtgtgttcttcggccggcagaaggccaatgatgtgctgctgagccacatgatcaccttcctgaatgacaagaatgactggcacctgcggggggccttctttgacagcatcgtgggcgtggccgcctacgtgggctggcagagcagcagcatcctgaagcccctgctgcagcagggcctgagtgatgctgaggagtttgtgattgtgaaggccctgtatgccctgacctgcatgtgccagctgggcctgctgcagaagccccacgtgtatgaatttgccagtgacatcgcccccttcctgtgccaccccaacctgtggatccgctatggagctgtgggcttcatcaccgtggtggcccggcagatcagcacagcagatgtgtactgcaagctgatgccctacctggacccctacatcacccagcccatcatccagatcgagaggaagctggtgctgctgtctgtgctgaaggagcctgtgagccgcagcatctttgattatgccctgcggagcaaggacatcaccagcctcttccgccacctgcacatgaggcagaagaagagaaatggcagcctgcctgactgccccccaccagaagatcctgccatcgcccagctgctgaagaagctgctgagccagggcatgacagaggaggaggaggacaagctgctggccctgaaggacttcatgatgaagagcaacaaggccaaggccaacatcgtggaccagagccacctgcatgacagcagccagaagggcgtgattgacctggccgccctgggcatcaccggccggcaggtggacctggtgaagaccaagcaggagccagatgacaagagggccaggaagcacgtgaagcaggacagcaatgtgaatgaggagtggaagtccatgtttggcagcctggacccccccaacatgccccaggccctgcccaagggcagtgaccaggaggtgatccagacaggcaagcccccaagaagtgagagcagcgctggcatctgtgtgcccctgagcaccagcagccaggtgcctgaggtgaccaccgtgcagaacaagaagcctgtgattcctgtgctgagcagcaccatcctgcccagcacctaccagatccgcatcaccacctgcaagacagagctgcagcagctgatccagcagaagcgggagcagtgcaatgctgagcgcatcgccaagcagatgatggagaatgctgagtgggagagcaagcccccacctcctggctggaggcccaagggcctgctggtggcccacctgcacgagcacaagtctgctgtgaaccgcatccgggtgtctgatgagcacagcctgtttgccacctgcagcaatgatggcaccgtgaagatctggaacagccagaagatggagggcaagaccaccaccaccaggagcatcctgacctacagcagaattggaggccgggtgaagaccctgaccttctgccagggcagccactacctggccatcgccagtgacaatggagctgtgcagctgctgggcatcgaggccagcaagctgcccaagagccccaagatccaccccctgcagagccgcatcctggaccagaaggaggatggctgtgtggtggacatgcaccacttcaacagcggggcccagagcgtgctggcctatgccaccgtgaatggcagcctggtgggctgggacctgcggagcagcagcaatgcctggaccctgaagcatgacctgaagagcggcctcatcaccagctttgctgtggacatccaccagtgctggctgtgcatcggcaccagcagcggcaccatggcctgctgggacatgaggttccagctgcccatcagcagccactgccaccccagccgggcccgcatccggcggctgtccatgcaccccctgtaccagagctgggtgattgctgctgtgcagggcaacaatgaggtgtccatgtgggacatggagactggagaccggcgcttcaccctgtgggccagcagcgccccacccctgtctgagctgcagcccagcccccacagcgtgcacggcatctactgcagccctgcagatggcaaccccatcctgctgacagctggcagtgacatgaagatccgcttctgggacctggcctacccagagaggagctatgtggtggccggcagcaccagcagccccagcgtgtcctactacaggaagatcatcgagggcacagaggtggtgcaggagatccagaacaagcagaaggtgggccccagtgatgacaccccccggcggggccctgagagcctgcctgtgggccaccacgacatcatcacagatgtggccaccttccagaccacccagggcttcatcgtgacagccagcagagatggcatcgtgaaggtgtggaagtag

SEQ ID NO: 19457 - DNA, 993 bp, synthetic construct
  source 1..993: mol_type = other DNA; note = Synthetic coding sequence
atgcctgtggtgaccacagatgctgagagcgagaccggcatccccaagagcctgagcaatgagccccccagcgagaccatggaggagattgagcacacctgcccccagccccggctgaccctgacagccccagccccctttgctgatgagaccaactgccagtgccaggcccctcatgagaagctgaccatcgcccaggcccggctgggcaccccagctgacaggcctgtgcgggtgtatgcagatggcatctttgacctcttccacagcggccacgcccgggccctgatgcaggccaagaccctcttccccaacagctacctgctggtgggcgtgtgcagtgatgacctgacccacaagttcaagggcttcaccgtgatgaatgaggccgagagatatgaggccctgcggcactgccgctacgtggatgaagtcatcagagatgccccctggaccctgaccccagagttcctggagaagcacaagattgactttgtggcccatgatgacatcccctacagcagcgctggcagtgatgatgtgtacaagcacatcaaggaggccggcatgtttgtgcccacccagaggacagagggcatcagcaccagtgacatcatcaccagaattgtgcgggactatgatgtgtatgcccggaggaacctgcagaggggctacacagccaaggagctgaatgtgtccttcatcaatgagaagcgctaccgcttccagaaccaggtggacaagatgaaggagaaggtgaagaatgtggaggagaggagcaaggagtttgtgaacagagtggaggagaagagccatgacctgatccagaagtgggaggagaagagccgggagttcatcggcaacttcctggagctgtttggaccagatggagcctggaagcagatgttccaggagaggagcagcaggatgctgcaggccctgagccccaagcagagccccctgaagtcctgggcccgctgccgggacttctag

SEQ ID NO: 19458 - DNA, 2025 bp, synthetic construct
  source 1..2025: mol_type = other DNA; note = Synthetic coding sequence
atgcagaccagcagcagccgctctgtgcacctgtctgagtggcagaagaactactttgccatcaccagcggcatctgcaccggccccaaggcagatgcctaccgggcccagatcctgcgcatccagtatgcctgggccaacagcgagatcagccaggtgtgtgccaccaagctgttcaagaagtatgcagagaagtacagcgccatcatcgacagcgacaacgtggagagcggcctgaacaactatgcagagaacatcctgaccctggccggcagccagcagacagacagcgacaagtggcagagcggcctgagcatcaacaacgtgttcaagatgagctctgtgcagaagatgatgcaggccggcaagaagttcaaggacagcctgctggagcccgccctggcctctgtggtgatccacaaggaggccaccgtgtttgacctgcccaagttctctgtgtgtggcagcagccaggagagtgacagcctgcccaacagcgcccatgaccgggacaggacccaggacttccctgagagcaaccggctgaagctgctgcagaatgcccagccccccatggtgaccaacacagcccggacctgccccaccttcagcgcccctgtgggggagagcgccacagccaagttccacgtgacccccctgtttggaaatgtgaagaaggagaaccacagcagcgccaaggagaacatcggcctgaatgtgttcctgagcaaccagagctgcttccctgctgcctgtgagaacccccagaggaagagcttctacggcagcggcaccattgatgccctgagcaaccccatcctgaacaaggcctgcagcaagacagaggacaatggccccaaggaggacagcagcctgcccaccttcaagacagccaaggagcagctgtgggtggaccagcagaagaagtaccaccagccccagagggccagcggcagcagctatggaggagtgaagaagagcctgggcgccagccgcagccggggcatcctgggcaagtttgtgccccccatccccaagcaggacggcggggagcagaatggaggcatgcagtgcaagccctatggagctggccccacagagcccgcccaccctgtggatgagcggctgaagaacctggagcccaagatgattgagctgatcatgaatgagatcatggaccacggcccccctgtgaactgggaggacattgctggggtggagtttgccaaggccaccatcaaggagatcgtggtgtggcccatgctgcggccagacatcttcaccggcctgcggggcccccccaagggcatcctgctgtttggccccccaggcaccgggaagaccctcatcggcaagtgcatcgccagccagagcggggccaccttcttcagcatcagcgccagcagcctgaccagcaagtgggtgggggagggggagaagatggtgcgggccctgtttgctgtggcccgctgccagcagcctgctgtgatcttcattgatgaaattgacagcctgctgagccagagaggagatggagagcacgagagcagccgccgcatcaagacagagttcctggtgcagctggatggagccaccaccagcagcgaggaccgcatcctggtggtgggcgccaccaaccggccccaggagattgatgaggccgcccggcggcggctggtgaagaggctgtacatccccctgcctgaggccagcgccaggaagcagatcgtcatcaacctgatgagcaaggagcagtgctgcctgtctgaggaggagattgagcagatcgtgcagcagagtgatgccttcagcggggctgacatgacccagctgtgccgggaggccagcctgggccccatccgcagcctgcagacagctgacatcgccaccatcaccccagaccaggtgcggcccatcgcctacatcgactttgaaaatgccttcagaacagtgcggcccagcgtgagccccaaggacctggagctgtatgagaactggaacaagaccttcggctgtgggaagtag

SEQ ID NO: 19459 - DNA, 1143 bp, synthetic construct
  source 1..1143: mol_type = other DNA; note = Synthetic coding sequence
atgctgcggaggaagcccagcaatgccagcgagaaggagcccacccagaagaagaagctgagcctgcagaggagcagcagcttcaaggactttgccaagagcaagcccagcagccctgtggtgtctgagaaggagttcaacctggatgacaacatcccagaagatgattctggagtgcccaccccagaagatgctgggaagagcggcaagaagctgggcaagaagtggagggctgtgatcagcaggaccatgaacaggaagatgggcaagatgatggtgaaggccctgtctgaggagatggctgacaccctggaggagggcagcgccagccccaccagcccagactacagcctggacagccctggccctgagaagatggccctggccttcagcgagcaggaggagcacgagctgcctgtgctgagccggcaggccagcactggaagtgagctgtgcagccccagccctggcagcggcagctttggagaggagcccccagccccccagtacacaggccccttctgtggccgggcccgggtgcacacagacttcacccccagcccctatgaccatgacagcctgaagctgcagaagggagatgtgatccagatcatcgagaagccccctgtgggcacctggctgggcctgctgaatggcaaggtgggcagcttcaagttcatctacgtggatgtgctgcctgaggaggccgtgggccacgcccggcccagccggcggcagagcaagggcaagaggcccaagcccaagaccctgcacgagctgctggagcgcatcggcctggaggagcacaccagcaccctgctgctgaatggctaccagaccctggaggacttcaaggagctgcgggagacccacctgaatgagctgaacatcatggacccccagcaccgggccaagctgctgacagctgctgagctgctgctggactatgacaccggcagcgaggaggccgaggagggcgctgagagcagccaggagcctgtggcccacacagtgtctgagcccaaggtggacatcccccgggacagcggctgctttgagggcagcgagagcggcagagatgatgctgagctggccggcacagaggagcagctgcagggcctgagcctggccggggccccctag

SEQ ID NO: 19460 - DNA, 1692 bp, synthetic construct
  source 1..1692: mol_type = other DNA; note = Synthetic coding sequence
atgaaccccctgtttggccccaacctcttcctgctgcagcaggagcagcagggcctggccggccccctgggggacagcctgggcggggaccactttgctgggggcggggacctgcccccagcccccctgagccctgctggccctgctgcctacagccccccaggccctggccctgcccccccagctgccatggccctgagaaatgacctgggcagcaacatcaacgtgctgaagaccctgaacctgcgcttccgctgcttcctggccaaggtgcatgagctggagaggaggaaccggctgctggagaagcagctgcagcaggccctggaggagggcaagcagggccggcggggcctgggcagaagagaccaggccgtgcagacaggctttgtgagccccatccggcccctgggcctgcagctgggcgcccggcctgctgctgtgtgcagccccagcgcccgggtgctgggcagccctgcccggagccctgctggccccctggcccccagcgctgccagcctgagcagcagcagcaccagcaccagcaccacctacagcagcagcgcccgcttcatgcctggcaccatctggagcttcagccacgcccggcggctgggccctggcctggagcccaccctggtgcagggccctggcctgtcctgggtgcacccagatggagtgggcgtgcagattgacaccatcaccccagagatccgggccctgtacaacgtgctggccaaggtgaagcgggagagagatgagtacaagaggcgctgggaggaggagtacacagtgcgcatccagctgcaggacagagtgaatgagctgcaggaggaggcccaggaggctgatgcctgccaggaggagctggccctgaaggtggagcagctgaaggccgagctggtggtgttcaagggcctgatgagcaacaacctgtctgagctggacaccaagatccaggagaaggccatgaaggtggacatggacatctgcagaagaattgacatcacagccaagctgtgtgatgtggcccagcagaggaactgtgaggacatgatccagatgttccagaagaagctggtgcccagcatgggcggcaggaagcgggagaggaaggctgctgtggaggaggacaccagcctgtctgagagcgagggcccccggcagccagatggagatgaggaggagagcacagccctgagcatcaatgaggagatgcagaggatgctgaaccagctgcgggagtatgactttgaagatgactgtgacagcctgacctgggaggagacagaggagaccctgctgctgtgggaggacttcagcggctacgccatggctgctgctgaggcccagggcgagcagcaggaggacagcctggagaaggtgatcaaggacacagagagcctcttcaagacccgggagaaggagtaccaggagaccatcgaccagatcgagctggagctggccacagccaagaatgacatgaacagacacctgcacgagtacatggagatgtgcagcatgaagaggggcctggatgtgcagatggagacctgccggcggctcatcacccagagcggggacaggaagagccctgccttcaccgctgtgcccctgagtgaccccccacctcctccttctgaggccgaggacagcgacagagatgtgtccagtgacagctccatgaggtag

SEQ ID NO: 19461 - DNA, 1893 bp, synthetic construct
  source 1..1893: mol_type = other DNA; note = Synthetic coding sequence
atgctgttcctggccatcccccagagcattgatgaggagacagaggtgtggagcgaccacatcatcttcccccgcatcccccggggccctgtgcagcagcccctggaggaccgcatcttcaccccagctgtgtctgctgtgtacagcacagtgacccaggtggcccggcagcccggcacccccacccccagcccctacagcgcccacgagatcaacaagggccaccccaacctggccgccaccccacctggccacgccagcagccctggcctgagccagaccccctaccccagcggccagaatgccggccccaccaccctggtgtacccccagaccccccagaccatgaacagccagccccagaccaggagcccctttgctgctggcccccggcccccccaccaccagttcttccagaggccccagatccagcccccccgggccaccatccccaacagcagccccagcatccggcctggggcccagacccccacagctgtgtaccaggccaaccagcacatcatgatggtgaaccacctgcccatgccctaccctgtgccccagggcccccagtactgcatcccccagtaccgccacagcggccccccctacgtgggccccccccagcagtaccctgtgcagcccccaggccctggccccttctacccaggccctggccctggggacttccccaatgcctacggcacccccttctaccccagccagcctgtgtaccagagcgcccccatcatcgtgcccacccagcagcagcccccaccagccaagcgggagaagaagaccatccgcatccgggaccccaaccagggcggcaaggacatcacagaggagatcatgtctgggggcggcagcaggaaccccaccccacccatcggccggcccaccagcacccccaccccaccccagcagctgcccagccaggtgcctgagcacagccctgtggtgtatggcaccgtggagagcgcccacctggccgccagcacccctgtgacagctgccagtgaccagaagcaggaggagaagcccaagccagaccctgtgctgaagagccccagccctgtgctgcggctggtgctgagcggggagaagaaggagcaggagggccagaccagcgagaccacagccatcgtgtccattgctgagctgcccctgccccccagccccaccaccgtgtcctctgtggcccggagcaccatcgccgcccccaccagcagcgccctgagcagccagcccatcttcaccacagccattgatgacagatgtgagctgagcagcccccgggaggacaccatccccatccccagcctgaccagctgcacagagaccagtgaccccctgcccaccaatgaaaatgatgatgacatctgcaagaagccctgcagcgtggccccaaatgacatccccctggtgagcagcaccaacctgatcaatgagatcaacggggtgtctgagaagctgagcgccacagagagcatcgtggagatcgtgaagcaggaggtgctgcccctgaccctggagctggagatcctggagaaccccccagaggagatgaagctggagtgcatcccagcccccatcacccccagcacagtgcccagcttcccccccaccccacccaccccaccagccagccccccccacacccctgtgattgtgcctgctgctgccaccaccgtgagcagccccagcgctgccatcaccgtgcagagggtgctggaggaggatgagagcatccgcacctgcctgtctgaagatgccaaggagatccagaacaagattgaggtggaggctgatggccagacagaggagatcctggacagccagaacctgaacagcagaagaagccctgtgcctgagaccagcaatgaatgttag

SEQ ID NO: 19462 - DNA, 414 bp, synthetic construct
  source 1..414: mol_type = other DNA; note = Synthetic coding sequence
atgatcctgcccaccaaggccatggccacccaggagctgactgtgaagaggaagctgagcggcaacaccctgcaggtgcaggccagcagccctgtggccctgggcgtgcgcatccccaccgtggccctgcacatgatggagctgtttgacaccaccgtggagcagctgtacagcatcttcaccgtgaaggagctgaccaacaagaagatcatcatgaagtggaggtgtggcaactggccagaggagcactacgccatggtggccctgaactttgtgcccaccctgggccagacagagctgcagctgaaggagttcctgagcatctgcaaggaggagaacatgaagttctgctggcagaagcagcactttgaggagatcaagggcagcctgcagctgacccccctgaatggatag

SEQ ID NO: 19463 - DNA, 1248 bp, synthetic construct; identical to SEQ ID NO: 19216
  source 1..1248: mol_type = other DNA; note = Synthetic coding sequence

SEQ ID NO: 19464 - DNA, 1464 bp, synthetic construct
  source 1..1464: mol_type = other DNA; note = Synthetic coding sequence
atgagcagccccctggccagcctgagcaagaccaggaaggtgcccctgcccagcgagcccatgaaccctggaagaagaggcatccgcatctatggagatgtgcctgccagccatgacagcgagctgatggccttcatgaccaggaagctgtgggacctggagcagcaggtgaaggcccagacagatgagatcctgagcaaggaccagaagattgctgccctggaggacctggtgcagaccctgcggccccaccctgctgaggccaccctgcagaggcaggaggagctggagaccatgtgtgtgcagctgcagaggcaggtgcgggagatggagcgcttcctgagtgactatggcctgcagtgggtgggggagcccatggaccaggaggacagcgagagcaagacagtgtctgaacatggagagcgggactggatgacagccaagaagttctggaagccaggggacagcctggcccctcctgaggtggactttgaccggctgctggccagcctgcaggacctgtctgagctggtggtggagggggacacccaggtgacccctgtgcctggaggagcccggctgcggaccctggagcccatccccctgaagctgtacagaaatggcatcatgatgtttgatggccccttccagcccttctatgaccccagcacccagcgctgcctgcgggacatcctggatggcttcttccccagcgagctgcagaggctgtaccccaacggggtgcccttcaaggtgtctgacctgaggaaccaggtgtacctggaggatggcctggaccccttccctggagagggccgggtggtgggccggcagctgatgcacaaggccctggacagagtggaggagcaccctggcagcaggatgacagctgagaagttcctgaaccggctgcccaagtttgtgatccggcagggcgaggtgattgacatccggggccccatccgggacaccctgcagaactgctgccccctgcctgcccgcatccaggagatcgtggtggagacccccaccctggccgctgagcgggagaggagccaggagagccccaacaccccagccccacccctgtccatgctgcgcatcaagtcagaaaatggagagcaggccttcctgctgatgatgcagcctgacaacaccatcggagatgtgcgggccctgctggcccaggcccgggtgatggatgccagcgcctttgagatcttcagcaccttcccccccaccctgtaccaggatgacaccctgaccctgcaggccgccggcctggtgcccaaggccgccctgctgctgcgggcccggcgggcccccaagagcagcctgaagttcagccctggcccctgccccggccctggccctggccccagccctggccctggccctggccccagccctggccctggccctggccccagcccctgccccggccccagccccagcccccagtag

SEQ ID NO: 19465 - DNA, 1467 bp, synthetic construct
  source 1..1467: mol_type = other DNA; note = Synthetic coding sequence
atgtctgccttctgcctgggcctggtgggccgggccagcgccccagctgagccagacagcgcctgctgcatggagctgcctgctgctgctggagatgctgtgcgcagccctgctgctgctgctgccctgatcttccctgggggcagcggggagctggagctggccctggaggaggagctggccctgctggccgccggggagcggcccagcgaccccggggagcacccccaggccgagctgctgagcgtcatccggcagaaggagaaggacctggtgctggccgcccggctgggcaaggccctgctggagaggaaccaggacatgagccggcagtatgagcagatgcacaaggagctgacagacaagctggagcacctggagcaggagaagcatgagctgcggaggagatttgagaaccgggagggggagtgggagggccgggtgtctgagctggagagtgatgtgaagcagctgcaggatgagctggagcggcagcagatccacctgcgggaggccgaccgggagaagagcagagctgtgcaggagctgtctgagcagaaccagaggctgctggaccagctgagccgggccagcgaggtggagcggcagctgtccatgcaggtgcacgccctgcgggaggacttccgggagaagaacagcagcaccaaccagcacatcatccggctggagagcctgcaggccgagatcaagatgctgagtgacaggaagcgggagctggagcaccggctgagcgccaccctggaggagaatgacctgctgcagggcaccgtggaggagctgcaggacagagtgctgatcctggagcggcagggccatgacaaggacctgcagctgcaccagagccagctggagctgcaggaggtgcggctgagctgccggcagctgcaggtgaaggtggaggagctgacagaggagaggagcctgcagagcagcgctgccaccagcaccagcctgctgtctgaaattgagcagagcatggaggccgaggagctggagcaggagcgggagcagctgcggctgcagctgtgggaggcctactgccaggtgcgctacctgtgcagccacctgcggggaaatgacagcgctgacagcgctgtgtccacagacagctccatggatgagagcagcgagaccagcagcgccaaggatgtgcctgctggcagcctgaggacagccctgaatgagctgaagaggctcatccagagcatcgtggatggcatggagcccaccggcagccggcggctggatgatgacagcctggaggagcagatccggcagaccagcgaggacagccgggccctgcgggagctgatggagggggagcggggccgcctgcctgaggccagccgctgctgcctgcctgcctgcagccagcccatccagagccccagcctgccccacgtgggcaaggcccagcagggctgtgccgccaggatgtacctgtag

SEQ ID NO: 19466 - DNA, 1428 bp, synthetic construct
  source 1..1428: mol_type = other DNA; note = Synthetic coding sequence
atgacccggggcactggaggaacagcccagaggggccgcagcggccctgacagccagggcctgctggacagcagcctgatggccagcggcacagccagccgctcagaagatgaggagagcctggccggccagaagagggccagcagccaggccctgggcaccatccccaagaggaggagcagcagccgcttcatcaagaggaagaagtttgatgatgagctggtggagagcagcctggccaagagcagcacccgggccaagggggccagcggcgtggagcccggccgctgcagcggcagcgagcccagcagcagcgagaagaagaaggtgtccaaggcccccagcacccctgtgccccccagccctgccccagcccctggcctgaccaagagggtgaagaagagcaagcagcccctgcaggtgaccaaggacctgggccgctggaagccagcagatgacctgctgctgatcaatgctgtgctgcagaccaatgacctgacctctgtgcacctgggcgtgaagttcagctgccgcttcaccctgcgggaggtgcaggagcgctggtacgccctgctgtatgaccctgtgatcagcaagctggcctgccaggccatgaggcagctgcaccctgaggccatcgccgccatccagagcaaggccctcttcagcaaggccgaggagcagctgctgagcaaggtgggcagcaccagccagcccaccctggagaccttccaggacctgctgcaccgccacccagatgccttctacctggccaggacagccaaggccctgcaggcccactggcagctgatgaagcagtactacctgctggaggaccagacagtgcagcccctgcccaagggggaccaggtgctgaacttcagtgatgctgaggacctgattgatgacagcaagctgaaggacatgagagatgaggtgctggagcacgagctgatggtggccgaccggcggcagaagcgggagatccggcagctggagcaggagctgcacaagtggcaggtgctggtggacagcatcaccggcatgagcagcccagactttgacaaccagaccctggccgtgctgcggggccgcatggtgcgctacctgatgaggagccgggagatcaccctgggccgggccaccaaggacaaccagattgatgtggacctgagcctggagggccctgcctggaagatcagcaggaagcagggcgtcatcaagctgaagaacaacggggacttcttcatcgccaatgaaggccggcggcccatctacattgatggccggcctgtgctgtgtggcagcaagtggaggctgagcaacaacagcgtggtggagatcgccagcctgcgctttgtgttcctgatcaaccaggacctgattgccctgatccgggcagaggccgccaagatcaccccccagtag

SEQ ID NO: 19467 - DNA, 1311 bp, synthetic construct
  source 1..1311: mol_type = other DNA; note = Synthetic coding sequence
atggctgatggcggcagcgagcgggcagatggaagaattgtgaagatggaggtggactacagcgccaccgtggaccagaggctgcctgaatgtgccaagctggccaaggccagtgacatggtgtccaccagccgcatcctggtggccgtggtgaagatgtgctatgaggccaaggagtgggacctgctgaatgaaaacatcatgctgctgagcaagagaagaagccagctgaagcaggccgtggccaagatggtgcagcagtgctgcacctacgtggaggagatcacagacctgcccatcaagctgcggctgattgacaccctgaggatggtgacagagggcaagatctacgtggagattgaaagagcccggctgaccaagaccctggccaccatcaaggagcagaatggagatgtgaaggaggccgccagcatcctgcaggagctgcaggtggagacctacggctccatggagaagaaggagcgggtggagttcatcctggagcagatgaggctgtgcctggccgtgaaggactacatccgcacccagatcatcagcaagaagatcaacaccaagttcttccaggaggagaacacagagaagctgaagctgaagtactacaacctgatgatccagctggaccagcacgagggcagctacctgagcatctgcaagcactaccgggccatctatgacaccccctgcatccaggccgagagcgagaagtggcagcaggccctgaagtctgtggtgctgtatgtgatcctggccccctttgacaatgagcagagcgacctggtgcaccgcatcagcggggacaagaagctggaggagatccccaagtacaaggacctgctgaagctgttcaccaccatggagctgatgcgctggagcaccctggtggaggactatggcatggagctgaggaagggcagcctggagagccctgccacagatgtgtttggcagcacagaggagggggagaagcgctggaaggacctgaagaacagagtggtggagcacaacatccgcatcatggccaagtactacacccgcatcaccatgaagaggatggcccagctgctggacctgtctgtggatgaaagtgaggccttcctgagcaacctggtggtgaacaagaccatctttgccaaggtggaccggctggccggcatcatcaacttccagaggcccaaggaccccaacaacctgctgaatgactggagccagaagctgaacagcctgatgagcctggtgaacaagaccacccacctgattgccaaggaggagatgatccacaacctgcagtag

SEQ ID NO: 19468 - DNA, 1974 bp, synthetic construct
  source 1..1974: mol_type = other DNA; note = Synthetic coding sequence
atggatgatcctgactgtgacagcacctgggaggaggatgaagaagatgctgaagatgctgaagatgaggactgtgaagatggagaggccgccggggccagagatgctgatgctggagatgaagatgaggagagcgaggagccccgggccgcccggcccagcagcttccagagcaggatgacaggcagcaggaactggagggccacccgggacatgtgccgctaccgccacaactacccagacctggtggagcgggactgcaatggagacacccccaacctgtccttctacagaaatgagatccgcttcctgcccaacggctgcttcatcgaggacatcctgcagaactggacagacaactatgacctgctggaggacaaccacagctacatccagtggctgttccccctgcgggagcccggggtgaactggcacgccaagcccctgaccctgcgggaggtggaggtgttcaagagcagccaggagatccaggagcggctggtgcgggcctatgagctgatgctgggcttctacggcatccggctggaggaccggggcactggaacagtgggccgggcccagaactaccagaagcgcttccagaacctgaactggaggagccacaacaacctgcgcatcacccgcatcctgaagagcctgggggagctgggcctggagcacttccaggcccccctggtgcgcttcttcctggaggagaccctggtgagaagagagctgcccggggtgcggcagagcgccctggactacttcatgtttgctgtgcgctgccgccaccagaggcggcagctggtgcactttgcctgggagcacttccggccccgctgcaagtttgtgtggggcccccaggacaagctgcggcgcttcaagcccagcagcctgccccaccccctggagggcagcaggaaggtggaggaggagggcagccctggggaccctgaccacgaggccagcacccagggccgcacctgtggccctgagcacagcaagggcggcggccgggtggatgagggcccccagcccaggtctgtggagccccaggatgctggccccctggagaggagccagggagatgaggccggcggccatggagaagatagacctgagcccctgagccccaaggagagcaagaagaggaagctggagctgagcagaagagagcagcccccaacagagcccggcccccagagcgccagcgaggtggagaagatcgccctgaacctggagggctgtgccctgagccagggcagcctgaggacaggcacccaggaggtgggcggccaggaccccggggaggccgtgcagccctgccggcagcccctgggcgcccgggtggccgacaaggtgaggaagaggaggaaggtggatgagggcgctggggacagcgctgctgtggccagcggcggggcccagaccctggccctggccggcagccctgcccccagcggccaccccaaggccggccacagtgaaaatggagtggaggaggacacagagggccgcacaggccccaaggagggcaccccaggcagccccagcgagaccccaggccccagccctgctggccctgctggagatgagcctgctgagagccccagcgagaccccaggccccaggcctgctggccctgctggagatgagcctgctgagagccccagcgagaccccaggccccagccctgctggccccaccagagatgagcctgctgagagccccagcgagaccccaggccccaggcctgctggccctgctggagatgagcctgctgagagccccagcgagaccccaggccccaggcctgctggccctgctggagatgagcctgctgagagccccagcgagaccccaggccccagccctgctggccccaccagagatgagcccgccaaggccggggaggccgctgagctgcaggatgctgaggtggagagcagcgccaagagcggcaagccctag

SEQ ID NO: 19469 - DNA, 615 bp, synthetic construct; identical to SEQ ID NO: 18379
  source 1..615: mol_type = other DNA; note = Synthetic coding sequence

SEQ ID NO: 19470 - DNA, 3042 bp, synthetic construct
  source 1..3042: mol_type = other DNA; note = Synthetic coding sequence
atgggctggaagcccagcgaggcccggggccagagccagagcttccaggccagcggcctgcagcccaggagcctgaaggccgcccggcgggccaccggccgcccagacaggagccgggccgcccggcccaccatggaccccagcgcccacaggagccgggccgccccacccaacatggaccctgacccccaggccggcgtgcaggtgggcatgagggtggtgcggggcgtggactggaagtggggccagcaggatggaggagagggcggcgtgggcaccgtggtggagctgggccgccacggcagccccagcaccccagacagaacagtggtggtgcagtgggaccagggcaccaggaccaactaccgggccggctaccagggcgcccatgacctgctgctgtatgacaatgcccagatcggcgtgcgccaccccaacatcatctgtgactgctgcaagaagcacggcctgcggggcatgcgctggaagtgccgggtgtgcctggactatgacctgtgcacccagtgctacatgcacaacaagcatgagctggcccacgcctttgacagatatgaaacagcccacagcaggcctgtgaccctgagcccccggcagggcctgccccgcatccccctgcggggcatcttccagggcgccaaggtggtgcggggccctgactgggagtggggcagccaggatggaggagagggcaagccaggccgggtggtggacatccggggctgggatgtggagaccggccgctctgtggcctctgtgacctgggcagatggcaccaccaacgtgtacagagtgggccacaagggcaaggtggacctgaagtgtgtgggggaggccgccggcggcttctactacaaggaccacctgccccggctgggcaagccagctgagctgcagaggagagtgtctgctgacagccagcccttccagcacggggacaaggtgaagtgcctgctggacacagatgtgctgcgggagatgcaggagggccatggaggctggaaccccaggatggccgagttcatcggccagacaggaacagtgcaccgcatcacagacagaggagatgtgcgggtgcagttcaaccacgagacccgctggaccttccaccctggggccctgaccaagcaccacagcttctgggtgggagatgtggtgcgggtgattggagacctggacacagtgaagaggctgcaggccggccacggggagtggacagatgacatggccccagccctgggccgggtgggcaaggtggtgaaggtgtttggagatggcaacctgcgggtggccgtggccggccagcgctggaccttcagccccagctgcctggtggcctacagaccagaagaagatgccaacctggatgtggccgagcgggcccgggagaacaagagcagcctgtctgtggccctggacaagctgcgggcccagaagagtgaccctgagcaccctggccgcctggtggtggaggtggccctgggcaatgctgcccgggccctggacctgctgcggcggcggcctgagcaggtggacaccaagaaccagggccgcacagccctgcaggtggccgcctacctgggccaggtggagctgatccggctgctgctgcaggcccgggccggcgtggacctgcctgatgatgagggcaacacagccctgcactatgctgccctgggcaaccagcctgaggccaccagggtgctgctgtctgctggctgcagagcagatgccatcaacagcacccagagcacagccctgcacgtggccgtgcagaggggcttcctggaggtggtgcgggccctgtgtgagcggggctgtgatgtgaacctgcctgatgcccacagcgacacccccctgcacagcgccatctctgctggcaccggggccagcggcatcgtggaggtgctgacagaggtgcccaacattgatgtgacagccaccaacagccagggcttcaccctgctgcaccacgccagcctgaagggccacgccctggccgtgaggaagatcctggcccgggcccggcagctggtggatgccaagaaggaggatggcttcaccgccctgcacctggccgccctgaacaaccaccgggaggtggcccagatcctgatccgggagggccgctgtgatgtgaatgtgaggaacaggaagctgcagagccccctgcacctggccgtgcagcaggcccacgtgggcctggtgcccctgctggtggatgctggctgcagcgtgaatgcagaagatgaggagggggacacagccctgcacgtggccctgcagaggcaccagctgctgcccctggtggctgatggagctggaggagaccccggccccctgcagctgctgagccggctgcaggccagcggcctgcccggcagcgctgagctgactgtgggcgctgctgtggcctgcttcctggccctggagggcgcagatgtgtcctacaccaaccaccggggccgcagccccctggacctggccgctgagggccgggtgctgaaggccctgcagggctgtgcccagcgcttccgggagcggcaggccggcggcggggccgcccctggcccccggcagaccctgggcacccccaacacagtgaccaacctgcacgtgggcgccgcccctggccctgaggccgcagaatgtctggtgtgcagcgagctggccctgctggtgctcttcagcccctgccagcacaggacagtgtgtgaagaatgtgcccggaggatgaagaagtgcatccgctgccaggtggtggtgtccaagaagctgcggccagatggcagcgaggtggccagcgctgccccagcccctggccccccccggcagctggtggaggagctgcagagccgctaccggcagatggaggagcgcatcacctgccccatctgcatcgacagccacatccggctggtgttccagtgtggccatggagcctgtgccccctgtggcagcgccctgagcgcctgccccatctgccggcagcccatccgggaccgcatccagatctttgtgtag

SEQ ID NO: 19471 - DNA, 2055 bp, synthetic construct
  source 1..2055: mol_type = other DNA; note = Synthetic coding sequence
atgatccccccccaggaggccagcgccaggagaagagaaattgaggacaagctgaagcaggaggaggagaccctgtccttcatccgggacagcctggagaagagtgaccagctgaccaagaacatggtgtccatcctgagcagctttgagagccggctgatgaagctggagaacagcatcatccctgtgcacaagcagacagagaacctgcagaggctgcaggagaatgtggagaagaccctgagctgcctggaccacgtgatctcctactaccacgtggccagtgacacagagaagatcatccgggagggccccaccggccgcctggaggagtacctgggctccatggccaagatccagaaggctgtggagtacttccaggacaacagcccagacagccctgagctgaacaaggtgaagctgctgtttgagcggggcaaggaggccctggagagcgagttccgcagcctgatgaccaggcacagcaaggtggtgtcccctgtgctgatcctggacctgatctctggagatgatgacctggaggcccaggaggatgtgaccctggagcacctgcctgagagcgtgctgcaggacgtcatccgcatcagccgctggctggtggagtatggaagaaaccaggacttcatgaatgtgtactaccagatccgcagcagccagctggacaggagcatcaagggcctgaaggagcacttccacaagagcagcagcagcagtggagtgccctacagccctgccatccccaacaagaggaaggacacccccaccaagaagcctgtgaagaggcctggcaccatcaggaaggcccagaacctgctgaagcagtacagccagcacggcctggatggcaagaagggcggcagcaacctgatccccctggagggcagagatgacatgctggatgtggagacagatgcctacatccactgtgtgtctgcctttgtgaagctggcccagagcgagtaccagctgctggccgacatcatccctgagcaccaccagaagaagacctttgacagcctcatccaggatgccctggatggcctgatgctggagggggagaacatcgtgtctgctgccaggaaggccatcgtgagacatgacttcagcacagtgctgaccgtcttccccatcctgcggcacctgaagcagaccaagccagagtttgaccaggtgctgcagggcacagctgccagcaccaagaacaagctgcccggcctcatcacctccatggagaccatcggggccaaggccctggaggactttgctgacaacatcaagaatgaccctgacaaggagtacaacatgcccaaggatggcaccgtgcatgagctgaccagcaatgccatcctcttcctgcagcagctgctggacttccaggagacagctggggccatgctggccagccaggagaccagcagcagcgccaccagctacagcagcgagttcagcaagaggctgctgagcacctacatctgcaaggtgctgggcaacctgcagctgaacctgctgagcaagagcaaggtgtatgaagatcctgccctgagcgccatcttcctgcacaacaactacaactacatcctgaagagcctggagaagtctgagctgatccagctggtggccgtgacccagaagacagctgagaggagctaccgggagcacatcgagcagcagatccagacctaccagaggtcctggctgaaggtgacagactacatcgccgagaagaacctgcctgtgttccagcccggggtgaagctgcgggacaaggagcggcagatcatcaaggagcgcttcaagggcttcaatgatggcctggaggagctgtgcaagatccagaaggcctgggccatcccagacacagagcagagggaccgcatccggcaggcccagaagaccatcgtgaaggagacctatggagccttcctgcagaagtttggatctgtgcccttcaccaagaaccctgagaagtacatcaagtatggagtggagcaggtgggggacatgattgaccggctgtttgacaccagcgcctag

SEQ ID NO: 19472 - DNA, 3576 bp, synthetic construct
  source 1..3576: mol_type = other DNA; note = Synthetic coding sequence
atgcctgtgcaggccgcccagtggacagagttcctgagctgccccatctgctacaatgaatttgatgaaaatgtgcacaagcccatcagcctgggctgcagccacacagtgtgcaagacctgcctgaacaagctgcacaggaaggcctgcccctttgaccagacagccatcaacacagacattgatgtgctgcctgtgaactttgccctgctgcagctggtgggcgcccaggtgcctgaccaccagagcatcaagctgagcaacctgggggagaacaagcactatgaggtggccaagaagtgtgtggaggacctggccctgtacctgaagcccctgagcggcggcaagggcgtggccagcctgaaccagagcgccctgagccggcccatgcagaggaagctggtgaccctggtgaactgccagctggtggaggaggagggccgggtgcgggccatgagagctgcccggagcctgggggagaggacagtgacagagctgatcctgcagcaccagaacccccagcagctgagcgccaacctgtgggccgctgtgcgggcccggggctgccagttcctgggccctgccatgcaggaggaggccctgaagctggtgctgctggccctggaggatggcagcgccctgagcaggaaggtgctggtgctgtttgtggtgcagaggctggagccccgcttcccccaggccagcaagaccagcattggacatgtggtgcagctgctgtaccgggccagctgcttcaaggtgaccaagagagatgaggacagcagcctgatgcagctgaaggaggagttccgctcctatgaggccctgcggcgggagcatgatgcccagatcgtgcacatcgccatggaggccggcctgcgcatcagccctgagcagtggagcagcctgctgtatggagacctggcccacaagagccacatgcagagcatcatcgacaagctgcagagccctgagagctttgccaagtctgtgcaggagctgaccatcgtgctgcagaggactggagaccctgccaacctgaaccggctgcggccccacctggagctgctggccaacatcgaccccaacccagatgctgtgagccccacctgggagcagctggagaatgccatggtggccgtgaagacagtggtgcacggcctggtggacttcatccagaactacagcaggaagggccacgagaccccccagccccagcccaacagcaagtacaagacctccatgtgccgggacctgcggcagcagggcggctgcccccggggcaccaactgcacctttgcccacagccaggaggagctggagaagtaccgcctgaggaacaagaagatcaatgccaccgtgaggaccttccccctgctgaacaaggtgggcgtgaacaacacagtgaccaccacagctggaaatgtcatcagcgtcatcggcagcacagagaccaccgggaagatcgtgcccagcaccaacggcatcagcaatgctgagaacagcgtgtcccagctgatcagccgcagcacagacagcaccctgcgggccctggagaccgtgaagaaggtgggcaaggtgggcgccaacggccagaatgctgctggccccagcgctgacagcgtgacagagaacaagattggcagcccccccaagacccctgtgtccaatgtggccgccaccagcgctggccccagcaatgtgggcacagagctgaacagcgtgccccagaagagcagccccttcctgaccagggtgcctgtgtacccaccccacagcgagaacatccagtacttccaggaccccaggacccagatcccctttgaggtgccccagtacccccagacaggctactacccacctccacccaccgtgcctgctggggtggccccctgtgtgcccaggtttgtgcgcagcaacaacgtgcctgagagcagcctgcccccagcctccatgccctatgctgaccactacagcaccttcagcccccgggacaggatgaacagcagcccctaccagcccccaccaccccagccctacggccctgtgccccctgtgcccagcggcatgtatgcccctgtgtatgacagccgccgcatctggaggcctcccatgtaccagagagatgacatcatccgcagcaacagcctgccccccatggatgtgatgcacagctctgtgtaccagaccagcctgcgggagcgctacaacagcctggatggctactacagcgtggcctgccagcccccatctgagcccaggaccaccgtgcccctgccccgggagccctgtggccacctgaagaccagctgtgaggagcagatccggaggaagccagaccagtgggcccagtaccacacccagaaggcccccctggtgagcagcaccctgcctgtggccacccagagccccaccccacccagccccctcttctctgtggacttccgggctgacttcagcgagagcgtgtctggcaccaagtttgaggaggaccacctgagccactacagcccctggagctgtggcaccatcggcagctgcatcaatgccattgattctgagcccaaggatgtgattgccaacagcaatgctgtgctgatggacctggacagcggagatgtgaagagaagagtgcacctgtttgagacccagaggaggaccaaggaggaggaccccatcatccccttcagtgatggccccatcatcagcaagtggggcgccatcagccgcagcagcaggacaggctaccacaccacagatcctgtgcaggccacagccagccagggcagcgccaccaagcccatctctgtgtctgactatgtgccctacgtgaatgctgtggacagccgctggagcagctatggaaatgaggccaccagcagcgcccactacgtggagcgggaccgcttcatcgtgacagacctgagcggccacaggaagcacagcagcactggagacctgctgagcctggagctgcagcaggccaagagcaacagcctgctgctgcagcgggaggccaatgccctggccatgcagcagaagtggaacagcctggatgagggccgccacctgaccctgaacctgctgagcaaggagattgagctgagaaatggagagctgcagagcgactacacagaagatgccacagacaccaagccagaccgggacatcgagctggagctgagcgccctggacacagatgagccagatggccagagcgagcccatcgaggagatcctggacatccagctgggcatcagcagccagaatgaccagctgctgaatggcatggctgtggagaatggccaccctgtgcagcagcaccagaaggagccccccaagcagaagaagcagagcctgggggaggaccacgtgatcctggaggagcagaagaccatcctgcctgtgaccagctgcttcagccagcccctgcctgtgtccatcagcaatgccagctgcctgcccatcaccacctctgtgtctgctggcaacctgatcctgaagacccacgtgatgtctgaggacaagaatgacttcctgaagcctgtggccaacgggaagatggtgaacagctag

SEQ ID NO: 19473 - DNA, 2100 bp, synthetic construct
  source 1..2100: mol_type = other DNA; note = Synthetic coding sequence
atgtgtggcatctttgcctacctgaactaccacgtgcccaggacccggcgggagatcctggagaccctcatcaagggcctgcagaggctggagtaccggggctatgattctgctggggtgggctttgatggcggcaatgacaaggactgggaggccaatgcctgcaagatccagctgatcaagaagaagggcaaggtgaaggccctggatgaggaggtgcacaagcagcaggacatggacctggacattgaatttgatgtgcacctgggcatcgcccacacccgctgggccacccatggagagcccagccctgtgaacagccacccccagaggagtgacaagaacaatgagttcatcgtcatccacaacggcatcatcaccaactacaaggacctgaagaagttcctggagagcaagggctatgactttgaaagtgaaacagacacagagaccatcgccaagctggtgaagtacatgtatgacaaccgggagagccaggacaccagcttcaccaccctggtggagagggtcatccagcagctggagggcgcctttgccctggtgttcaagtctgtgcacttccctggccaggccgtgggcacccggcggggcagccccctgctgattggagtgcgctctgagcacaagctgagcacagaccacatccccatcctgtacagaacagcccggacccagatcggcagcaagttcacccgctggggcagccagggcgagcggggcaaggacaagaagggcagctgcaacctgagccgggtggacagcaccacctgcctcttccctgtggaggagaaggctgtggagtactactttgccagtgatgccagcgctgtgattgagcacaccaacagagtcatcttcctggaggatgatgatgtggccgctgtggtggatggccgcctgagcatccaccgcatcaagaggacagctggggaccaccctggccgggctgtgcagaccctgcagatggagctgcagcagatcatgaagggcaacttcagcagcttcatgcagaaggagatctttgagcagcctgagagcgtggtgaacaccatgaggggccgggtgaactttgatgactacacagtgaacctgggcggcctgaaggaccacatcaaggagatccagcgctgcagaagactcatcctgattgcctgtggcaccagctaccacgccggcgtggccacccggcaggtgctggaggagctgacagagctgcctgtgatggtggagctggccagtgacttcctggacaggaacacccctgtgttcagagatgatgtgtgcttcttcctgagccagagcggggagacagctgacaccctgatgggcctgcgctactgcaaggagcggggggccctgactgtgggcatcaccaacacagtgggcagcagcatcagccgggagacagactgtggggtgcacatcaatgccggccctgagattggagtggccagcaccaaggcctacaccagccagtttgtgtccctggtgatgtttgccctgatgatgtgtgatgaccgcatctccatgcaggagaggaggaaggagatcatgctgggcctgaagaggctgcctgacctgatcaaggaggtgctgtccatggatgatgagatccagaagctggccacagagctgtaccaccagaagtctgtgctgatcatgggccggggctaccactacgccacctgcctggagggcgccctgaagatcaaggagatcacctacatgcacagcgagggcatcctggccggggagctgaagcacggccccctggccctggtggacaagctgatgcctgtgatcatgatcatcatgagggaccacacctacgccaagtgccagaatgccctgcagcaggtggtggcccggcagggccggcctgtggtgatctgtgacaaggaggacacagagaccatcaagaacaccaagaggaccatcaaggtgccccacagcgtggactgcctgcagggcatcctgagcgtcatccccctgcagctgctggccttccacctggccgtgctgcggggctatgatgtggacttccccaggaacctggccaagtctgtgacagtggagtag

SEQ ID NO: 19474 - DNA, 2067 bp, synthetic construct
  source 1..2067: mol_type = other DNA; note = Synthetic coding sequence
atgtctgtgaacagcgagaagagcagcagcagcgagaggcctgagccccagcagaaggcccccctggtgcccccacctcctcctcctcctcctcctcctcctccacccctgcctgaccccaccccacctgagcctgaggaggagatcctgggcagtgatgatgaggagcaggaggaccctgctgactactgcaagggcggctaccaccctgtgaagattggagacctcttcaacggccgctaccacgtgatcaggaagctgggctggggccacttcagcacagtgtggctgtgctgggacatgcagggcaagagatttgtggccatgaaggtggtgaagagcgcccagcactacacagaaacagccctggatgagatcaagctgctgaagtgtgtgcgggagagtgaccccagcgaccccaacaaggacatggtggtgcagctgattgatgacttcaagatcagcggcatgaatggcatccacgtgtgcatggtgtttgaggtgctgggccaccacctgctgaagtggatcatcaagagcaactaccagggcctgcctgtgcgctgtgtgaagagcatcatccggcaggtgctgcagggcctggactacctgcacagcaagtgcaagatcatccacacagacatcaagccagagaacatcctgatgtgtgtggatgatgcctacgtgcggaggatggctgctgaggccacagagtggcagaaggccggggcccccccacccagcggcagcgctgtgtccacagccccccagcagaagcccatcggcaagatcagcaagaacaagaagaagaagctgaagaagaagcagaagaggcaggccgagctgctggagaagaggctgcaggagattgaggagctggagcgggaggccgagaggaagatcatcgaggagaacatcaccagcgctgcccccagcaatgaccaggatggagagtactgcccagaggtgaagctgaagaccaccggcctggaggaggccgctgaggccgagacagccaaggacaacggggaggccgaggaccaggaggagaaggaggatgctgagaaggaaaatattgagaaggatgaagatgatgtggaccaggagctggccaacatcgaccccacctggattgagagccccaagaccaacggccacattgaaaatggccccttcagcctggagcagcagctggatgatgaagatgatgatgaggaggactgccccaaccctgaggagtacaacctggatgagcccaatgctgagagtgactacacctacagcagcagctatgagcagttcaatggagagctgcccaacggccgccacaagatccctgagagccagtttcctgagttcagcaccagcctcttcagcggcagcctggagcctgtggcctgtggctctgtgctgtctgagggcagccccctgacagagcaggaggagagcagccccagccatgacaggagcaggacagtgtctgccagcagcactggagacctgcccaaggccaagaccagggctgctgacctgctggtgaaccccctggaccccagaaatgctgacaagatccgggtgaagattgctgacctgggcaatgcctgctgggtgcacaagcacttcacagaggacatccagacccggcagtaccgcagcattgaggtgctgattggagctggctacagcaccccagctgacatctggagcacagcctgcatggcctttgagctggccactggagactacctgtttgagccccacagcggggaggactacagcagagatgaggaccacatcgcccacatcatcgagctgctgggcagcatccccaggcactttgccctgagcggcaagtacagccgggagttcttcaacagaagaggagagctgcggcacatcaccaagctgaagccctggagcctgtttgatgtgctggtggagaagtatggctggccccatgaagatgctgcccagttcacagacttcctgatccccatgctggagatggtgcctgagaagagggccagcgctggagaatgtctgcggcacccctggctgaacagctag

SEQ ID NO: 19475 - DNA, 1308 bp, synthetic construct
  source 1..1308: mol_type = other DNA; note = Synthetic coding sequence
atgagcggctaccagaggaggcctggggccacccccctgagccgggcccggagcctggccatcccagatgccccagccttctatgaaagaagaagctgcctgccccagctgaactgtgagcggccccacggccgggacctggacagccccttcttcggcatccggcctgccttcatgtgctacgtgcccagccctgtgctggcctctgtgggggacacagactttggctacggcaagggcaagtgcagcaagcagagccccagcggggcccacggcacccactttggagatgacagatttgaggacctggaggaggccaaccccttctccttccgggagttcctgaagaccaagaacctgggcctgagcaaagaagatcctgccagccgcatctatgccaaggaggccagccgccacagcctgggcctggaccacaacagcccccccagccagacaggaggctacggcctggagtaccagcagcccttctttgaggaccccaccggggccggggacctgctggatgaggaggaggatgaggacaccggctggagcggggcctacctgcccagcgccatcgagcagacccaccctgagcgggtgcctgctggcaccagcccctgcagcacctacctgtccttcttcagcaccccatctgagctggccggccctgagagcctgcccagctgggccctgagtgacacagacagccgggtgtccccagccagccctgctggcagccccagcgctgactttgctgtgcatggagagagcctgggggacagacacctgcggaccctgcagatctcctatgatgccctgaaggatgagaacagcaagctgcggaggaagctgaatgaggtgcagagcttcagcgaggcccagacagagatggtgaggaccctggagaggaagctggaggccaagatgatcaaggaggagagtgactaccatgacctggagagcgtggtgcagcaggtggagcagaacctggagctgatgaccaagagagctgtgaaggccgagaaccacgtggtgaagctgaagcaggagatcagcctgctgcaggcccaggtgagcaacttccagagagaaaatgaggccctgcgctgtggccagggcgccagcctgactgtggtgaagcagaatgctgatgtggccctgcagaacctgcgggtggtgatgaacagcgcccaggccagcatcaagcagctggtgtctggagctgagaccctgaacctggtggccgagatcctgaagagcattgaccgcatcagcgaggtgaaggatgaggaggaggacagctag

SEQ ID NO: 19476 - DNA, 591 bp, synthetic construct
  source 1..591: mol_type = other DNA; note = Synthetic coding sequence
atgaaggtgaagatcaagtgctggaatggagtggccacctggctgtgggtggccaatgatgagaactgtggcatctgcaggatggccttcaacggctgctgcccagactgccccctgcacggggagagcatcagccgctgcctgggctggtgcccccagcctgtgcctgtgctgggcggccgggcccacccccaggtgcccatcaacacagccagccccaccccaggccagcacacaggcagcctgatgagccgggaggagagcagccgcagcccagaccccaccccaccagccctggaccaggagaccagcagcctgctgcgctgcaccagcccctggtgcctggaccacagctgtgacctgtttggcatcacagaccaggtgtctgcagatggcccccgggcctgccggcagggcgcccggcggcggctgcctgctggggtgggccctgtgctgcccctgctgccccacgccctgcacccccaggtggccgccaggacagctggagctgctgccctgccccacgtgcccccaggcatggaggtgcagggcgtgcggccagacctggccctggccggcggggccagctag

SEQ ID NO: 19477 - DNA, 5127 bp, synthetic construct
  source 1..5127: mol_type = other DNA; note = Synthetic coding sequence
atggccgccatcggccggggccgcagcctgaagaacctgcgggtgcggggcagaaatgattctggagaggagaatgtgcccctggacctgacccgggagcccagcgacaacctgcgggagatcctgcagaatgtggcccggctgcagggcgtgagcaacatgaggaagctgggccacctgaacaacttcaccaagctgctgtgtgacatcggccacagcgaggagaagctgggcttccactatgaggacatcatcatctgcctgcggctggccctgctgaatgaggccaaggaggtgcgggccgccggcctgcgggccctgcgctacctgatccaggacagcagcatcctgcagaaggtgctgaagctgaaggtggactacctgattgcccgctgcatcgacatccagcagagcaatgaggtggagaggacccaggccctgcggctggtgaggaagatgatcaccgtgaatgccagcctcttccccagctctgtgaccaacagcctgattgctgtgggcaatgatggcctgcaggagcgggacaggatggtgcgggcctgcatcgccatcatctgtgagctggccctgcagaaccctgaggtggtggccctgcggggcggcctgaacaccatcctgaagaatgtcatcgactgccagctgagccgcatcaatgaggccctgatcaccaccatcctgcacctgctgaaccaccccaagacccggcagtatgtgcgggcagatgtggagctggagcgcatcctggccccctacacagacttccactaccgccacagcccagacacagctgagggccagctgaaggaggaccgggaggcccgcttcctggccagcaagatgggcatcatcgccaccttccgctcctgggccggcatcatcaacctgtgcaagccaggcaacagcggcatccagagcctgattggagtgctgtgcatccccaacatggagatccggcggggcctgctggaggtgctgtatgacatcttccggctgcccctgcctgtggtgacagaggagttcatcgaggccctgctgtctgtggaccccggccgcttccaggacagctggaggctgagtgatggctttgtggccgctgaggccaagaccatcctgccccaccgggcccggagcaggccagacctgatggacaactacctggccctgatcctgagcgccttcatcagaaatggcctgctggagggcctggtggaggtgatcaccaacagtgatgaccacatctctgtgcgggccaccatcctgctgggggagctgctgcacatggccaacaccatcctgccccacagccacagccaccacctgcactgcctgcccaccctgatgaacatggccgccagctttgacatccccaaggagaagaggctgcgggccagcgctgccctgaactgcctgaagcgcttccacgagatgaagaagaggggccccaagccctacagcctgcacctggaccacatcatccagaaggccatcgccacccaccagaagagggaccagtacctgcgggtgcagaaggacatcttcatcctgaaggacacagaggaggccctgctgatcaacctgcgggacagccaggtgctgcagcacaaggagaacctggagtggaactggaacctgattggcaccatcctgaagtggcccaacgtgaacctgaggaactacaaggatgagcagctgcacagatttgtgcggcggctgctgtacttctacaagcccagcagcaagctgtatgccaacctggacctggactttgccaaggccaagcagctgactgtggtgggctgccagttcacagagttcctgctggagagtgaagaagatggccagggctacctggaggacctggtgaaggacatcgtgcagtggctgaatgccagcagcggcatgaagccagagaggagcctgcagaacaacggcctgctgaccaccctgagccagcactacttcctgttcatcggcaccctgagctgccacccccatggagtgaagatgctggagaagtgcagcgtcttccagtgcctgctgaacctgtgcagcctgaagaaccaggaccacctgctgaagctgactgtgagcagcctggactacagcagagatggcctggcccgggtcatcctgagcaagatcctgacagctgccacagatgcctgccgcctgtatgccaccaagcacctgcgggtgctgctgcgggccaacgtggagttcttcaacaactggggcatcgagctgctggtgacccagctgcatgacaagaacaagaccatcagcagcgaggccctggacatcctggatgaggcctgtgaggacaaggccaacctgcacgccctgatccagatgaagccagccctgagccacctgggggacaagggcctgctgctgctgctgcgcttcctgagcatccccaagggcttctcctacctgaatgaaagaggctacgtggccaagcagctggagaagtggcaccgggagtacaacagcaaatatgtggacctgattgaggagcagctgaatgaggccctgaccacctacaggaagcctgtggatggagacaactacgtgagaagaagcaaccagaggctgcagaggcctcatgtgtacctgcccatccacctgtatggccagctggtgcaccacaagacaggctgccacctgctggaggtgcagaacatcatcacagagctgtgcagaaatgtgaggaccccagacctggacaagtgggaggagatcaagaagctgaaggccagcctgtgggccctgggcaacatcggcagcagcaactggggcctgaacctgctgcaggaggagaatgtcatcccagacatcctgaagctggccaagcagtgtgaggtgctgagcatccggggcacctgtgtgtatgtgctgggcctgattgccaagaccaagcagggctgtgacatcctgaagtgccacaactgggatgctgtgcgccacagcaggaagcacctgtggcctgtggtgcctgatgatgtggagcagctgtgcaatgagctgagcagcatccccagcaccctgagcctgaacagcgagagcaccagcagccgccacaacagcgagagcgagagcgtgcccagctccatgttcatcctggaggatgaccgcttcggcagcagcagcaccagcaccttcttcctggacatcaatgaagacacagagcccaccttctatgacaggagcggccccatcaaggacaagaacagcttccccttctttgccagcagcaagctggtgaagaaccgcatcctgaacagcctgaccctgcccaacaagaagcacaggagcagcagtgaccccaagggcggcaagctgagcagcgagagcaagaccagcaacagacgcatccgcaccctgacagagcccagcgtggacttcaaccacagtgatgacttcacccccatcagcacagtgcagaagaccctgcagctggagaccagcttcatgggcaacaagcacatcgaggacaccggcagcacccccagcatcggggagaatgacctgaagttcaccaagaactttggaacagagaaccaccgggagaacaccagccgggagcggctggtggtggagagcagcaccagcagccacatgaagatccgcagccagagcttcaacacagacaccaccaccagcggcatcagctccatgagcagcagccccagccgggagaccgtgggcgtggatgccaccaccatggacacagactgtggctccatgagcacagtggtgtccaccaagaccatcaagaccagccactacctgaccccccagagcaaccacctgagcctgagcaagagcaacagcgtgtccctggtgcccccaggcagcagccacaccctgccccggcgggcccagagcctgaaggcccccagcatcgccaccatcaagagcctggccgactgcaacttctcctacaccagcagcagagatgccttcggctacgccaccctgaagaggctgcagcagcagaggatgcaccccagcctgagccacagcgaggccctggccagccctgccaaggatgtgctcttcacagacaccatcaccatgaaggccaacagctttgagagccggctgacccccagccgcttcatgaaggccctgtcctatgccagcctggacaaggaggacctgctgagccccatcaaccagaacaccctgcagaggagcagctctgtgcgctccatggtgtcctctgccacctacggcggcagtgatgactacatcggcctggccctgcctgtggacatcaatgacatcttccaggtgaaggacatcccctacttccagaccaagaacatcccccctcatgatgacagaggagcccgggcctttgcccatgatgctgggggcctgcccagcggcaccggcggcctggtgaagaacagcttccacctgctgcggcagcagatgagcctgacagagatcatgaacagcatccacagtgatgccagcctcttcctggagagcacagaggacaccggcctgcaggagcacacagatgacaactgcctgtactgtgtgtgcatcgagatcctgggcttccagcccagcaaccagctgagcgccatctgcagccacagcgacttccaggacatcccctacagcgactggtgtgagcagaccatccacaaccccctggaggtggtgcccagcaagttcagcggcatcagcggctgcagtgatggagtgtcccaggagggcagcgccagcagcaccaagagcacagagctgctgctgggcgtgaagaccatcccagatgacacccccatgtgccgcatcctgctgaggaaggaggtgctgcggctggtgatcaacctgagcagctctgtgtccaccaagtgccacgagaccggcctgctgaccatcaaggagaagtacccccagacctttgatgacatctgcctgtacagcgaggtgagccacctgctgagccactgcaccttccggctgccctgccgccgcttcatccaggagctgttccaggatgtgcagttcctgcagatgcatgaggaggccgaggccgtgctggccaccccacccaagcagcccatcgtggacaccagcgctgagagctag

SEQ ID NO: 19478 - DNA, 3867 bp, synthetic construct; identical to SEQ ID NO: 19323
  source 1..3867: mol_type = other DNA; note = Synthetic coding sequence

SEQ ID NO: 19479 - DNA, 2829 bp, synthetic construct
  source 1..2829: mol_type = other DNA; note = Synthetic coding sequence
atgacaggcagcaacagccacatcaccatcctgaccctgaaggtgctgccccactttgagagcctgggcaagcaggagaagatccccaacaagatgtctgccttcaggaaccactgcccccacctggacagcgtgggggagatcaccaaggaggacctgatccagaagagcctgggcacctgccaggactgcaaggtgcagggccccaacctgtgggcctgcctggagaaccgctgcagctatgtgggctgtggggagagccaggtggaccacagcaccatccacagccaggagaccaagcactacctgactgtgaacctgaccaccctgcgggtgtggtgctacgcctgcagcaaggaggtgttcctggacaggaagctgggcacccagcccagcctgccccacgtgcggcagccccaccagatccaggagaacagcgtgcaggacttcaagatccccagcaacaccaccctgaagacccccctggtggccgtgtttgatgacctggacattgaagcagatgaggaggatgagctgcgggcccggggcctgaccggcctgaagaacatcggcaacacctgctacatgaatgctgccctgcaggccctgagcaactgcccccccctgacccagttcttcctggactgtggcggcctggccaggacagacaagaagccagccatctgcaagagctacctgaagctgatgacagagctgtggcacaagagcaggcctggctctgtggtgcccaccaccctcttccagggcatcaagacagtgaaccccaccttccggggctacagccagcaggatgcccaggagttcctgcgctgcctgatggacctgctgcacgaggagctgaaggagcaggtgatggaggtggaggaggacccccagaccatcaccacagaggagaccatggaggaggacaagagccagagtgatgtggacttccagagctgtgagagctgcagcaacagcgacagagcagaaaatgaaaatggcagccgctgcttcagcgaggacaacaatgagaccaccatgctgatccaggatgatgagaacaacagcgagatgagcaaggactggcagaaggagaagatgtgcaacaagatcaacaaggtgaacagcgagggggagtttgacaaggaccgggacagcatcagcgagaccgtggacctgaacaaccaggagaccgtgaaggtgcagatccacagccgggccagcgagtacatcacagatgtgcacagcaatgacctgagcaccccccagatcctgcccagcaatgaaggagtgaacccccggctgagcgccagcccccccaagagcggcaacctgtggccaggcctggccccaccccacaagaaggcccagagcgccagccccaagaggaagaagcagcacaagaagtacagaagtgtcatcagtgacatctttgatggcaccatcatcagctctgtgcagtgcctgacctgtgacagagtgtctgtgaccctggagaccttccaggacctgagcctgcccatccctgggaaggaggacctggccaagctgcacagcagcagccaccccaccagcatcgtgaaggccggcagctgtggggaggcctatgccccccagggctggatcgccttcttcatggagtatgtgaagagatttgtggtgtcctgtgtgcccagctggttctggggccctgtggtgaccctgcaggactgcctggccgccttctttgccagagatgagctgaagggggacaacatgtacagctgtgagaagtgcaagaagctgagaaatggagtgaagttctgcaaggtgcagaacttccctgagatcctgtgcatccacctgaagcgcttcagacatgagctgatgttcagcaccaagatcagcacccacgtgtccttccccctggagggcctggacctgcagcccttcctggccaaggacagccctgcccagatcgtgacctatgacctgctgagcgtcatctgccaccacggcacagccagcagcggccactacatcgcctactgcaggaacaacctgaacaacctgtggtatgaatttgatgaccagagcgtgacagaggtgtctgagagcacagtgcagaatgctgaggcctacgtgctcttctacaggaagagcagcgaggaggcccagaaggagcggcggcgcatcagcaacctgctgaacatcatggagcccagcctgctgcagttctacatcagccggcagtggctgaacaagttcaagacctttgctgagcccggccccatcagcaacaatgacttcctgtgcatccacggcggcgtgccccccaggaaggccggctacatcgaggacctggtgctgatgctgccccagaacatctgggacaacctgtacagccgctatggaggcggccctgctgtgaaccacctgtacatctgccacacctgccagattgaagctgagaagattgagaagaggaggaagacagagctggagatcttcatccggctgaacagagccttccagaaggaggacagccctgccaccttctactgcatctccatgcagtggttccgggagtgggagagctttgtgaagggcaaggatggagaccccccaggccccatcgacaacaccaagattgctgtgaccaagtgtggaaatgtgatgctgcggcagggcgctgacagcggccagatcagcgaggagacctggaacttcctgcagagcatctatggaggcggccctgaggtgatcctgcggccccctgtggtgcacgtggaccctgacatcctgcaggccgaggagaagattgaggtggagaccaggagcctgtag

SEQ ID NO: 19480 - DNA, 2106 bp, synthetic construct
  source 1..2106: mol_type = other DNA; note = Synthetic coding sequence
atgatgaagaggcagctgcacaggatgaggcagctggcccagacaggcagcctgggccgcaccccagagacagctgagttcctgggggaggacctgctgcaggtggagcagaggctggagcccgccaagagagctgcccacaacatccacaagaggctgcaggcctgcctgcagggccagagcggggctgacatggacaagagggtgaagaagctgcccctgatggccctgagcaccaccatggccgagagcttcaaggagctggaccctgacagctccatgggcaaggccctggagatgagctgtgccatccagaaccagctggcccgcatcctggccgagtttgagatgaccctggagagagatgtgctgcagcccctgagccggctgtctgaggaggagctgcctgccatcctgaagcacaagaagagcctgcagaagctggtgtctgactggaacaccctgaagagccggctgagccaggccaccaagaacagcggcagcagccagggcctgggcggcagccctggcagccacagccacaccaccatggccaacaaggtggagaccctgaaggaggaggaggaggagctgaagaggaaggtggagcagtgcagagatgagtacctggccgacctgtaccactttgtgaccaaggaggacagctatgccaactacttcatccggctgctggagatccaggccgactaccacagaagaagcctgagcagcctggacacagccctggccgagctgcgggagaaccacggccaggccgaccacagccccagcatgacagccacccacttcccccgggtgtatggagtgtccctggccacccacctgcaggagctgggccgggagatcgccctgcccatcgaggcctgtgtgatgatgctgctgtctgagggcatgaaggaggagggcctcttccggctggccgccggggcctctgtgctgaagaggctgaagcagaccatggccagtgacccccacagcctggaggagttctgcagcgacccccatgctgtggccggggccctgaagagctacctgcgggagctgcctgagcccctgatgacctttgacctgtatgatgactggatgagagctgccagcctgaaggagcccggggcccggctgcaggccctgcaggaggtgtgcagccggctgcccccagagaacctgagcaacctgcgctacctgatgaagttcctggcccggctggccgaggagcaggaggtgaacaagatgacccccagcaacatcgccatcgtgctgggccccaacctgctgtggcccccagagaaggagggggaccaggcccagctggatgctgcctctgtgagcagcatccaggtggtgggcgtggtggaggccctgatccagagcgctgacaccctcttccctggggacatcaacttcaacgtgtctggcctcttctctgctgtgaccctgcaggacacagtgtctgaccggctggccagcgaggagctgcccagcacagctgtgcccaccccagccaccaccccagccccagccccagccccagccccagccccagccccagccctggccagcgctgccaccaaggagaggacagagagcgaggtgccccccaggcctgccagccccaaggtgaccaggagccccccagagacagctgcccctgtggaggacatggcccggaggaccaagaggcctgccccagcccggcccaccatgcccccaccccaggtgtctggcagccgcagcagccccccagccccacccctgcccccaggcagcggcagccctggcaccccccaggccctgccccggcggctggtgggcagcagcctgcgggcccccaccgtgcccccacccctgccccccaccccaccccagcctgcccggcggcagagccgccgcagccctgccagccccagccctgccagccctggccctgccagccccagccctgtgtccctgagcaacccagcccaggtggacctgggcgccgccacagctgagggcggggcccctgaggccatctctggagtgcccaccccaccagccatccccccccagccccggcccaggagcctggccagcgagaccaactag

SEQ ID NO: 19481 - DNA, 1818 bp, synthetic construct
  source 1..1818: mol_type = other DNA; note = Synthetic coding sequence
atggaggtgcgggccagcctgcagaagatcgtgtccaatggagatgagcagctggagaaggccatggaggagatcctgcgggacagcgagaagaggcccagcagcctgctggtggactgccagagcagcagcgagatcagtgaccacagctttggagacatcccagccagccagaccaacaagcccagcctgcagctgatcctggaccccagcaacacagagatcagcaccccccggcccagcagccctgggggcctgcctgaagaagattctgtgctcttcaacaagctgacctacctgggctgcatgaaggtgagcagccccagaaatgaggtggaggccctgcgggccatggccaccatgaagagcagcagccagtaccccttccctgtgaccctgtatgtgcccaacgtgcctgagggctctgtgcgcatcatcgaccagagcagcaatgtggagatcgccagcttccccatctacaaggtgctcttctgtgcccggggccatgatggcaccacagagagcaactgctttgccttcacagagagcagccacggcagcgaggagttccagatccacgtgttcagctgtgagatcaaggaggccgtgagccgcatcctgtacagcttctgcacagccttcaagaggagcagccggcaggtgtctgatgtgaaggacagcgtcatccccaccccagacagtgatgtgttcaccttctctgtgtccctggaggtgaaggaggatgatggaaaaggaaacttcagccctgtgcccaaggaccgggacaagttctacttcaagctgaagcagggcatcgagaagaaggtggtgatcaccgtgcagcagctgagcaacaaggagctggccatcgagcgctgcttcggcatgctgctgagccctggaagaaatgtgaagaacagcgacatgcacctgctggacatggagagcatgggcaagagctatgatggccgggcctacgtgatcaccggcatgtggaaccccaatgcccctgtgttcctggccctgaatgaggagacccccaaggacaagcaggtgtacatgacagtggccgtggacatggtggtgacagaggtggtggagcctgtgcgcttcctgctggagaccgtggtgcgggtgtacccagccaatgaacgcttctggtacttcagcaggaagaccttcacagagaccttcttcatgaggctgaagcagagcgagggcaagggccacaccaatgctggagatgccatctatgaggtggtgtccctgcagcgggagagtgacaaggaggagcctgtgacccccaccagcggcggcggccccatgagcccccaggatgatgaagctgaggaggagagtgacaatgagctgagcagcggcactggagatgtgtccaaggactgcccagagaagatcctgtacagctggggcgagctgctgggcaagtggcacagcaacctgggcgcccggcccaagggcctgagcaccctggtgaagagcggcgtgcctgaggccctgcgggcagaggtgtggcagctgctggccggctgccacgacaaccaggccatgctggaccgctaccgcatcctgatcaccaagcagcagatgaagttcagcctgaccccccggcagaccatccacctggtgaagtatgagggctccatgaaggtgtccatgaccccctgcaaccagctgcagtttgacatccggctggatgtgctgatcacctacaccttctgcttcagcagcttccctgagcctgagctgtacaagtatgtgctgaagcaccagctgatcaagaggctgaatgcctgctag

SEQ ID NO: 19482 - DNA, 3120 bp, synthetic construct
  source 1..3120: mol_type = other DNA; note = Synthetic coding sequence
atggctgtgcagctggtgcctgattctgccctgggcctgctgatgatgacagagggccgccgctgccaggtgcacctgctggatgacaggaagctggagctgctggtgcagcccaagctgctggccaaggagctgctggacctggtggccagccacttcaacctgaaggagaaggagtactttggaattgccttcacagatgaaacaggccacctgaactggctgcagctggacagaagagtgctggagcatgacttccccaagaagagcggccctgtggtgctgtacttctgtgtgcgcttctacatcgagagcatctcctacctgaaggacaatgccaccatcgagctgttcttcctgaatgccaagagctgcatctacaaggagctgattgatgtggacagcgaggtggtgtttgagctggccagctacatcctgcaggaggccaagggggacttcagcagcaatgaggtggtgcggagtgacctgaagaagctgcctgccctgcccacccaggccctgaaggagcaccccagcctggcctactgtgaggacagagtcatcgagcactacaagaagctgaatggccagacccggggccaggccatcgtgaactacatgagcatcgtggagagcctgcccacctacggcgtgcactactatgctgtgaaggacaagcagggcatcccctggtggctgggcctgagctacaagggcatcttccagtatgactaccatgacaaggtgaagcccaggaagatcttccagtggaggcagctggagaacctgtacttccgggagaagaagttctctgtggaggtgcatgacccccggcgggcctctgtgaccaggaggaccttcggccacagcggcattgctgtgcacacctggtacgcctgcccagccctgatcaagagcatctgggccatggccatcagccagcaccagttctacctggacaggaagcagagcaagagcaagatccacgccgcccggagcctgtctgaaattgccatcgacctgacagagaccggcaccctgaagaccagcaagctggccaacatgggcagcaagggcaagatcatcagcggcagcagcggcagcctgctgagcagcggcagccaggagagtgacagcagccagagcgccaagaaggacatgctggccgccctgaagagccggcaggaggccctggaggagaccctgcggcagaggctggaggagctgaagaagctgtgcctgcgggaggccgagctgaccgggaagctgcctgtggagtaccccctggaccctggagaggagccccccatcgtgagaagacgcatcggcacagccttcaagctggatgagcagaagatcctgcccaagggggaggaggccgagctggagcggctggagcgggagtttgccatccagagccagatcacagaggccgcccggcggctggccagtgaccccaacgtgtccaagaagctgaagaagcagaggaagaccagctacctgaatgccctgaagaagctgcaggagattgaaaatgccatcaatgaaaatcgcatcaagagcggcaagaagcccacccagagggccagcctcatcattgatgatggcaacatcgccagcgaggacagcagcctgagtgatgccctggtgctggaggatgaggacagccaggtgaccagcaccatcagccccctgcacagcccccacaagggcctgcccccccggccccccagccacaaccggcccccaccaccccagagcctggagggcctgcggcagatgcactaccacagaaatgactatgacaagagccccatcaagcccaagatgtggagcgagagcagcctggatgagccctatgagaaggtgaagaagaggagcagccacagccacagcagcagccacaagcgcttccccagcacaggcagctgtgccgaggccggcggcggcagcaacagcctgcagaacagccccatccggggcctgccccactggaacagccagagctccatgcccagcaccccagacctgcgggtgcgcagcccccactacgtgcacagcaccaggtctgtggacatcagccccacccggctgcacagcctggccctgcacttccgccacaggagcagcagcctggagagccagggcaagctgctgggctctgaaaatgacaccggcagcccagacttctacacccccaggaccaggagcagcaatggaagtgaccccatggatgactgcagcagctgcaccagccacagcagcagcgagcactactacccagcccagatgaatgccaactacagcaccctggccgaggacagccccagcaaggcccggcagaggcagaggcagaggcagagagctgctggggccctgggcagcgccagcagcggctccatgcccaacctggccgcccggggcggggccggcggggccggcggggccggcggcggcgtgtacctgcacagccagagccagcccagcagccagtaccgcatcaaggagtaccccctgtacattgaaggaggagccacccctgtggtggtgcgcagcctggagagtgaccaggagggccactacagcgtgaaggcccagttcaagaccagcaacagctacacagctgggggcctcttcaaggagagctggaggggcggcggcggagatgaaggagacaccggccgcctgacccccagccgcagccagatcctgcggacccccagcctgggccgggagggcgcccatgacaagggagctggccgggctgctgtgtctgatgagctgcggcagtggtaccagaggagcacagccagccacaaggagcacagccggctgagccacaccagcagcaccagcagtgacagcggcagccagtacagcaccagcagccagagcacctttgtggcccacagccgggtgaccaggatgccccagatgtgcaaggccaccagcgctgccctgccccagagccagaggagcagcacccccagcagcgagatcggggccaccccacccagcagcccccaccacatcctgacctggcagacaggagaggccacagagaacagccccatcctggatggcagcgagagccccccccaccagagcacagatgaatag

SEQ ID NO: 19483 - DNA, 3228 bp, synthetic construct
  source 1..3228: mol_type = other DNA; note = Synthetic coding sequence
atggtggtggaggtggacagcatgcctgctgccagctctgtgaagaagcccttcggcctgcggagcaagatgggcaagtggtgctgccgctgcttcccctgctgccgggagagcggcaagagcaatgtgggcaccagcggggaccatgatgacagcgccatgaagaccctgcggagcaagatgggcaagtggtgccgccactgcttcccctgctgccggggcagcggcaagagcaatgtgggcgccagcggggaccatgatgattctgccatgaagaccctgaggaacaagatgggcaagtggtgctgccactgcttcccctgctgccggggcagcagcaagagcaaggtgggcgcctggggagactatgatgacagcgccttcatggagccccgctaccacgtgcggggggaggacctggacaagctgcaccgggccgcctggtggggcaaggtgcccaggaaggacctgattgtgatgctgcgggacacagatgtgaacaagcaggacaagcagaagaggacagccctgcacctggccagcgccaatggaaacagcgaggtggtgaagctgctgctggaccggcgctgccagctgaatgtgctggacaacaagaagaggacagccctgatcaaggctgtgcagtgccaggaggatgaatgtgccctgatgctgctggagcacggcacagaccccaacatcccagatgaatatggcaacaccaccctgcactacgccatctacaatgaagacaagctgatggccaaggccctgctgctgtatggagctgacatcgagagcaagaacaagcacggcctgacccccctgctgctgggcgtgcatgagcagaagcagcaggtggtgaagttcctgatcaagaagaaggccaacctgaatgccctggacagatatggccgcacagccctgatcctggccgtgtgctgcggcagcgccagcatcgtgtccctgctgctggagcagaacattgatgtgagcagccaggacctgagcggccagacagcccgggagtatgctgtgagcagccaccaccacgtgatctgccagctgctgagtgactacaaggagaagcagatgctgaagatcagcagcgagaacagcaaccctgagcaggacctgaagctgaccagcgaggaggagagccagcgcttcaagggcagcgagaacagccagcctgagaagatgagccaggagcctgagatcaacaaggatggagaccgggaggtggaggaggagatgaagaagcatgagagcaacaacgtgggcctgctggagaacctgaccaatggagtgacagctggaaatggagacaatggcctcatcccccagaggaagagcaggaccccagagaaccagcagttcccagacaatgaaagtgaggagtaccaccgcatctgtgagctgctgagtgactacaaggagaagcagatgcccaagtacagcagcgagaacagcaaccctgagcaggacctgaagctgaccagcgaggaggagagccagaggctgaagggctctgaaaatggccagcctgagaagaggagccaggagcctgagatcaacaaggatggagaccgggagctggagaacttcatggccatcgaggagatgaagaagcacaggagcacccacgtgggcttccctgagaacctgaccaacggggccacagctggaaatggagatgatggcctcatcccccccaggaagagcaggaccccagagagccagcagttcccagacacagaaaatgaggagtaccacagtgatgagcagaatgacacccagaagcagttctgtgaggagcagaacacaggcatcctgcatgatgagatcctgattcatgaggagaagcagatcgaggtggtggagaagatgaacagcgagctgagcctgagctgcaagaaggagaaggacatcctgcacgagaacagcaccctgcgggaggagatcgccatgctgcggctggagctggacaccatgaagcaccagagccagctgcgggagaagaagtacctggaggacatcgagagcgtgaagaagagaaatgacaacctgctgaaggccctgcagctgaatgagctgaccatggatgatgacacagctgtgctggtgattgacaatggcagcggcatgtgcaaggccggctttgctggagatgatgcccccagggctgtgttccccagcatcgtgggccggccccggcagcagggcatgatgggcggcatgcaccagaaggagagctatgtgggcaaggaggcccagagcaagaggggcatcctgaccctgaagtaccccatggagcacggcatcatcaccaactgggatgacatggagaagatctggcaccacaccttctacaatgagctgcgggtggcccctgaggagcaccctgtgctgctgacagaggccaccctgaaccccaaggccaaccgggagaagatgacccagatcatgtttgagaccttcaacaccccagccatgtatgtggccatccaggccgtgctgagcctgtacaccagcggccgcaccactggaattgtgatggattctggagatggagtgacccacacagtgcccatctatgagggcaatgccctgccccacgccaccctgcggctggacctggccggccgggagctgcctgactacctgatgaagatcctgacagagcacggctaccgcttcaccaccatggccgagcgggagatcgtgcgggacatcaaggagaagctgtgctacgtggccctggactttgagcaggagatggccaccgtggccagcagcagcagcctggagaagagctatgagctgcctgatggccaggtgatcaccatcggaaatgaacgcttccgctgcccagaggccctcttccagccctgcttcctgggcatggagagctgtggcatccacgagaccaccttcaacagcatcatgaagagtgatgtggacatcaggaaggacctgtacaccaacacagtgctgagcggcggcaccaccatgtacccaggcatggcccacaggatgcagaaggagattgctgccctggcccccagcatgatgaagatccgcatcatcgccccacccaagaggaagtacagcgtgtgggtgggcggcagcatcctggccagcctgagcaccttccagcagatgtggatcagcaagcaggagtatgatgaaagtggccccagcatcgtgcacaggaagtgcctgtag

SEQ ID NO: 19484 - DNA, 1752 bp, synthetic construct
  source 1..1752: mol_type = other DNA; note = Synthetic coding sequence
atgctgtctgagagcaaggagggggaggagaaggaggaggtgaccatggacaccagcgagaacagaccagaaaatgatgtgcctgagccccccatgcccatcgctgaccaggtgtccaatgatgacaggcctgagggctctgtggaggatgaggagaagaaggagagcagcctgcccaagagcttcaagaggaagatctctgtggtgtctgccaccaagggcgtgcctgctggcaacagcgacacagagggcggccagcccggcaggaagaggcgctggggcgccagcacagccaccacccagaagaagcccagcatcagcatcaccacagagagcctgaagagcctcatcccagacatcaagcccctggccggccaggaggccgtggtggacctgcacgcagatgacagccgcatcagtgaagatgaaacagaaagaaatggagatgatggcacccatgacaagggcctgaagatctgcaggacagtgacccaggtggtgcctgctgagggccaggagaatggccagcgggaggaggaggaggaggagaaggagcctgaggccgagccccctgtgcccccccaggtgtctgtggaggtggccctgcccccacctgctgagcacgaggtgaagaaggtgaccctgggggacaccctgaccaggaggagcatcagccagcagaagtctggagtgtccatcaccattgatgatcctgtgaggacagcccaggtgcccagccccccccggggcaagatcagcaacatcgtgcacatcagcaacctggtgcggcccttcaccctgggccagctgaaggagctgctgggccgcacaggcaccctggtggaggaggccttctggattgacaagatcaagagccactgctttgtgacctacagcacagtggaggaggccgtggccaccaggacagccctgcacggcgtgaagtggccccagagcaaccccaagttcctgtgtgccgactatgcagagcaggatgagctggactaccaccggggcctgctggtggaccggcccagcgagaccaagacagaggagcagggcatcccccggcccctgcaccccccacctcctcctcctgtgcagcccccccagcaccccagggctgagcagcgggagcaggagagagctgtgcgggagcagtgggccgagcgggagcgggagatggagcggcgggagaggaccaggtctgagcgggagtgggaccgggacaaggtgcgggagggccccaggagccgcagccgcagccgggacagaagaaggaaggagcgggccaagagcaaggagaagaagtctgagaagaaggagaaggcccaggaggagcccccagccaagctgctggatgacctcttcaggaagaccaaggccgccccctgcatctactggctgcccctgacagacagccagatcgtgcagaaggaggccgagcgggcagagcgggccaaggagcgggagaagaggaggaaggagcaggaggaggaggagcagaaggagcgggagaaggaggccgagcgggagaggaaccggcagctggagcgggagaagaggcgggagcacagccgggagcgggaccgggagcgggagcgggagcgggagcgggacagaggagaccgggaccgggaccgggagcgggaccgggagcggggccgggagcgggaccggcgggacaccaagaggcacagccgcagccgcagccgcagcacccctgtgcgggaccggggcggcagaagatag

SEQ ID NO: 19485 - DNA, 963 bp, synthetic construct; identical to SEQ ID NO: 19292
  source 1..963: mol_type = other DNA; note = Synthetic coding sequence

SEQ ID NO: 19486 - DNA, 3294 bp, synthetic construct
  source 1..3294: mol_type = other DNA; note = Synthetic coding sequence
atggctgctgctgctgctgagcagcagcagttctacctgctgctgggcaacctgctgagcccagacaacgtggtgaggaagcaggccgaggagacctatgagaacatccctggccagagcaagatcaccttcctgctgcaggccatccggaacaccacagctgctgaggaggcccggcagatggctgctgtgctgctgcggcggctgctgagcagcgcctttgatgaggtgtacccagccctgcccagtgatgtgcagacagccatcaagtctgagctgctgatgatcatccagatggagacccagagctccatgaggaagaaggtgtgtgacattgctgctgagctggccaggaacctgattgatgaagatggcaacaaccagtggccagagggcctgaagttcctgtttgattctgtgagcagccagaatgtgggcctgcgggaggccgccctgcacatcttctggaacttccctggcatcttcggcaaccagcagcagcactacctggatgtgatcaagaggatgctggtgcagtgcatgcaggaccaggagcaccccagcatccgcaccctgagcgcccgggccacagctgccttcatcctggccaatgagcacaacgtggccctcttcaagcactttgctgacctgctgcccggcttcctgcaggccgtgaatgacagctgctaccagaatgatgattctgtgctgaagagcctggtggagattgctgacacagtgcccaagtacctgcggccccacctggaggccaccctgcagctgagcctgaagctgtgtggggacaccagcctgaacaacatgcagaggcagctggccctggaggtgattgtgaccctgtctgaaacagctgctgccatgctgaggaagcacaccaacatcgtggcccagaccatcccccagatgctggccatgatggtggacctggaggaggatgaggactgggccaatgctgatgagctggaggatgatgactttgacagcaatgctgtggccggggagagcgccctggacaggatggcctgtggcctgggcggcaagctggtgctgcccatgatcaaggagcacatcatgcagatgctgcagaacccagactggaagtacagacatgctggcctgatggccctgagcgccatcggggagggctgccaccagcagatggagggcatcctgaatgagatcgtgaactttgtgctgctcttcctgcaggacccccacccccgggtgcgctatgctgcctgcaatgctgtgggccagatggccacagactttgcccctggcttccagaagaagttccacgagaaggtgattgctgccctgctgcagaccatggaggaccagggcaaccagagggtgcaggcccacgccgccgccgccctgatcaacttcacagaggactgccccaagagcctgctgatcccctacctggacaacctggtgaagcacctgcacagcatcatggtgctgaagctgcaggagctgatccagaagggcaccaagctggtgctggagcaggtggtgaccagcatcgcctctgtggccgacacagctgaggagaagtttgtgccctactatgacctcttcatgcccagcctgaagcacatcgtggagaatgctgtgcagaaggagctgcggctgctgcggggcaagaccatcgagtgcatcagcctcatcggcctggccgtgggcaaggagaagttcatgcaggatgccagtgatgtgatgcagctgctgctgaagacccagacagacttcaatgacatggaggatgatgacccccagatctcctacatgatcagcgcctgggccaggatgtgcaagatcctgggcaaggagttccagcagtacctgcctgtggtgatgggccccctgatgaagacagccagcatcaagccagaggtggccctgctggacacccaggacatggagaacatgtctgatgatgatggctgggagtttgtgaacctgggggaccagcagagctttggcatcaagacagctggcctggaggagaagagcacagcctgccagatgctggtgtgctacgccaaggagctgaaggagggctttgtggagtacacagagcaggtggtgaagctgatggtgcccctgctgaagttctacttccatgatggagtgcgggtggccgctgctgagagcatgcccctgctgctggagtgtgcccgggtgcggggccctgagtacctgacccagatgtggcacttcatgtgtgatgccctgatcaaggccatcggcacagagccagacagtgatgtgctgtctgagatcatgcacagctttgccaagtgcatcgaggtgatgggagatggctgcctgaacaatgagcactttgaggagctgggcggcatcctgaaggccaagctggaggagcacttcaagaaccaggagctgcggcaggtgaagaggcaggatgaggactatgatgagcaggtggaggagagcctgcaggatgaagatgacaatgatgtgtacatcctgaccaaggtgtctgacatcctgcacagcatcttcagcagctacaaggagaaggtgctgccctggtttgagcagctgctgcccctcatcgtgaacctgatctgcccccaccggccctggccagaccggcagtggggcctgtgcatctttgatgatgtgattgagcactgcagccctgccagcttcaagtatgcagagtacttcctgcggcccatgctgcagtatgtgtgtgacaacagccctgaggtgcggcaggccgccgcctacggcctgggcgtgatggcccagtatggaggagacaactaccggcccttctgcacagaggccctgcccctgctggtgcgggtcatccagagcgctgacagcaagaccaaggaaaatgtgaatgccacagagaactgcatctctgctgtgggcaagatcatgaagttcaagccagactgtgtgaatgtggaggaggtgctgccccactggctgtcctggctgcccctgcacgaggacaaggaggaggccgtgcagaccttcaactacctgtgtgacctgattgagagcaaccaccccatcgtgctgggccccaacaacaccaacctgcccaagatcttcagcatcatcgccgagggggagatgcatgaggccatcaagcatgaggacccctgtgccaagaggctggccaacgtggtgcggcaggtgcagaccagcggcggcctgtggacagaatgtattgcccagctgagccctgagcagcaggccgccatccaggagctgctgaacagcgcctag

SEQ ID NO: 19487 - DNA, 2715 bp, synthetic construct
  source 1..2715: mol_type = other DNA; note = Synthetic coding sequence
atgtttcctgccctggagacccacctgaagcagaccatcccagacccctatgaggacttcatgtaccgccacctgcagtactacggctacttcaaggcccagaggggcagcctgcccaacagcgccacccaccagcacgtgaggaagaacaacccccagtgcctgctgaatggcagcctgggggagaaggatgacctgatcccagacaccctgcagaaggagaagctgctgtggcccatcagcctgagcagcgctgtgcaccggcagatcgaggccatcaacagagacttccacagctgcctgggctggatgcagtggaggggcctgagcagcctgcagcccccaccaccccgcttcaaggacagccctgccagcgccttccgggtggccggcatcacagacagccacatgctgagcctgccccacctgcggagccggcagctgctgtatgatgagctggatgaggtgaacccccggctgcgggagccccaggagctgttcagcatcctgagcaccaagaggcccctgcaggccccccgctggcccattgaatgtgaggtgatcaaggagaacatccaccacatcgagtgggccccaccccagcctgagtacttctaccagcccaagggaaatgagaaggtgcctgagatcgtgggggagaagaagggcaccgtggtgtaccagctggacagcgtgcccatcgagggcagctacttcaccagcagccgggtgggcggcaagaggggcatcgtgaaggagctggccgtgaccctgcagggccctgaggacaacaccctgctgtttgagagcagatttgagagcggcaacctgcagaaggctgtgcgggtggacacctatgaatatgagctgaccctgaggacagacctgtacaccaacaagcacacccagtggttctacttccgggtgcagaacaccaggaaggatgccacctaccgcttcaccatcgtgaacctgctgaagcccaagagcctgtacacagtgggcatgaagcccctgctgtacagccagctggatgccaacaccagaaatattggctggaggcgggagggcaatgagatcaagtactacaagaacaacacagatgatggccagcagcccttctactgcctgacctggaccatccagttcccctatgaccaggacacctgcttctttgcccacttctacccctacacctacacagacctgcagtgctacctgctgtctgtggccaacaaccccatccagagccagttctgcaagctgcagaccctgtgccgcagcctggccggcaacacagtgtacctgctgaccatcaccaaccccagccagaccccccaggaggccgccgccaagaaggctgtggtgctgagcgcccgggtgcaccctggagagagcaatggctcctgggtgatgaagggcttcctggacttcatcctgagcaacagcccagatgcccagctgctgcgggacatctttgtgttcaaggtgctgcccatgctgaacccagatggagtgattgtgggcaactaccgctgcagcctggccggccgggacctgaacagacactacaagaccatcctgaaggagagcttcccctgcatctggtacaccaggaacatgatcaagaggctgctggaggagcgggaggtgctgctgtactgtgacttccacggccacagcaggaagaacaacatcttcctgtatggctgcaacaacaacaacaggaagtactggctgcacgagagggtcttccccctgatgctgtgcaagaatgccccagacaagttctccttccacagctgcaacttcaaggtgcagaagtgcaaggagggcaccggccgggtggtgatgtggaggatgggcatcctgaacagctacaccatggagagcacctttggaggcagcaccctgggcaacaagagggacacccacttcaccatcgaggacctgaagagcctgggctaccacgtgtgtgacaccctgctggacttctgtgaccctgaccagatgaagttcacccagtgcctggccgagctgaaggagctgctgcggcaggagatccacaagaagttccacgagctgggccaggatgtggacctggagggctcctggagcgacatcagcctgagtgacatcgagagcaggaacagcaccagcggcagtgacagcagcctgagtgatggcctgcctgtgcacctggccaacattgctgatgagctgacccagaagaagaagatgttcaagaagaagaagaagaagagcctgcagaccaggaagcagagaaatgagcagtaccagaagaagaacctgatgcagaagctgaagctgacagaggacaccagcgagaaggccggctttgccagcaccctgcagaagcagcccaccttcttcaagaacagcgagaacagcagcttcctgcccatgaagaatgaaaacccccggctgaatgagaccaacctgaacagaagagacaaggacacccccctggaccccagcatggccaccctcatcctgcccaagaacaagggccgcatgcagaacaagaagccaggcttcaccgtgtcctgcagccccaagaggaccatcaacagcagccaggagcccgcccctggcatgaagcccaactggcccaggagccgctacccagccaccaagaggggctgtgccgccatggccgcctaccccagcctgcacatctacacctacccctag

SEQ ID NO: 19488 - DNA, 789 bp, synthetic construct
  source 1..789: mol_type = other DNA; note = Synthetic coding sequence
atggccctgagcctgggctggaaggcccacaggaaccactgcggcctgctgctgcaggccctgcggagcagcggcctgctgctcttcccctgtggccagtgcccctggagaggagctggcagcttcctggaccctgagatcaaggccttcctggaggagaacacagaggtgaccagcagcggcagcctgaccccagagatccagctgcggctgctgaccccccgctgcaagttctggtgggagagagctgacctgtggccccacagcgacccctactgggccatctactggccaggcggccaggccctgagccgctacctgctggacaacccagatgtggtgcggggcaagtctgtgctggacctgggcagcggctgtggggccacagccatcgccgccaagatgtctggggccagccgcatcctggccaatgacatcgaccccatcgccggcatggccatcaccctgaactgtgagctgaaccggctgaaccccttccccatcctgatccagaacatcctgaacctggagcaggacaagtgggacctggtggtgctgggggacatgttttatgatgaggacctggccgacagcctgcaccagtggctgaagaagtgcttctggacctaccgcaccagggtgctgattggagaccccggccggccccagttcagcggccacagcatccagcaccacctgcacaaggtggtggagtacagcctgctggagagcacccggcaggagaacagcggcctgaccaccagcacagtgtggggcttccagccctag

SEQ ID NO: 19489 - DNA, 2619 bp, synthetic construct
  source 1..2619: mol_type = other DNA; note = Synthetic coding sequence
atgaactacccaggccggggcagccccaggagccctgagcacaacggccggggcggcggcggcggggcctgggagctgggcagtgatgcccggcctgccttcggcggcggcgtgtgctgctttgagcacctgcctggaggagaccctgatgatggagatgtgcccctggccctgctgcggggggagcccggcctgcacctggcccctggaacagatgaccacaaccaccacctggccctggacccctgcctgagtgatgaaaattatgacttcagcagcgctgagagcggcagcagcctgcgctactacagcgagggggagagcggcggcggcggcagcagcctgagcctgcaccccccccagcagccccccctggtgcccaccaacagcggcggcggcggggccaccggcggcagccctggagagaggaagaggacccggctgggcggccctgctgcccggcacagatatgaggtggtgacagagctgggccctgaggaggtgcgctggttctacaaggaggacaagaagacctggaagcccttcatcggctatgacagcctgcgcatcgagctggccttccgcaccctgctgcagaccactggagcccggccccagggcggggacagagatggagaccacgtgtgcagccccactggacctgccagcagcagtggagaagatgatgatgaagatcgggcctgtggcttctgccagagcaccaccggccacgagcctgagatggtggagctggtgaacatcgagcctgtgtgtgtgcggggcggcctgtatgaggtggatgtgacccagggcgagtgctaccctgtgtactggaaccaggccgacaagatccctgtgatgaggggccagtggttcattgatggcacctggcagcccctggaggaggaggagagcaacctgattgagcaggagcacctgaactgcttccggggccagcagatgcaggagaactttgatattgaggtgtccaagagcattgatggcaaggatgctgtgcacagcttcaagctgagcaggaaccacgtggactggcacagcgtggatgaggtgtacctgtacagtgatgccaccaccagcaagatcgccaggacagtgacccagaagctgggcttcagcaaggccagcagcagcggcacccggctgcaccggggctacgtggaggaggccaccctggaggacaagcccagccagaccacccacatcgtgtttgtggtgcatggaattggccagaagatggaccagggccgcatcatcaagaacacagccatgatgagggaggccgccaggaagattgaggagcggcacttcagcaaccacgccacccacgtggagttcctgcctgtggagtggaggagcaagctgaccctggatggagacacagtggacagcatcaccccagacaaggtgcggggcctgcgggacatgctgaacagcagcgccatggacatcatgtactacaccagccccctgtacagagatgagctggtgaagggcctgcagcaggagctgaacagactctacagcctcttctgcagcaggaacccagactttgaggagaagggcggcaaggtgtccatcgtgagccacagcctgggctgcgtcatcacctatgacatcatgacaggctggaaccctgtgcggctgtatgagcagctgctgcagaaggaggaggagctgcctgatgagcgctggatgtcctatgaggagcggcacctgctggatgagctgtacatcaccaagaggcggctgaaggagattgaggagcggctgcacggcctgaaggccagctccatgacccagaccccagccctgaagttcaaggtggagaacttcttctgcatgggcagccccctggccgtgttcctggccctgcggggcatccggcccggcaacacaggcagccaggaccacatcctgccccgggagatctgcaaccggctgctgaacatcttccaccccacagatcctgtggcctaccgcctggagcccctcatcctgaagcactacagcaacatcagccctgtgcagatccactggtacaacaccagcaaccccctgccctatgagcacatgaagcccagcttcctgaacccagccaaggagcccacctctgtgtctgaaaatgaaggcatcagcaccatccccagccctgtgaccagccctgtgctgagccgccgccactatggagagagcatcaccaacatcggcaaggccagcatcctgggcgccgccagcatcggcaagggcctgggcggcatgctgttcagcagatttggccgcagcagcaccacccagagcagcgagaccagcaaggacagcatggaggatgagaagaagcctgtggccagccccagcgccaccaccgtgggcacccagaccctgccccacagcagcagcggcttcctggacagcgccctggagctggaccacagaattgactttgagctgcgggagggcctggtggagagccgctactggagcgctgtgaccagccacacagcctactggagcagcctggatgtggccctcttcctgctgaccttcatgtacaagcatgaacatgatgatgatgccaagcccaacctggaccccatctag

SEQ ID NO: 19490 - DNA, 1461 bp, synthetic construct
  source 1..1461: mol_type = other DNA; note = Synthetic coding sequence
atggtgagccacaccttccacatgaggacagaggagagtgatgccagccaggagggagatgacctgcccaagagcagcgccaacaccagccaccccaagcaggatgacagccccaagagcagcgaggagaccatccagcccaaggagggggacatccccaaggcccctgaggagaccatccagagcaagaaggaggacctgcccaagagcagcgagaaggccatccagcccaaggagagcaacatccccaagagcagcgccaagcccatccagcccaagctgggcaacatccccaaggcctctgtgaagcccagccagcccaaggagggggacatccccaaggcccctgaggagaccatccagagcaagaaggaggacctgcccaagagcagcgaggaggccatccagcccaaggagggggacatccccaagagcagcgccaagcccatccagcccaagctgggcaacatcgccaagacctctgtgaagcccagccagcccaaggagagtgacatccccaagagccctgaggagaccatccagcccaaggagggggacatccccaagagcagcgccaagcccatccagcccaagctgggcaacatccccaaggcctctgtgaagcccagccagcccaaggagggggacatcagcaagagccctgaggaggccatccagcccaaggagggggacctgcccaagagcctggaggaggccatccagcccaaggagggggacatccccaagagccctgaggaggccatccagcccaaggagggggacatccccaagagcctggaggaggccatccagcccaaggagggggacatccccaagagccctgaggagaccatccagcccaagaagggggacatccccaagagccctgaggaggccatccagcccaaggagggggacatccccaagagccccaagcaggccatccagcccaaggagggggacatccccaagagcctggaggaggccatcccccccaaggagattgacatccccaagagccctgaggagaccatccagcccaaggaggatgacagccccaagagcctggaggaggccacccccagcaaggagggggacatcctgaagccagaggaggagaccatggagttccctgagggggacaaggtgaaggtgatcctgagcaaggaggactttgaggccagcctgaaggaggccggggagcggctggtggccgtggacttcagcgccacctggtgtggcccctgcaggaccatccggcccttcttccacgccctgtctgtgaagcatgaagatgtggtgttcctggaggtggatgctgacaactgtgaggaggtggtgagagaatgtgccatcatgtgtgtgcccaccttccagttctacaagaaggaggagaaggtggatgagctgtgtggggccctgaaggagaagctggaggccgtgattgctgagctgaagtag

SEQ ID NO: 19491 - DNA, 1005 bp, synthetic construct
  source 1..1005: mol_type = other DNA; note = Synthetic coding sequence
atggccgccagcggcagcggcatggcccagaagacctgggagctggccaacaacatgcaggaggcccagagcattgatgagatctacaagtatgacaagaagcagcagcaggagatcctggccgccaagccctggaccaaggaccaccactacttcaagtactgcaagatcagcgccctggccctgctgaagatggtgatgcacgcccggagcggcggcaacctggaggtgatgggcctgatgctgggcaaggtggatggagagaccatgatcatcatggacagctttgccctgcctgtggagggcacagagaccagggtgaatgcccaggccgccgcctatgagtacatggccgcctacattgaaaatgccaagcaggtgggccgcctggagaatgccatcggctggtaccacagccaccctggctacggctgctggctgagcggcattgatgtgtccacccagatgctgaaccagcagttccaggagccctttgtggccgtggtgattgaccccaccaggaccatctctgctgggaaggtgaacctgggcgccttccgcacctaccccaagggctacaagcccccagatgagggccccagcgagtaccagaccatccccctgaacaagattgaggactttggagtgcactgcaagcagtactatgccctggaggtgtcctacttcaagagcagcctggacaggaagctgctggagctgctgtggaacaagtactgggtgaacaccctgagcagcagcagcctgctgaccaatgctgactacaccaccggccaggtgtttgacctgtctgagaagctggagcagagcgaggcccagctgggccggggcagcttcatgctgggcctggagacccatgacaggaagtctgaggacaagctggccaaggccacccgggacagctgcaagaccaccatcgaggccatccacggcctgatgagccaggtgatcaaggacaagctgttcaaccagatcaacatctcctag

SEQ ID NO: 19492 - DNA, 1350 bp, synthetic construct
  source 1..1350: mol_type = other DNA; note = Synthetic coding sequence
atggtgatggagaagcccagccccctgctggtgggccgggagtttgtgcggcagtactacaccctgctgaacaaggcccctgagtacctgcaccgcttctacggcaggaacagcagctatgtgcacggcggcgtggatgccagcggcaagccccaggaggccgtgtatggccagaatgacatccaccacaaggtgctgagcctgaacttcagcgagtgccacaccaagatcagacatgtggatgcccacgccaccctgagtgatggagtggtggtgcaggtgatgggcctgctgagcaacagcggccagcctgagaggaagttcatgcagacctttgtgctggcccctgagggctctgtgcccaacaagttctacgtgcacaatgacatgttccgctatgaagatgaggtgtttggagacagcgagcctgagctggatgaggagagtgaagatgaggtggaggaggagcaggaggagcggcagcccagccctgagcctgtgcaggagaatgccaacagcggctactatgaggcccaccctgtgaccaatggaattgaggagcccctggaggagagcagccatgagcctgagcctgagcctgagagcgagaccaagacagaggagctgaagccccaggtggaggagaagaacctggaggagctggaggagaagagcaccaccccacctcctgctgagcctgtgtccctgccccaggagccccccaagccccgggtggaggccaagccagaggtgcagagccagcccccccgggtgcgggagcagaggccccgggagaggcctggcttccccccccggggcccccggcccggccgcggggacatggagcagaatgacagcgacaacagacgcatcatccgctacccagacagccaccagctgtttgtgggcaacctgccccatgacattgatgaaaatgagctgaaggagttcttcatgagctttggaaatgtggtggagctgcgcatcaacaccaagggcgtgggcggcaagctgcccaactttggatttgtggtgtttgatgattctgagcctgtgcagaggatcctgattgccaagcccatcatgttccggggggaggtgcggctgaatgtggaggagaagaagacccgggccgcccgggagcgggagacccggggcggcggagatgacagaagagacatcagaagaaatgaccggggccctgggggcccccggggcatcgtgggcggcggcatgatgagggacagagatggccggggccccccaccccggggcggcatggcccagaagctgggcagcggccggggcaccggccagatggagggccgcttcaccggccagaggaggtag

SEQ ID NO: 19493 - DNA, 333 bp, synthetic construct
  source 1..333: mol_type = other DNA; note = Synthetic coding sequence
atggaggagatcccagcccaggaggccgccggcagcccccgggtgcagttccagagcctggagacccagagtgaatgtctgagccctgagccccagtttgtgcaggacacagacatggagcagggcctgaccggcggcatcctgctgcggctgcccaccacccgcatccacagcgtgaacagctgcccagccctgagccacacccaggccagcgccttcagcggggagaccctggccgtgctgacagctggcatcagcaagcgctggcccaagtaccgcctgcccatcgacatcgcccggccctgcagcgagacccccttcccccggctgtag

SEQ ID NO: 19494 - DNA, 822 bp, synthetic construct; identical to SEQ ID NO: 19062
  source 1..822: mol_type = other DNA; note = Synthetic coding sequence

SEQ ID NO: 19495 - DNA, 2916 bp, synthetic construct
  source 1..2916: mol_type = other DNA; note = Synthetic coding sequence
ctgagcagaagagtgccctgtgtgagaagaggctgccggccccccctgccccccctgcccggcagccagagccgggcctggagccgggaccgggaggcccccctggaccccggccggcctgcccagagcggcagaagacccaccagccgctctgtgagccacgcctgctcctggaatggaggcagcctggaccccctggagggcaccccagccctgctgcggtctgctgagcggctgatgaggaaggtgaagaagctgcggctggacaaggaaaatacaggctcctggaggagcttcagcctgaacagcgagggcgctgagaggatggccaccaccggcacccccacagctgacagaggagatgctgctgccacagatgatcctgctgcccgcttccaggtgcagaagcacagctgggatggcctgcggagcatcatccacggcagcaggaagtacagcggcctcatcgtgaacaaggcccctcatgacttccagtttgtgcagaagacagatgaaagtggcccccacagccaccggctgtactacctgggcatgccctacggcagccgggagaacagcctgctgtacagcgagatccccaagaaggtgaggaaggaggccctgctgctgctgtcctggaagcagatgctggaccacttccaggccaccccccaccacggcgtgtacagccgggaggaggagctgctgcgggagaggaagaggctgggcgtgtttggcatcaccagctatgacttccacagcgagagcggcctcttcctgttccaggccagcaacagcctcttccactgcagagatggcggcaagaatggcttcatggtgagccccatgaagcccctggagatcaagacccagtgcagcggccccaggatggaccccaagatctgcccagctgaccctgccttcttctccttcatcaacaacagcgacctgtgggtggccaacatcgagaccggggaggagcggcggctgaccttctgccaccagggcctgagcaatgtgctggatgaccccaagtctgctggggtggccaccttcgtcatccaggaggagtttgaccgcttcaccggctactggtggtgccccacagcctcctgggagggcagcgagggcctgaagaccctgcgcatcctgtatgaggaggtggatgaaagtgaggtggaggtgattcatgtgcccagccctgccctggaggagaggaagacagacagctaccgctaccccaggacaggcagcaagaaccccaagatcgccctgaagctggccgagttccagacagacagccagggcaagatcgtgtccacccaggagaaggagctggtgcagcccttcagcagcctcttccccaaggtggagtacatcgcccgggccggctggaccagagatggcaagtatgcctgggccatgttcctggaccggccccagcagtggctgcagctggtgctgctgcccccagccctcttcatccccagcacagaaaatgaggagcagaggctggccagcgcccgggctgtgcccagaaatgtgcagccctacgtggtgtatgaggaggtgaccaacgtgtggatcaacgtgcatgacatcttctaccccttcccccagagcgagggggaggatgagctgtgcttcctgcgggccaatgaatgcaagacaggcttctgccacctgtacaaggtgacagctgtgctgaagagccagggctatgactggagcgagcccttcagccctggagaagatgagttcaagtgccccatcaaggaggagatcgccctgaccagcggggagtgggaggtgctggcccggcacggcagcaagatctgggtgaatgaggagaccaagctggtgtacttccagggcaccaaggacacccccctggagcaccacctgtatgtggtgtcctatgaggccgccggggagatcgtgcggctgaccaccccaggcttcagccacagctgcagcatgagccagaactttgacatgtttgtgagccactacagctctgtgtccaccccaccctgtgtgcacgtgtacaagctgagcggcccagatgatgaccccctgcacaagcagccccgcttctgggcctccatgatggaggccgccagctgccccccagactatgtgcccccagagatcttccacttccacaccaggagtgatgtgcggctgtatggcatgatctacaagccccacgccctgcagcccgggaagaagcaccccaccgtgctgtttgtgtatggaggcccccaggtgcagctggtgaacaacagcttcaagggcatcaagtacctgcggctgaacaccctggccagcctgggctatgctgtggtggtgattgatggccggggcagctgccagaggggcctgcgctttgaaggagccctgaagaaccagatgggccaggtggagattgaggaccaggtggagggcctgcagtttgtggccgagaagtatggcttcatcgacctgagccgggtggccatccacggctggagctatggaggcttcctgagcctgatgggcctcatccacaagccccaggtgttcaaggtggccatcgccggggcccctgtgacagtgtggatggcctatgacaccggctacacagagcgctacatggatgtgcctgagaacaaccagcacggctatgaagctggctctgtggccctgcacgtggagaagctgcccaatgagcccaaccggctgctgatcctgcacggcttcctggatgaaaatgtgcacttcttccacaccaacttcctggtgtcccagctgatccgggccggcaagccctaccagctgcagatctacccaaatgaaagacacagcatccgctgcccagagagcggggagcactatgaggtgaccctgctgcacttcctgcaggagtacctgtag

SEQ ID NO: 19496 - DNA, 2592 bp, synthetic construct
  source 1..2592: mol_type = other DNA; note = Synthetic coding sequence
atgggcaaccgggagatggaggagctgatccccctggtgaaccggctgcaggatgccttcagcgccctgggccagagctgcctgctggagctgccccagattgctgtggtgggcggccagagcgctgggaagagctctgtgctggagaactttgtgggccgggacttcctgccccggggcagcggcatcgtgacccggcggcccctggtgctgcagctggtgaccagcaaggccgagtatgcagagttcctgcactgcaagggcaagaagttcacagactttgatgaggtgcggctggagattgaagctgagacagacagagtgacaggcatgaacaagggcatcagcagcatccccatcaacctgcgggtgtacagcccccacgtgctgaacctgaccctgattgacctgcccggcatcaccaaggtgcctgtgggggaccagcccccagacatcgagtaccagatccgggagatgatcatgcagttcatcacccgggagaactgcctgatcctggccgtgaccccagccaacacagacctggccaacagtgatgccctgaagctggccaaggaggtggacccccagggcctgcggaccatcggggtcatcaccaagctggacctgatggatgagggcacagatgccagagatgtgctggagaacaagctgctgcccctgcggcggggctacgtgggcgtggtgaacagaagccagaaggacattgatggcaagaaggacatcaaggccgccatgctggccgagaggaagttcttcctgagccacccagcctaccgccacatcgctgacaggatgggcaccccccacctgcagaaggtgctgaaccagcagctgaccaaccacatccgggacaccctgcccaacttcaggaacaagctgcagggccagctgctgagcattgaacatgaggtggaggcctacaagaacttcaagccagaggaccccaccaggaagaccaaggccctgctgcagatggtgcagcagtttgctgtggactttgagaagagaattgagggcagcggggaccaggtggacaccctggagctgtctggaggagccaagatcaaccgcatcttccacgagcgcttcccctttgagatcgtgaagatggagttcaatgagaaggagctgcggcgggagatctcctatgccatcaagaacatccacggcatcagaacaggcctcttcaccccagacatggcctttgaggccatcgtgaagaagcagatcgtgaagctgaagggccccagcctgaagtctgtggacctggtgatccaggagctgatcaacacagtgaagaagtgcaccaagaagctggccaacttcccccggctgtgtgaggagacagaaagaattgtggccaaccacatccgggagcgggagggcaagaccaaggaccaggtgctgctgctgattgacatccaggtgtcctacatcaacaccaaccacgaggacttcatcggctttgccaatgcccagcagaggagcagccaggtgcacaagaagaccaccgtgggcaaccaggtgatcaggaagggctggctgaccatcagcaacatcggcatcatgaagggcggcagcaagggctactggtttgtgctgacagctgagagcctgtcctggtacaaggatgatgaggagaaggagaagaagtacatgctgcccctggacaacctgaaggtgagagatgtggagaagagcttcatgagcagcaagcacatctttgccctcttcaacacagagcagagaaatgtgtacaaggactaccgcttcctggagctggcctgtgacagccaggaggatgtggacagctggaaggccagcctgctgcgggccggcgtgtacccagacaagtctgtgggcaacaacaaggcagaaaatgatgaaaatggccaggccgagaacttctccatggacccccagctggagcggcaggtggagaccatccggaacctggtggacagctacatgagcatcatcaacaagtgcatccgggacctgatccccaagaccatcatgcacctgatgatcaacaacgtgaaggacttcatcaacagcgagctgctggcccagctgtacagcagcgaggaccagaacaccctgatggaggagagcgctgagcaggcccagaggagagatgagatgctgaggatgtaccaggccctgaaggaggccctgggcatcatcggggacatcagcacagccaccgtgtccaccccagcccctcctcctgtggatgacagctggatccagcacagcagaagaagccccccacccagccccaccacccagaggcggcccaccctgagcgcccccctggcccggcccaccagcggccggggccctgccccagccatccccagccctggcccccacagcggggcccctcctgtgcccttccggcccggccccctgccccccttccccagcagcagtgacagctttggagccccaccccaggtgcccagccggcccacccgggccccacccagcgtgcccagccggcggcccccacccagccccacccggcccaccatcatccggcccctggagagcagcctgctggactag

SEQ ID NO: 19497 - DNA, 1263 bp, synthetic construct; identical to SEQ ID NO: 18898
  source 1..1263: mol_type = other DNA; note = Synthetic coding sequence

SEQ ID NO: 19498 - DNA, 2481 bp, synthetic construct
  source 1..2481: mol_type = other DNA; note = Synthetic coding sequence
atggtggcccctgtgctggagaccagccacgtgttctgctgccccaacagagtgcggggcgtgctgaactggagcagcggcccccggggcctgctggccttcggcaccagctgcagcgtggtgctgtatgaccccctgaagagggtggtggtgaccaacctgaatggccacacagcccgggtgaactgcatccagtggatctgcaagcaggacggcagccccagcacagagctggtgtctgggggcagtgacaaccaggtgatccactgggagattgaggacaaccagctgctgaaggctgtgcacctgcagggccacgagggccctgtgtatgctgtgcatgctgtgtaccagaggaggaccagtgaccctgccctgtgcaccctcatcgtgtctgctgctgctgacagcgctgtgcggctgtggagcaagaagggccctgaggtgatgtgcctgcagaccctgaactttggaaatggatttgccctggccctgtgcctgtccttcctgcccaacacagatgtgcccatcctggcctgtggaaatgatgactgccgcatccacatctttgcccagcagaatgaccagttccagaaggtgctgagcctgtgtggccacgaggactggatccggggcgtggagtgggccgccttcggccgggacctcttcctggccagctgcagccaggactgcctgatccgcatctggaagctgtacatcaagagcaccagcctggagacccaggatgatgacaacatccggctgaaggagaacaccttcaccattgaaaatgaatctgtgaagatcgcctttgctgtgaccctggagaccgtgctggccggccacgagaactgggtgaatgctgtgcactggcagcctgtgttctacaaggatggagtgctgcagcagcctgtgcggctgctgagcgcctccatggacaagaccatgatcctgtgggccccagatgaggagagcggcgtgtggctggagcaggtgcgggtgggggaggtgggcggcaacaccctgggcttctatgactgccagttcaatgaagatggctccatgatcatcgcccacgccttccacggggccctgcacctgtggaagcagaacacagtgaacccccgggagtggaccccagagatcgtcatcagcggccactttgatggagtgcaggacctggtgtgggaccctgagggggagttcatcatcaccgtgggcacagaccagaccacccggctgtttgccccctggaagaggaaggaccagagccaggtgacctggcatgaaattgcccggccccagatccacggctatgacctgaagtgcctggccatgatcaaccgcttccagtttgtgtctggagcagatgagaaggtgctgcgggtcttcagcgcccccaggaactttgtggagaacttctgtgccatcaccggccagagcctgaaccacgtgctgtgcaaccaggacagcgacctgcctgagggcgccaccgtgcctgccctgggcctgagcaacaaggctgtgttccagggcgacatcgccagccagcccagtgatgaggaggagctgctgaccagcacaggctttgagtaccagcaggtggccttccagcccagcatcctgacagagcccccaacagaggaccacctgctgcagaacaccctgtggccagaggtgcagaagctgtatggccacggctatgagatcttctgtgtgacctgcaacagcagcaagaccctgctggccagcgcctgcaaggccgccaagaaggagcacgccgccatcatcctgtggaacaccacctcctggaagcaggtgcagaacctggtgttccacagcctgactgtgacccagatggccttcagccccaatgagaagttcctgctggccgtgtcccgggacaggacctggagcctgtggaagaagcaggacaccatcagccctgagtttgagcctgtgttcagcctgtttgccttcaccaacaagatcacctctgtgcacagccgcatcatctggagctgtgactggagcccagacagcaagtacttcttcaccggcagccgggacaagaaggtggtggtgtggggagaatgtgacagcacagatgactgcatcgagcacaacatcggcccctgcagctctgtgctggatgtgggcggcgctgtgacagctgtgtctgtgtgccctgtgctgcaccccagccagcgctacgtggtggccgtgggcctggagtgtgggaagatctgcctgtacacctggaagaagacagaccaggtgcctgagatcaatgactggacccactgtgtggagaccagccagagccagagccacaccctggccatcaggaagctgtgctggaagaactgcagcggcaagacagagcagaaggaggccgagggcgctgagtggctgcactttgccagctgtggggaggaccacacagtgaagatccaccgggtgaacaagtgtgccctgtag

SEQ ID NO: 19499 - DNA, 1152 bp, synthetic construct
  source 1..1152: mol_type = other DNA; note = Synthetic coding sequence
atggacaggacctgtgaggagaggcctgcagaagatggcagtgatgaagaagatcctgacagcatggaggcccccacccgcatccgggacaccccagaagatattgtgctggaggccccagccagcggcctggccttccacccagcccgggacctgctggccgctggagatgtggatggagatgtgtttgtgttctcctacagctgccaggagggggagaccaaggagctgtggagcagcggccaccacctgaaggcctgcagagctgtggccttctctgaagatggccagaagctgatcaccgtgtccaaggacaaggccatccacgtgctggatgtggagcagggccagctggagcggcgggtgtccaaggcccacggggcccccatcaacagcctgctgctggtggatgaaaatgtgctggccactggagatgacacaggaggcatctgcctgtgggaccagaggaaggagggccccctgatggacatgaggcagcacgaggagtacatcgctgacatggccctggaccctgccaagaagctgctgctgacagccagcggagatggctgcctgggcatcttcaacatcaagagaagaagatttgagctgctgtctgagccccagagcggggacctgacctctgtgaccctgatgaagtggggcaagaaggtggcctgtggcagcagcgagggcaccatctacctgttcaactggaatggatttggagccaccagtgacagatttgccctgcgggcagagagcattgactgcatggtgcctgtgacagagagcctgctgtgcaccggcagcacagatggagtcatccgggctgtgaacatcctgcccaacagagtggtgggctctgtgggccagcacactggagagcctgtggaggagctggccctgagccactgcggccgcttcctggccagcagcggccatgaccagaggctgaagttctgggacatggcccagctgcgggctgtggtggtggatgactacagaagaaggaagaagaagggcggccccctgcgggccctgagcagcaagacctggagcacagatgacttctttgctggcctgcgggaggagggagaagattccatggcccaggaggagaaggaggagactggagatgacagcgactag

SEQ ID NO: 19500 - DNA, 999 bp, synthetic construct
  source 1..999: mol_type = other DNA; note = Synthetic coding sequence
atgtctgaggccggggaggagcagcccatggagaccactggagccacagaaaatggccacgaggccgtgcctgagggggagagccctgctggggccggcaccggggctgctgctggggccggcggggccacagctgcccctccttctggcaaccagaatggagctgagggggaccagatcaatgccagcaagaatgaagaagatgctgggaagatgtttgtgggcggcctgtcctgggacaccagcaagaaggacctgaaggactacttcaccaagtttggagaggtggtggactgcaccatcaagatggaccccaacacaggccgcagccggggcttcggcttcatcctcttcaaggatgctgcctctgtggagaaggtgctggaccagaaggagcaccggctggatggccgggtcatcgaccccaagaaggccatggccatgaagaaggaccctgtgaagaagatctttgtgggcggcctgaaccctgaggccacagaggagaagatccgggagtactttggagaatttggagaaattgaggccatcgagctgcccatggaccccaagctgaacaagaggcggggctttgtgttcatcaccttcaaggaggaggagcctgtgaagaaggtgctggagaagaagttccacacagtgtctggcagcaaatgtgagatcaaggtggcccagcccaaggaggtgtaccagcagcagcagtatggcagcggcggccggggcaacagaaacagaggcaacagaggcagcggcggcggcggcggcggcggcggccagagccagagctggaaccagggctacggcaactactggaaccagggctacggctaccagcagggctacggccctggctacggcggctatgactacagcccctacggctactacggctacggccctggctatgactacagccagggcagcaccaactacggcaagagccagaggagaggaggccaccagaacaactacaagccctactag

SEQ ID NO: 19501 - DNA, 2745 bp, synthetic construct; identical to SEQ ID NO: 18914
  source 1..2745: mol_type = other DNA; note = Synthetic coding sequence

SEQ ID NO: 19502 - DNA, 2772 bp, synthetic construct
  source 1..2772: mol_type = other DNA; note = Synthetic coding sequence
atggccgccagcacaggctacgtgcggctgtggggcgccgcccgctgctgggtgctgcggcggcccatgctggccgctgctgggggccgggtgcccacagctgctggggcctggctgctgcggggccagaggacctgtgatgccagccccccctgggccctgtggggccggggccctgccatcggcggcagcgctggagctggggagggccctgtgatcacagccctgacccccatgaccatcccagatgtgttcccccacctgcccctgattgccatcaccagaaatcctgtgttcccccgcttcatcaagatcatcgaggtgaagaacaagaagctggtggagctgctgcggaggaaggtgcggctggcccagccctacgtgggcgtcttcctgaagagagatgacagcaatgaaagtgatgtggtggagagcctggatgagatctaccacacaggcacctttgcccagatccacgagatgcaggacctgggggacaagctgaggatgattgtgatgggccaccggcgggtgcacatcagccggcagctggaggtggagcctgaggagcctgaggccgagaacaagcacaagcccaggaggaagagcaagaggggcaagaaggaggctgaagatgagctgagcgcccggcaccctgctgagctggccatggagcccaccccagagctgcctgctgaggtgctgatggtggaggtggagaatgtggtgcatgaggacttccaggtgacagaggaggtgaaggccctgacagctgagatcgtgaagaccatccgggacatcatcgccctgaaccccctgtaccgggagagcgtgctgcagatgatgcaggccggccagagggtggtggacaaccccatctacctgagtgacatgggcgccgccctgactggagctgagagccatgagctgcaggatgtgctggaggagaccaacatccccaagaggctgtacaaggccctgagcctgctgaagaaggagtttgagctgagcaagctgcagcagaggctgggccgggaggtggaggagaagatcaagcagacccacaggaagtacctgctgcaggagcagctgaagatcatcaagaaggagctgggcctggagaaggatgacaaggatgccatcgaggagaagttccgggagcggctgaaggagctggtggtgcccaagcacgtgatggatgtggtggatgaggagctgagcaagctgggcctgctggacaaccacagcagcgagttcaacgtgaccaggaactacctggactggctgaccagcatcccctggggcaagtacagcaatgaaaacctggacctggcccgggcccaggccgtgctggaggaggaccactacggcatggaggatgtgaagaagaggatcctggagttcatcgctgtgtcccagctgcggggcagcacccagggcaagatcctgtgcttctacggccccccaggagtgggcaagaccagcatcgcccggagcatcgcccgggccctgaaccgggagtacttccgcttctctgtgggcggcatgacagatgtggccgagatcaagggccacaggaggacctacgtgggcgccatgcctgggaagatcatccagtgcctgaagaagaccaagacagagaaccccctcatcctgattgatgaggtggacaagattggccggggctaccagggcgaccccagcagcgccctgctggagctgctggaccctgagcagaatgccaacttcctggaccactacctggatgtgcctgtggacctgagcaaggtgctcttcatctgcacagccaacgtgacagacaccatccctgagcccctgcgggacaggatggagatgatcaacgtgtctggctacgtggcccaggagaagctggccatcgccgagcgctacctggtgccccaggcccgggccctgtgtggcctggatgagagcaaggccaagctgagcagtgatgtgctgaccctgctgatcaagcagtactgccgggagagcggcgtgaggaacctgcagaagcaggtggagaaggtgctgaggaagagcgcctacaagatcgtgtctggagaggccgagagcgtggaggtgaccccagagaacctgcaggactttgtgggcaagcctgtgttcaccgtggagaggatgtatgatgtgaccccacctggggtggtgatgggcctggcctggacagccatgggcggcagcaccctgtttgtggagaccagcctgcggcggccccaggacaaggatgccaagggggacaaggatggcagcctggaggtgacaggccagctgggggaggtgatgaaggagagcgcccgcatcgcctacacctttgcccgggccttcctgatgcagcacgccccagccaatgactacctggtgaccagccacatccacctgcacgtgcctgagggcgccacccccaaggatggccccagcgctggctgcaccatcgtgacagccctgctgagcctggccatgggccggcctgtgcggcagaacctggccatgaccggggaggtgtccctgaccgggaagatcctgcctgtgggcggcatcaaggagaagaccatcgccgccaagagagctggggtgacctgcatcgtgctgcctgctgagaacaagaaggacttctatgacctggccgccttcatcacagagggcctggaggtgcactttgtggagcactaccgggagatctttgatattgccttcccagatgagcaggccgaggccctggccgtggagaggtag

SEQ ID NO: 19503 - DNA, 681 bp, synthetic construct
  source 1..681: mol_type = other DNA; note = Synthetic coding sequence
atgggccccctgcccaggacagtggagctgttctatgatgtgctgagcccctacagctggctgggctttgagatcctgtgccgctaccagaacatctggaacatcaacctgcagctgcggcccagcctcatcaccggcatcatgaaggacagcggcaacaagcccccaggcctgctgcccaggaagggcctgtacatggccaatgacctgaagctgctgcggcaccacctgcagatccccatccacttccccaaggacttcctgtctgtgatgctggagaagggcagcctgagcgccatgaggttcctgacagctgtgaacctggagcaccctgagatgctggagaaggccagccgggagctgtggatgagggtgtggagcagaaatgaagacatcacagagccccagagcatcctggccgctgctgagaaggccggcatgtctgctgagcaggcccagggcctgctggagaagatcgccacccccaaggtgaagaaccagctgaaggagaccacagaggccgcctgccgctacggggccttcggcctgcccatcaccgtggcccacgtggatggccagacccacatgctgtttggaagtgacaggatggagctgctggcccacctgctgggggagaagtggatgggccccatccccccagctgtgaatgcccggctgtag

SEQ ID NO: 19504 - DNA, 2055 bp, synthetic construct
  source 1..2055: mol_type = other DNA; note = Synthetic coding sequence
atggaggccaaccacagcgagcagctgtctgctgagcggcagagcaccccacctggggacagcagcagcctgcccagccacaacggcctggagaaggaggatggccaggacagccccacccctgtgcagcccccagagaaggaggcctctgtgcacccagacatcagcgaggagctgaaccggcagctggaggacatcatcaacacctacggcagcgctgccagcacagctgggaaggagggcagcgcccgggccagcgagcagccagaaaatgctgagagcccagacaatgaagatggagactgtgaggagaccacagaggaggccggccgggagcctgtggccagcggggagcccccaacagtgaaggagcctgtgagcaacaaggagcagaagctggagaagaagatcctgaagggcctgggcaaggaggccaacctgctgatgcagaacctgaacaagctgcagaccccagaggagaagtttgacttcctgttcaagaagtatgcagagctgctggatgagcacaggacagagcagaagaagctgaagctgctgcagaagaagcaggtgcagatccagaaggagaaggaccagctgcagggcgagcacagccgggccatcctggcccggagcaagctggagagcctgtgccgggagctgcagaggcacaacaagaccctgaaggaggaggccctgcagagggcccgggaggaggaggagaagaggaaggagatcaccagccacttccagagcaccctgacagacatccagggccagatcgagcagcagagcgagaggaacatgaagctgtgccaggagaacacagagctggccgagaagctgaagagcatcatcgaccagtatgagctgcgggaggagcacctggacaagatcttcaagcaccgggagctgcagcagaagctggtggatgccaagctggagcaggcccaggagatgatgaaggaggccgaggagcggcacaagcgggagaaggagtacctgctgaaccaggccgctgagtggaagctgcaggccaaggtgctgaaggagcaggagaccgtgctgcaggcccagctgaccctgtacagcggccgctttgaggagttccagagcaccctgaccaagagcaatgaggtgtttgccaccttcaagcaggagatggacaagaccaccaagaagatgaagaagctggagaaggacacagccacctggaaggccaggtttgagaactgcaacaaggccctgctggacatgattgaggagaaggccctgcgggccaaggagtatgaatgttttgtgatgaagattggccgcctggagaacctgtgccgggccctgcaggaggagagaaatgagctgcacaagaagatcagagatgctgagatcagcgagaaggatgaccagagccagcacaacagtgatgaggagcctgagagcaatgtgtctgtggaccaggagattgatgctgaggaggtgaacagcgtgcagacagctgtgaagaacctggccacagccttcatgatcatccaccaccctgagagcaccccccaccagagcaaggagacccagcctgagatcggcagcagccaggagagcgcagatgctgccctgaaggagcctgagcagcccccactcatccccagccgggacagcgagagccccctgccccccctgaccccccaggccgaggccgagggcggcagtgatgctgagccccccagcaaggccagcaacagccctgctggcctgggcgctgagacccagtgtgagggcctgcctgtgggcgcccaggccgaccaggcctcctggaagccagaggccgaggccagcggccaggccccccaggcccccacagaggccagcctgcagaagatggaggctgatgtgcctgccccagcctgtgccgctgaggagcacgtggccgccatggtgcctgcctgtgagcccagccggcagccccccagggctgctgctgaggagctgcctgtgggcgccagcgctggcccccagcccagaaatgtggccgacaccaacctggagggcgtggactag

SEQ ID NO: 19505 - DNA, 1461 bp, synthetic construct
  source 1..1461: mol_type = other DNA; note = Synthetic coding sequence
atgaatggcaccctggaccacccagaccagcctgacctggatgccatcaagatgtttgtgggccaggtgcccaggacctggagcgagaaggacctgcgggagctgtttgagcagtatggagctgtgtatgagatcaacgtgctgcgggacaggagccagaaccccccccagagcaagggctgctgctttgtgaccttctacaccaggaaggccgccctggaggcccagaatgccctgcacaacatgaaggtgctgcccggcatgcaccaccccatccagatgaagccagctgacagcgagaagaacaatgctgtggaggacaggaagctgttcatcggcatgatcagcaagaagtgcacagaaaatgacatccgggtgatgttcagcagctttggccagatcgaggagtgccgcatcctgcggggcccagatggcctgagccggggctgtgcctttgtgaccttcaccacccgggccatggcccagacagccatcaaggccatgcaccaggcccagaccatggagggctgcagcagccccatggtggtgaagtttgctgacacccagaaggacaaggagcagaagaggatggcccagcagctgcagcagcagatgcagcagatctctgctgcctctgtgtggggcaacctggccggcctgaacaccctgggcccccagtacctggccctgtacctgcagctgctgcagcagacagccagcagcggcaacctgaacaccctgagcagcctgcaccccatgggcggcctgaatgccatgcagctgcagaacctggccgccctggccgccgccgccagcgctgcccagaacaccccatctggcaccaatgccctgaccaccagcagcagccccctgtctgtgctgaccagcagcggcagcagccccagcagcagcagcagcaacagcgtgaaccccatcgccagcctgggcgccctgcagaccctggccggggccacagctggcctgaatgtgggcagcctggccggcatggccgccctgaatggaggcctgggcagcagcggcctgagcaatggcaccggcagcaccatggaggccctgacccaggcctacagcggcatccagcagtatgctgctgctgccctgcccaccctgtacaaccagaacctgctgacccagcagagcatcggggctgctggcagccagaaggagggccctgagggcgccaacctcttcatctaccacctgccccaggagtttggagaccaggacctgctgcagatgttcatgccctttggaaatgtggtgtctgccaaggtgttcatcgacaagcagaccaacctgagcaagtgcttcggctttgtgtcctatgacaaccctgtgtctgcccaggccgccatccagagcatgaatggcttccagatcggcatgaagaggctgaaggtgcagctgaagaggagcaagaatgacagcaagccctactag

SEQ ID NO: 19506 - DNA, 7812 bp, synthetic construct
  source 1..7812: mol_type = other DNA; note = Synthetic coding sequence
atggagaaggccaccgtgcctgtggccgccgccacagctgctgagggggagggcagccccccagctgtggccgctgtggccggccccccagctgctgctgaggtgggcggcggcgtgggcggcagcagccgggcccggagcgccagcagcccccggggcatggtgcgggtgtgtgacctgctgctgaagaagaagccaccccagcagcagcaccacaaggccaagaggaacagaacctgccggccccccagcagcagcgagagcagcagtgacagcgacaacagcggcggcggcggcggcggcggcggcggcggcggcggcggcggcggcaccagcagcaacaacagcgaggaggaggaggatgatgatgatgaggaggaggaggtgtctgaggtggagagcttcatcctggaccaggatgacctggagaaccccatgctggagacagccagcaagctgctgctgagcggcacagcagatggagctgacctgaggacagtggaccctgagacccaggcccggctggaggccctgctggaggccgccggcatcggcaagctgagcacagcagatggcaaggcctttgctgaccctgaggtgctgcggcggctgaccagctctgtgtcctgtgccctggatgaagctgctgctgccctgaccaggatgagagctgagagcacagccaatgccggccagagcgacaacagaagcctggccgaggcctgcagtgaaggagatgtgaatgctgtgaggaagctgctgattgagggccgctctgtgaatgagcacacagaggagggggagagcctgctgtgcctggcctgcagcgctggctactatgagctggcccaggtgctgctggccatgcacgccaacgtggaggaccggggcatcaagggggacatcacccccctgatggccgccgccaacggcggccacgtgaagatcgtgaagctgctgctggcccacaaggcagatgtgaatgcccagagcagcactggaaacacagccctgacctacgcctgtgccggcggctacgtggatgtggtgaaggtgctgctggagagcggggccagcattgaggaccacaatgaaaatggccacacccccctgatggaggccggcagcgctggccacgtggaggtggcccggctgctgctggagaatggagctggcatcaacacccacagcaatgagttcaaggagagcgccctgaccctggcctgctacaagggccacctggagatggtgcgcttcctgctggaggccggggctgaccaggagcacaagacagatgagatgcacacagccctgatggaggcctgcatggatggccacgtggaggtggcccggctgctgctggacagcggggcccaggtgaacatgcctgctgacagctttgagagccccctgaccctggccgcctgtggcggccacgtggagctggccgccctgctgattgagcggggggccagcctggaggaggtgaatgatgagggctacacccccctgatggaggccgcccgggagggccacgaggagatggtggccctgctgctgggccagggcgccaacatcaatgcccagacagaggagacccaggagacagccctgaccctggcctgctgcggcggcttcctggaggtggccgacttcctgatcaaggccggggctgacatcgagctgggctgcagcacccccctgatggaggccgcccaggagggccacctggagctggtgaagtacctgctggccgccggggccaacgtgcacgccaccacagccaccggggacacagccctgacctacgcctgtgaaaatggccacacagatgtggctgatgtgctgctgcaggccggggctgacctggagcatgaaagtgaaggaggccgcacccccctgatgaaggccgcccgggccggccacgtgtgcaccgtgcagttcctgatcagcaagggggccaacgtgaacagaaccacagccaacaatgaccacacagtgctgagcctggcctgtgccggcggccacctggccgtggtggagctgctgctggcccacggggctgaccccacccaccggctgaaggatggcagcaccatgctgattgaggccgccaagggcggccacacctctgtggtgtgctacctgctggactaccccaacaacctgctgagcgcccctcctccagatgtgacccagctgaccccacccagccatgacctgaacagagccccccgggtgcctgtgcaggccctgcccatggtggtgcccccccaggagccagacaagcccccagccaacgtggccaccaccctgcccatccggaacaaggccgccagcaagcagaagagcagcagccacctgcctgccaacagccaggatgtgcagggctacatcaccaaccagagccctgagagcatcgtggaggaggcccagggcaagctgacagagctggagcagaggatcaaggaggccatcgagaagaatgcccagctgcagagcctggagctggcccacgccgaccagctgaccaaggagaagattgaggagctgaacaagacccgggaggagcagatccagaagaagcagaagatcctggaggagctgcagaaggtggagcgggagctgcagctgaagacccagcagcagctgaagaagcagtacctggaggtgaaggcccagaggatccagctgcagcagcagcagcagcagagctgccagcacctgggcctgctgacccctgtgggcgtgggggagcagctgtctgagggggactatgcccggctgcagcaggtggaccctgtgctgctgaaggatgagccccagcagacagctgcccagatgggctttgcccccatccagcccctggccatgccccaggccctgcccctggccgccggccccctgcccccaggcagcatcgccaacctgacagagctgcagggcgtcatcgtgggccagcctgtgctgggccaggcccagctggccggcctgggccagggcatcctgacagagacccagcagggcctgatggtggccagccctgcccagaccctgaatgacaccctggatgacatcatggctgctgtgtctggccgggccagcgccatgagcaacacccccacccacagcattgctgccagcatcagccagccccagacccccacccccagccccatcatcagccccagcgccatgctgcccatctacccagccattgatattgatgcccagacagagagcaaccacgacacagccctgaccctggcctgtgccggcggccacgaggagctggtgcagaccctgctggagcggggggccagcattgagcaccgggacaagaagggcttcacccccctcatcctggccgccacagctggccacgtgggcgtggtggagatcctgctggacaacggggctgacatcgaggcccagagcgagaggaccaaggacacccccctgagcctggcctgcagcggcggccggcaggaggtggtggagctgctgctggcccggggggccaacaaggagcacagaaatgtgtctgactacacccccctgagcctggccgccagcggcggctacgtgaacatcatcaagatcctgctgaatgctggagctgagatcaacagcaggacaggcagcaagctgggcatcagccccctgatgctggccgccatgaatggccacacagctgctgtgaagctgctgctggacatgggcagtgacatcaatgcccagatcgagaccaacagaaacacagccctgaccctggcctgcttccagggccgcacagaggtggtgtccctgctgctggacaggaaggccaacgtggagcaccgggccaagacaggcctgacccccctgatggaggccgccagcggcggctacgccgaggtgggccgggtgctgctggacaagggagcagatgtgaatgcccctcctgtgcccagcagccgggacacagccctgaccatcgctgctgacaagggccactacaagttctgtgagctgctgattggccgcggggcccacattgatgtgaggaacaagaagggcaacacccccctgtggctggccgccaacggcggccacctggatgtggtgcagctgctggtgcaggccggggctgatgtggatgctgctgacaacaggaagatcacccccctgatggccgccttcaggaagggccacgtgaaggtggtgcgctacctggtgaaggaggtgaaccagttccccagcgacagcgagtgcatgagatacatcgccaccatcacagacaaggagatgctgaagaagtgccacctgtgcatggagagcatcgtgcaggccaaggaccggcaggccgctgaggccaacaagaatgccagcatcctgctggaggagctggacctggagaagctgcgggaggagagccggcggctggccctggccgccaagcgggagaagaggaaggagaagaggaggaagaagaaggaggagcagaggaggaagctggaggagattgaggccaagaacaaggagaactttgagctgcaggccgcccaggagaaggagaagctgaaggtggaggatgagcctgaggtgctgacagagcccccatctgccaccaccaccaccaccatcggcatcagcgccacctggaccaccctggccggcagccacggcaagaggaacaacaccatcaccaccaccagcagcaagaggaagaacaggaagaacaagatcaccccagaaaatgtgcagatcatctttgatgaccccctgcccatctcctacagccagcctgagaaggtgaatggagagagcaagagcagcagcaccagcgagagcggggacagcgacaacatgaggatcagcagctgcagtgatgagagcagcaacagcaacagcagcaggaagagtgacaaccacagccctgctgtggtgaccaccaccgtgagcagcaagaagcagcccagcgtgctggtgaccttccccaaggaggagaggaagtctgtgtctgggaaggccagcatcaagctgtctgagaccatcagcgagggcaccagcaacagcctgagcacctgcaccaagagcggccccagccccctgagcagccccaacgggaagctgactgtggccagccccaagaggggccagaagcgggaggagggctggaaggaggtggtgagaagaagcaagaaggtgtctgtgcccagcaccgtcatcagccgggtgattggccggggcggctgcaacatcaatgccatccgggagttcaccggggcccacattgatattgacaagcagaaggacaagacaggagaccgcatcatcaccatccggggcggcacagagagcacccggcaggccacccagctgatcaatgccctgatcaaggaccctgacaaggagattgatgagctgatccccaagaaccggctgaagagcagcagcgccaacagcaagattggcagcagcgcccccaccaccacagctgccaacaccagcctgatgggcatcaagatgaccaccgtggccctgagcagcaccagccagacagccacagccctgactgtgcctgccatcagcagcgccagcacccacaagaccatcaagaaccctgtgaacaacgtgcggcccggcttccctgtgtccctgcccctggcctaccccccaccccagtttgcccacgccctgctggccgcccagaccttccagcagatccggcccccccggctgcccatgacccactttggaggcaccttccccccagcccagagcacctggggccccttccctgtgcggcccctgagccctgcccgggccaccaacagccccaagccccacatggtgcccaggcacagcaaccagaacagcagcggcagccaggtgaacagcgctggcagcctgaccagcagccccaccaccaccaccagcagcagcgccagcacagtgcccggcaccagcaccaacggcagccccagcagccccagcgtgcggcggcagctgtttgtgacagtggtgaagaccagcaatgccaccaccaccaccgtgaccaccacagccagcaacaacaacacagcccccaccaatgccacctaccccatgcccacagccaaggagcactaccctgtgagcagccccagcagccccagccccccagcccagcccggcggcgtgtccaggaacagccccctggactgtggcagcgccagccccaacaaggtggccagcagcagcgagcaggaggccggcagcccccctgtggtggagaccaccaacacccggccccccaacagcagcagcagcagcggcagcagcagcgcccacagcaaccagcagcagcccccaggctctgtgtcccaggagcccaggcctcccctgcagcagagccaggtgcccccacctgaggtgaggatgacagtgccccccctggccaccagcagcgcccctgtggccgtgcccagcacagcccctgtgacctaccccatgccccagacccccatgggctgcccccagcccacccccaagatggagaccccagccatccggcccccacctcatggcaccacagccccccacaagaacagcgcctctgtgcagaacagctctgtggccgtgctgtctgtgaaccacatcaagaggccccacagcgtgcccagctctgtgcagctgcccagcaccctgagcacccagagcgcctgccagaacagcgtgcacccagccaacaagcccatcgcccccaacttcagcgcccccctgcccttcggccccttcagcaccctgtttgagaacagccccaccagcgcccacgccttctggggcggctctgtggtgagcagccagagcaccccagagagcatgctgagcggcaagagcagctacctgcccaacagcgaccccctgcaccagagcgacaccagcaaggcccctggcttccggccccccctgcagaggcctgcccccagccccagcggcatcgtgaacatggacagcccctacggctctgtgacccccagcagcacccacctgggcaactttgccagcaacatcagcggcggccagatgtatggccctggggcccccctgggcggggccccagctgctgccaacttcaaccggcagcacttcagccccctgagcctgctgaccccctgcagcagcgccagcaatgacagcagcgcccagagcgtgtcctctggagtgcgggcccccagccctgcccccagctctgtgcccctgggcagcgagaagcccagcaatgtgtcccaggacaggaaggtgcctgtgcccatcggcacagagaggtctgcccgcatccggcagacaggcaccagcgcccccagcgtcatcggcagcaacctgagcacctctgtgggccacagcggcatctggagctttgagggcattggaggcaaccaggacaaggtggactggtgcaaccctggcatgggcaaccccatgatccaccggcccatgtctgaccccggggtcttcagccagcaccaggccatggagcgggacagcactggaattgtgaccccatctggcaccttccaccagcacgtgcctgctggctacatggacttccccaaggtgggcggcatgcccttctctgtgtatggaaatgccatgatcccccctgtggcccccatcccagatggagctgggggccccatcttcaacggcccccatgctgctgaccccagctggaacagcctcatcaagatggtgagcagcagcacagagaacaacggcccccagacagtgtggacaggcccctgggccccccacatgaacagcgtgcacatgaaccagctgggctag

SEQ ID NO: 19507 - DNA, 3075 bp, synthetic construct
  source 1..3075: mol_type = other DNA; note = Synthetic coding sequence
atgacagagggccgccgctgccaggtgcacctgctggatgacaggaagctggagctgctggtgcagcccaagctgctggccaaggagctgctggacctggtggccagccacttcaacctgaaggagaaggagtacttcggcatcgccttcacagatgagaccggccacctgaactggctgcagctggaccggcgggtgctggagcatgacttccccaagaagagcggccctgtggtgctgtacttctgtgtgcgcttctacatcgagagcatctcctacctgaaggacaatgccaccatcgagctgttcttcctgaatgccaagagctgcatctacaaggagctgattgatgtggacagcgaggtggtgtttgagctggccagctacatcctgcaggaggccaagggggacttcagcagcaatgaggtggtgcggagtgacctgaagaagctgcctgccctgcccacccaggccctgaaggagcaccccagcctggcctactgtgaagatagagtgattgagcactacaagaagctgaatggccagacccggggccaggccatcgtgaactacatgagcatcgtggagagcctgcccacctatggagtgcactactatgctgtgaaggacaagcagggcatcccctggtggctgggcctgagctacaagggcatcttccagtatgactaccatgacaaggtgaagcccaggaagatcttccagtggaggcagctggagaacctgtacttccgggagaagaagttctctgtggaggtgcatgacccccggcgggcctctgtgaccaggaggaccttcggccacagcggcattgctgtgcacacctggtacgcctgcccagccctgatcaagagcatctgggccatggccatcagccagcaccagttctacctggacaggaagcagagcaagagcaagatccatgctgcccggagcctgtctgagatcgccatcgacctgacagaaacaggcaccctgaagaccagcaagctggccaacatgggcagcaagggcaagatcatcagcggcagcagcggcagcctgctgagcagcggcagccaggagagtgacagcagccagagcgccaagaaggacatgctggccgccctgaagagccggcaggaggccctggaggagaccctgcggcagaggctggaggagctgaagaagctgtgcctgcgggaggccgagctgaccgggaagctgcctgtggagtaccccctggaccccggggaggagccccccatcgtgagaagaagaattggaacagccttcaagctggatgagcagaagatcctgcccaagggggaggaggccgagctggagcggctggagcgggagtttgccatccagagccagatcacagaagctgcccggcggctggccagtgaccccaacgtgtccaagaagctgaagaagcagaggaagaccagctacctgaatgccctgaagaagctgcaggagattgaaaatgccatcaatgaaaatcgcatcaagagcggcaagaagcccacccagagggccagcctcatcattgatgatggcaacatcgccagcgaggacagcagcctgagtgatgccctggtgctggaggatgaggacagccaggtgaccagcaccatcagccccctgcacagcccccacaagggcctgccccccaggcctcccagccacaacagacctcctccaccccagagcctggagggcctgcggcagatgcactaccacagaaatgactatgacaagagccccatcaagcccaagatgtggagcgagagcagcctggatgagccctatgagaaggtgaagaagaggagcagccacagccacagcagcagccacaagcgcttccccagcacaggcagctgtgccgaggccggcggcggcagcaacagcctgcagaacagccccatccggggcctgccccactggaacagccagagctccatgcccagcaccccagacctgcgggtgcgcagcccccactacgtgcacagcaccaggtctgtggacatcagccccacccggctgcacagcctggccctgcacttccgccacaggagcagcagcctggagagccagggcaagctgctgggctctgaaaatgacaccggcagcccagacttctacacccccaggaccaggagcagcaatggaagtgaccccatggatgactgcagcagctgcaccagccacagcagcagcgagcactactacccagcccagatgaatgccaactacagcaccctggccgaggacagccccagcaaggcccggcagaggcagaggcagaggcagagagctgctggggccctgggcagcgccagcagcggctccatgcccaacctggccgcccggggcggggccggcggggccggcggggccggcggcggcgtgtacctgcacagccagagccagcccagcagccagtaccgcatcaaggagtaccccctgtacatcgagggcggggccacccctgtggtggtgcgcagcctggagagtgaccaggagggccactacagcgtgaaggcccagttcaagaccagcaacagctacacagctgggggcctcttcaaggagagctggaggggcggcggcggagatgaaggagacaccggccgcctgacccccagccgcagccagatcctgcggacccccagcctgggccgggagggcgcccatgacaagggggccggccgggctgctgtgtctgatgagctgcggcagtggtaccagaggagcacagccagccacaaggagcacagccggctgagccacaccagcagcaccagcagtgacagcggcagccagtacagcaccagcagccagagcacctttgtggcccacagccgggtgaccaggatgccccagatgtgcaaggccaccagcgctgccctgccccagagccagaggagcagcacccccagcagcgagattggagccaccccacccagcagcccccaccacatcctgacctggcagacaggagaggccacagagaacagccccatcctggatggcagcgagagccccccccaccagagcacagatgaatag

SEQ ID NO: 19508 - DNA, 864 bp, synthetic construct
  source 1..864: mol_type = other DNA; note = Synthetic coding sequence
atgagccaggcctggtggcacacctctgtgtccccagccacccaggaggccaaggccggcggcctgctgcagccccggcggcagaggctgtggctgaagcgctgccgcatcagcagcagcgcctgtgaggacctgtctgctgccctgattgccaacaagaacctgaccaggatggacctgtctggaaatggagtgggcttccctggcatgatgctgctgtgtgagggcctgcggcacccccagtgccgcctgcagatgatccagctgaggaagtgccagctggagagcggggcctgccaggagatggcctctgtgctgggcaccaacccccacctggtggagctggacctgactggaaatgccctggaggacctgggcctgcggctgctgtgccagggcctgcggcaccctgtgtgccgcctgcggaccctgtggctgaagatctgccgcctgacagctgctgcctgtgatgagctggccagcaccctgtctgtgaaccagagcctgcgggagctggacctgagcctgaatgagctgggggacctgggcgtgctgctgctgtgtgagggcctgcggcaccccacctgcaagctgcagaccctgcggctggacagctgtggcctgacagccaaggcctgtgagaacctgtacttcaccctgggcatcaaccagaccctgacagacctgtacctgaccaacaatgccctgggggacacaggagtgcggctgctgtgcaagaggctgagccaccctggctgcaagctgcgggtgctgtggctgtttggcatggacctgaacaagatgacccacagccggctggccgccctgcgggtgaccaagccctacctggacatcggctgctag

SEQ ID NO: 19509 - DNA, 615 bp, synthetic construct
  source 1..615: mol_type = other DNA; note = Synthetic coding sequence
atggccggctacctgtctgagagtgactttgtgatggtggaggagggcttcagcacccgggacctgctgaaggagctgaccctgggcgccagccaggccaccacagatgaggtggccgccttctttgtggccgacctgggcgccatcgtgaggaagcacttctgcttcctgaagtgcctgccccgggtgcggcccttctatgctgtgaagtgcaacagcagccctggggtgctgaaggtgctggcccagctgggcctgggcttcagctgtgccaacaagatcgccagcgtcatcaacagcgccctggacctgtacttccctgagggctgcggcgtggacatctttgctgagctgggccgctactacgtgaccagcgccttcaccgtggccgtgtccatcatcgccaagaaggaggtgctgctggaccagcccggccgggaggaggagaatggcagcaccagcaagaccatcgtgtaccacctggatgagggcgtgtatggcatcttcaacagcgtgctgtttgacaacatctgccccacccccatcctgcagaagagcaagaaccacagcccctgctacatgagcctggagagcatccacttcatcgctgtgtag

SEQ ID NO: 19510 - DNA, 519 bp, synthetic construct
  source 1..519: mol_type = other DNA; note = Synthetic coding sequence
atgatgaagctgaagagcaaccagaccaggacctatgatggagatggctacaagaagagagctgcctgcctgtgcttccgctctgagagcgaggaggaggtgctgctggtgagcagcagccgccacccagaccgctggatcgtgcctgggggcggcatggagcctgaggaggagcccagcgtggccgctgtgcgggaggtgtgtgaggaggccggcgtgaagggcaccctgggccgcctggtgggcatctttgagaaccaggagaggaagcacaggacctacgtgtatgtgctgattgtgacagaggtgctggaggactgggaggacagcgtgaacattggaaggaagcgggagtggttcaagattgaagatgccatcaaggtgctgcagtaccacaagcctgtgcaggccagctactttgagaccctgcggcagggctacagcgccaacaacggcacccctgtggtggccaccacctacagcgtgtctgcccagagctccatgagcggcatcagatag

SEQ ID NO: 19511 - DNA, 4284 bp, synthetic construct; identical to SEQ ID NO: 18772
  source 1..4284: mol_type = other DNA; note = Synthetic coding sequence

SEQ ID NO: 19512 - DNA, 1179 bp, synthetic construct
  source 1..1179: mol_type = other DNA; note = Synthetic coding sequence
atgggagacagctgcccagctgtgaccttccgcagccagaaggaaaatagagctggcctgcaggagaagctgcgctacctgcagcagcagctgcaggatgagaccccccggcggcaggaggccgagctgcaggagcctgaggagaagcaggagcctgaggagaagcaggagcctgaggagaagcagaagccagaggccggcctgtcctggaacagcctgggccctgctgccaccagccagggctgccccggccccccaggcagcccagacaagcccagccggccccacggcctggtgcctgctggctggggcatgggccccagggctggggagggcccctacgtgtctgagcaggagctgcagaagctgttcaccggcatcgaggagctgcggcgggaggtgagcagcctgacagcccgctggcaccaggaggagggcgctgtgcaggaggccctgcggctgctgggcggcctgggcggccgggtggatggcttcctgggccagtgggagcgggcccagcgggagcaggcccagacagcccgggacctgcaggagctgcggggccgggcagatgagctgtgcaccatggtggagaggtctgctgtgtctgtggccagcctgcggtctgagctggagggcctgggccccctgaagcccatcctggaggagtttggccggcagttccagaacagccggcggggccctgacctgtccatgaacctggacaggagccaccagggcaactgtgcccgctgtgccagccagggcagccagctgagcacagagagcctgcagcagctgctggaccgggccctgaccagcctggtggatgaggtgaagcagaggggcctgaccccagcctgccccagctgccagaggctgcacaagaagatcctggagctggagcggcaggccctggccaagcacgtgcgggcagaggccctgagcagcaccctgcggctggcccaggatgaggccctgcgggccaagaacctgctgctgacagacaagatgaagccagaggagaagatggccaccctggaccacctgcacctgaagatgtgcagcctgcatgaccacctgagcaacctgcccctggagggcagcacaggcaccatgggcggcggcagcagcgctggcaccccacccaagcagggcggcagcgcccctgagcagtag

SEQ ID NO: 19513 - DNA, 1692 bp, synthetic construct
  source 1..1692: mol_type = other DNA; note = Synthetic coding sequence
atgtctgatgatgctggggacaccctggccactggagacaaggccgaggtgacagagatgcccaacagcgacagcctgcctgaagatgctgaggtgcactgtgacagcgctgctgtgtcccatgagcccaccccagctgaccccagaggagagggccatgaaaatgctgctgtgcagggcgctggggccgccgccatcggcccccctgtgcagccccaggatgccaatgccctggagccccccctgaatggagatgtgacagaggacaccctggctgaatgtattgattctgtgtccctggaggccgagcccaggtctgagatccccctgcaggagcagaactacctggccgtggacagccccccatctgggggcggctgggccggctggggctcctggggcaagagcctgctgagcagcgccagcgccaccgtgggccacggcctgacagctgtgaaggagaaggccggggccaccctgcgcatccatggagtgaacagcggcagcagcgagggcgcccagcccaacacagaaaatggagtgcctgagatcacagatgctgccacagaccagggccctgctgagagcccccccaccagccccagcagcgccagccggggcatgctgagcgccatcaccaacgtggtgcagaacacaggcaagtctgtgctgactggaggcctggatgccctggagttcatcggcaagaagaccatgaatgtgctggccgagagtgaccccggcttcaagaggaccaagaccctgatggagaggacagtgtccctgagccagatgctgcgggaggccaaggagaaggagaagcagaggctggcccagcagctgaccatggagaggacagcccactacggcatgctgtttgatgagtaccagggcctgagccacctggaggccctggagatcctgagcaatgaaagtgagagcaaggtgcagagcttcctggccagcctggatggagagaagctggagctgctgaagaatgacctgatcagcatcaaggacatctttgctgccaaggagctggagaatgaggagaaccaggaggagcagggcctggaggagaagggggaggagtttgccaggatgctgacagagctgctgtttgagctgcacgtggccgccaccccagacaagctgaacaaggccatgaagagggcccatgactgggtggaggaggaccagacagtggtgtctgtggatgtggccaaggtgtctgaggaggagaccaagaaggaggagaaggaggagaagagccaggacccccaggaggacaagaaggaggagaagaagaccaagaccatcgaggaggtgtacatgagcagcattgagagcctggccgaggtgacagcccgctgcatcgagcagctgcacaaggtggccgagctgatcctgcacggccaggaggaggagaagccagcccaggaccaggccaaggtgctgatcaagctgaccacagccatgtgcaatgaggtggccagcctgagcaagaagttcaccaacagcctgaccaccgtgggcagcaacaagaaggccgaggtgctgaaccccatgatcagctctgtgctgctggagggctgcaacagcaccacctacatccaggatgccttccagctgctgctgcctgtgctgcaggtgagccacatccagaccagctgcctgaaggcccagccctag

SEQ ID NO: 19514 - DNA, 1257 bp, synthetic construct
  source 1..1257: mol_type = other DNA; note = Synthetic coding sequence
atgttctccccagaccaggagaaccaccccagcaaggcccctgtgaagtatggagagctgattgtgctgggctacaacggcagcctgcccaatggagaccggggccgcaggaagagcagatttgccctcttcaagaggcccaaggccaacggggtgaagcccagcacagtgcacatcgcctgcaccccccaggccgccaaggccatcagcaacaaggaccagcacagcatctcctacaccctgagccgggcccagacagtggtggtggagtacacccatgacagcaacacagacatgttccagatcggccgcagcacagagagccccatcgactttgtggtgacagacacagtgcccggcagccagagcaacagcgacacccagagcgtgcagagcaccatcagcagatttgcctgccgcatcatctgtgaaagaaatccacccttcaccgcccgcatctatgctgctggctttgacagcagcaagaacatcttcctgggggagaaggccgccaagtggaagaccagtgatggccagatggatggcctgaccaccaacggggtgctggtgatgcaccccagaaatggcttcacagaggacagcaagccaggcatctggagggagatctctgtgtgtggaaatgtgttcagcctgcgggagaccaggtctgcccagcagaggggcaagatggtggagattgagaccaaccagctgcaggacggcagcctgattgacctgtgtggggccaccctgctgtggaggacagctgagggcctgagccacacccccaccgtgaagcacctggaggccctgcggcaggagatcaatgctgcccggccccagtgccctgtgggcttcaacaccctggccttccccagcatgaagaggaaggatgtggtggatgagaagcagccctgggtgtacctgaactgtggccacgtgcacggctaccacaactggggcaacaaggaggagagagatggcaaggaccgggagtgccccatgtgccgctctgtgggcccctacgtgcccctgtggctgggctgtgaggccggcttctacgtggatgctggcccccccacccacgccttcagcccctgtggccacgtgtgcagcgagaagaccacagcctactggagccagatccccctgccccacggcacccacaccttccacgccgcctgccccttctgtgcccaccagctggccggggagcagggctacatccgcctcatcttccagggccccctggactag

SEQ ID NO: 19515 - DNA, 3963 bp, synthetic construct
  source 1..3963: mol_type = other DNA; note = Synthetic coding sequence
atgcaggatgacagcattgaggccagcaccagcatcagccagctgctgcgggagagctacctggccgagaccaggcaccggggcaacaatgaaagaagcagagctgagcccagcagcaacccctgccacttcggcagccccagcggggctgctgagggcggcggcggccaggatgacctgcctgacctgagcgccttcctgagccaggaggagctggatgaatctgtgaacctggcccggctggccatcaactatgaccccctggagaaggcagatgagacccaggccaggaagaggctgagcccagaccagatgaagcacagccccaacctgagctttgagcccaacttctgccaggacaaccccaggagccccaccagcagcaaggagagcccccaggaggccaagaggccccagtactgcagcgagacccagagcaagaaggtgttcctgaacaaggctgctgacttcatcgaggagctgagcagcctcttcaagagccacagcagcaagaggatccggccccgggcctgcaagaaccacaagagcaagctggagagccagaacaaggtgatgcaggagaacagcagcagcttcagtgacctgtctgaaagaagagagaggagctctgtgcccatccccatcccagctgacacccgggacaatgaggtgaaccacgccctggagcagcaggaggccaagagaagagaggccgagcaggccgccagcgaggccgccggcggggacaccaccccaggcagcagccccagcagcctgtactatgaggagcccctgggccagcccccacgcttcacccagaagctgcggagccgggaggtgcctgagggcaccagggtgcagctggactgcatcgtggtgggcatccccccaccccaggtgcgctggtactgtgagggcaaggagctggagaacagcccagacatccacatcgtgcaggccggcaacctgcacagcctgaccatcgccgaggcctttgaggaggacaccggccgctacagctgctttgccagcaacatctatggaacagacagcaccagcgctgagatctacatcgagggcgtgagcagcagtgacagcgagggggaccccaacaaggaggagatgaaccgcatccagaagcccaatgaggtgagcagcccccccaccaccagcgctgtgattcctcctgctgtgccccaggcccagcacctggtggcccagccccgggtggccaccatccagcagtgccagagccccaccaactacctgcagggcctggatggcaagcccatcatcgccgcccctgtgttcaccaagatgctgcagaacctgagcgccagcgagggccagctggtggtgtttgaatgtcgggtgaagggggcccccagccccaaggtggagtggtaccgggagggcaccctgattgaggacagcccagacttccgcatcctgcagaagaagcccaggtccatggccgagcctgaggagatctgcaccctggtgattgctgaggtgtttgctgaggacagcggctgcttcacctgcacagccagcaacaagtatggaacagtgagcagcatcgcccagctgcacgtgagaggaaatgaagacctgagcaacaacggcagcctgcacagcgccaacagcaccaccaacctggccgccatcgagccccagcccagccccccccacagcgagcccccatctgtggagcagccccccaagcccaagctggagggcgtgctggtgaaccacaatgagcccaggagcagcagccgcatcggcctgcgggtgcacttcaacctgcctgaagatgacaagggcagcgaggccagcagcgaggccggcgtggtgaccacccggcagaccaggccagacagcttccaggagcgcttcaacggccaggccaccaagaccccagagcccagcagccctgtgaaggagcccccacctgtgctggccaagcccaagctggacagcacccagctgcagcagctgcacaaccaggtgctgctggagcagcaccagctgcagaaccccccacccagcagccccaaggagttccccttctccatgacagtgctgaacagcaatgcccccccagctgtgaccaccagcagcaagcaggtgaaggcccccagcagccagaccttcagcctggcccggcccaagtacttcttccccagcaccaacaccacagctgccaccgtggcccccagcagcagccctgtgttcaccctgagcagcaccccccagaccatccagaggacagtgtccaaggagagcctgctggtgagccaccccagcgtgcagaccaagagccctgggggcctgagcatccagaatgagcccctgcccccaggccccacagagcccaccccaccacccttcaccttcagcatccccagcggcaaccagttccagccccgctgtgtgagccccatccctgtgagccccaccagccgcatccagaaccctgtggccttcctgagctctgtgctgcccagcctgcctgccatcccccccaccaatgccatgggcctgcccaggtctgcccccagcatgcccagccagggcctggccaagaagaacaccaagagcccccagcctgtgaatgatgacaacatccgggagaccaagaatgctgtgatccgggacctgggcaagaagatcaccttcagtgatgtgcggcccaaccagcaggagtacaagatcagcagctttgagcagaggctgatgaatgaaattgagttccggctggagaggacccctgtggatgaaagtgatgatgagatccagcatgatgagatccccactggaaaatgtattgcccccatctttgacaagaggctgaagcacttccgggtgacagagggcagccctgtgaccttcacctgcaagatcgtgggcatccctgtgcccaaggtgtactggttcaaggatggcaagcagatcagcaagagaaatgagcactgcaagatgagaagagaaggagatggcacctgcagcctgcacatcgagagcaccaccagtgatgatgatggcaactacaccatcatggccgccaacccccagggccgcatcagctgcagcggccacctgatggtgcagagcctgcccatccgcagccggctgaccagcgctggccagagccaccggggccgcagccgggtgcaggagcgggacaaggagcccctgcaggagcgcttcttccggccccacttcctgcaggcccctggggacatggtggcccacgagggccgcctgtgccgcctggactgcaaggtgtctggcctgcccccacctgagctgacctggctgctgaatggccagcctgtgctgcctgatgccagccacaagatgctggtgcgggagaccggggtgcacagcctgctgattgaccccctgacccagagagatgctggcacctacaagtgcatcgccaccaacaagacaggccagaacagcttcagcctggagctgtctgtggtggccaaggaggtgaagaaggcccctgtgatcctggagaagctgcagaactgtggggtgcctgagggccaccctgtgcggctggagtgcagggtcatcggcatgcctcctcctgtgttctactggaagaaggacaatgagaccatcccctgcacccgggagcgcatctccatgcaccaggacaccaccggctacgcctgcctgctgatccagcctgccaagaagagtgatgctggctggtacaccctgagcgccaagaatgaggccggcatcgtgtcctgcacagcccggctggacatctatgcccagtggcaccaccagatccccccacccatgtctgtgcggcccagcggcagccgctatggcagcctgaccagcaagggcctggacatcttcagcgccttcagctccatggagagcaccatggtgtacagctgcagcagccgctctgtggtggagagtgatgagctgtag

SEQ ID NO: 19516 - DNA, 4206 bp, synthetic construct
  source 1..4206: mol_type = other DNA; note = Synthetic coding sequence
atggccagctgtgccagcattgatattgaagatgccacccagcacctgcgggacatcctgaagctggacaggcctgctgggggccccagcgctgagagcccccggcccagcagcgcctacaatggagacctgaatggcctgctggtgcctgaccccctgtgcagcggggacagcaccagcgccaacaagacaggcctgcggaccatgccacccatcaacctgcaggagaagcaggtgatctgcctgtctggagatgacagcagcacctgcatcggcatcctggccaaggaggtggagatcgtggccagcagtgacagcagcatcagcagcaaggcccggggcagcaacaaggtgaagatccagcctgtggccaagtatgactgggagcagaagtactactacggcaacctgattgctgtgagcaacagcttcctggcctatgccatccgggccgccaacaacggcagcgccatggtgcgggtcatctctgtgtccaccagcgagaggaccctgctgaagggcttcaccggctctgtggccgacctggcctttgcccacctgaacagcccccagctggcctgcctggatgaggccggcaacctgtttgtgtggaggctggccctggtgaatggcaagatccaggaggagatcctggtgcacatccggcagcctgagggcacccccctgaaccacttccgccgcatcatctggtgccccttcatccctgaggagagcgaggactgctgtgaggagagcagccccaccgtggccctgctgcatgaagatagagctgaggtgtgggacctggacatgctgcggagcagccacagcacctggcctgtggatgtgtcccagatcaagcagggcttcatcgtggtgaagggccacagcacctgcctgtctgagggcgccctgagcccagatggcaccgtgctggccacagccagccatgatggctacgtgaagttctggcagatctacatcgagggccaggatgagccccgctgcctgcacgagtggaagccccatgatggccggcccctgagctgcctgctcttctgtgacaaccacaagaagcaggaccctgatgtgcccttctggaggttcctgatcaccggggctgaccagaaccgggagctgaagatgtggtgcaccgtgtcctggacctgcctgcagaccatccgcttctccccagacatcttcagctctgtgtctgtgccccccagcctgaaggtgtgcctggacctgtctgctgagtacctgatcctgagtgatgtgcagaggaaggtgctgtatgtgatggagctgctgcagaaccaggaggagggccacgcctgcttcagcagcatcagcgagttcctgctgacccaccctgtgctgagctttggcatccaggtggtgagccgctgccgcctgcggcacacagaggtgctgcctgctgaggaggagaatgacagcctgggcgcagatggcacccatggagctggggccatggagagcgctgctggggtgctgatcaagctgttctgtgtgcacaccaaggccctgcaggatgtgcagatccgcttccagccccagctgaacccagatgtggtggcccccctgcccacccacacagcccacgaggacttcaccttcggggagagcaggcctgagctgggcagcgagggcctgggcagcgctgcccacggcagccagcctgacctgcggcgcatcgtggagctgcctgccccagctgacttcctgagcctgagcagcgagaccaagcccaagctgatgaccccagatgccttcatgacccccagcgccagcctgcagcagatcacagccagccccagcagcagcagcagcggcagcagcagcagcagcagcagcagcagcagcagcctgacagctgtgtctgccatgagcagcaccagcgctgtggaccccagcctgaccaggcctcctgaggagctgaccctgagccccaagctgcagctggatggcagcctgaccatgagcagcagcggcagcctgcaggccagcccccggggcctgctgcccggcctgctgcctgccccagctgacaagctgacccccaagggccctggccaggtgcccacagccaccagcgccctgagcctggagctgcaggaggtggagcccctgggcctgccccaggccagccccagcaggaccaggagcccagatgtgatcagcagcgccagcacagccctgagccaggacatccctgagatcgccagcgaggccctgagccggggcttcggcagcagcgcccctgagggcctggagccagacagcatggccagcgctgccagcgccctgcacctgctgagcccccggcccaggcctggccctgagctgggcccccagctgggcctggatggcggccctggagatggagacagacacaacacccccagcctgctggaggccgccctgacccaggaggccagcaccccagacagccaggtgtggcccacagccccagacatcacccgggagacctgcagcaccctggccgagagccccagaaatggcctgcaggagaagcacaagagcctggccttccacaggcctccctaccacctgctgcagcagagggacagccaggatgccagcgctgagcagagcgaccatgatgatgaggtggccagcctggccagcgccagcggcggcttcggcaccaaggtgcctgccccccggctgcctgccaaggactggaagaccaagggcagccccaggaccagccccaagctgaagaggaagagcaagaaggatgatggagatgctgccatgggcagccggctgacagagcaccaggtggccgagcccccagaggactggccagccctgatctggcagcagcagcgggagctggccgagctgcggcacagccaggaggagctgctgcagaggctgtgcacccagctggagggcctgcagagcacagtgactggacatgtggagcgggccctggagaccaggcatgagcaggagcagaggcggctggagcgggccctggccgagggccagcagaggggcggccagctgcaggagcagctgacccagcagctgagccaggccctgagcagcgctgtggccggccgcctggagaggagcatcagagatgagatcaagaagacagtgcccccctgtgtgagccgcagcctggagcccatggccggccagctgagcaacagcgtggccaccaagctgacagctgtggagggctccatgaaggagaacatcagcaagctgctgaagagcaagaacctgacagatgccatcgcccgggctgctgctgacaccctgcagggccccatgcaggccgcctaccgggaggccttccagagcgtggtgctgcctgcctttgagaagagctgccaggccatgttccagcagatcaatgacagcttccggctgggcacccaggagtacctgcagcagctggagagccacatgaagagcaggaaggcccgggagcaggaggcccgggagcctgtgctggcccagctgcggggcctggtgtccaccctgcagagcgccacagagcagatggccgccaccgtggccggctctgtgcgggcagaggtgcagcaccagctgcacgtggccgtgggcagcctgcaggagagcatcctggcccaggtgcagagaattgtgaagggggaggtgtctgtggccctgaaggagcagcaggccgctgtgaccagcagcatcatgcaggccatgaggtctgctgctggcacccctgtgcccagcgcccacctggactgccaggcccagcaggcccacatcctgcagctgctgcagcagggccacctgaaccaggccttccagcaggccctgacagctgctgacctgaacctggtgctgtatgtgtgtgaaacagtggaccctgcccaggtgtttggccagcccccctgccccctgagccagcctgtgctgctgagcctcatccagcagctggccagtgacctgggcaccaggacagacctgaagctgagctacctggaggaggccgtgatgcacctggaccacagcgaccccatcacccgggaccacatgggctctgtgatggcccaggtgcggcagaagctgttccagttcctgcaggccgagccccacaacagcctgggcaaggccgcccggcggctgagcctgatgctgcacggcctggtgacccccagcctgccctag

SEQ ID NO: 19517 - DNA, 576 bp, synthetic construct
  source 1..576: mol_type = other DNA; note = Synthetic coding sequence
atgagcagtggagcagatggcggcggcggcgctgctgtggccgcccggagtgacaagggcagccctggagaagatggctttgtgcccagcgccctgggcacccgggagcactgggatgctgtgtatgaaagagagctgcagaccttccgggagtatggagacacaggagagatctggtttggagaggagagcatgaacagactcatccgctggatgcagaagcacaagatccccctggatgcctctgtgctggacatcggcactggaaatggagtcttcctggtggagctggccaagtttggcttcagcaacatcaccggcatcgactacagccccagcgccatccagctgagcggcagcatcatcgagaaggagggcctgagcaacatcaagctgaaggtggaggacttcctgaacctgagcacccagctgagcggcttccacatctgcatcgacaagggcacctttgatgccatcagcctgaacccagacaatgccatcgagaagaggaagcagtatgtgaagagcctgagccgggtgctgaaggtgaagggcttcttcaacaacgtgatgtag

SEQ ID NO: 19518 - DNA, 2622 bp, synthetic construct
  source 1..2622: mol_type = other DNA; note = Synthetic coding sequence
atgggcaaccgggagatggaggagctgatccccctggtgaaccggctgcaggatgccttcagcgccctgggccagagctgcctgctggagctgccccagattgctgtggtgggcggccagagcgctgggaagagctctgtgctggagaactttgtgggccgggacttcctgccccggggcagcggcatcgtgacccggcggcccctggtgctgcagctggtgaccagcaaggccgagtatgcagagttcctgcactgcaagggcaagaagttcacagactttgatgaggtgcggctggagattgaagctgagacagacagagtgacaggcatgaacaagggcatcagcagcatccccatcaacctgcgggtgtacagcccccacgtgctgaacctgaccctgattgacctgcccggcatcaccaaggtgcctgtgggggaccagcccccagacatcgagtaccagatccgggagatgatcatgcagttcatcacccgggagaactgcctgatcctggccgtgaccccagccaacacagacctggccaacagtgatgccctgaagctggccaaggaggtggacccccagggcctgcggaccatcggggtcatcaccaagctggacctgatggatgagggcacagatgccagagatgtgctggagaacaagctgctgcccctgcggcggggctacgtgggcgtggtgaacagaagccagaaggacattgatggcaagaaggacatcaaggccgccatgctggccgagaggaagttcttcctgagccacccagcctaccgccacatcgctgacaggatgggcaccccccacctgcagaaggtgctgaaccagcagctgaccaaccacatccgggacaccctgcccaacttcaggaacaagctgcagggccagctgctgagcattgaacatgaggtggaggcctacaagaacttcaagccagaggaccccaccaggaagaccaaggccctgctgcagatggtgcagcagtttgctgtggactttgagaagagaattgagggcagcggggaccaggtggacaccctggagctgtctggaggagccaagatcaaccgcatcttccacgagcgcttcccctttgagatcgtgaagatggagttcaatgagaaggagctgcggcgggagatctcctatgccatcaagaacatccacggcatcagaacaggcctcttcaccccagacatggcctttgaggccatcgtgaagaagcagatcgtgaagctgaagggccccagcctgaagtctgtggacctggtgatccaggagctgatcaacacagtgaagaagtgcaccaagaagctggccaacttcccccggctgtgtgaggagacagaaagaattgtggccaaccacatccgggagcgggagggcaagaccaaggaccaggtgctgctgctgattgacatccaggtgtcctacatcaacaccaaccacgaggacttcatcggctttgccaatgcccagcagaggagcagccaggtgcacaagaagaccaccgtgggcaaccagggcaccaacctgccccccagccggcagatcgtcatcaggaagggctggctgaccatcagcaacatcggcatcatgaagggcggcagcaagggctactggtttgtgctgacagctgagagcctgtcctggtacaaggatgatgaggagaaggagaagaagtacatgctgcccctggacaacctgaaggtgagagatgtggagaagagcttcatgagcagcaagcacatctttgccctcttcaacacagagcagagaaatgtgtacaaggactaccgcttcctggagctggcctgtgacagccaggaggatgtggacagctggaaggccagcctgctgcgggccggcgtgtacccagacaagtctgtgatgaacaagaaggcagaaaatgatgaaaatggccaggccgagaacttctccatggacccccagctggagcggcaggtggagaccatccggaacctggtggacagctacatgagcatcatcaacaagtgcatccgggacctgatccccaagaccatcatgcacctgatgatcaacaacgtgaaggacttcatcaacagcgagctgctggcccagctgtacagcagcgaggaccagaacaccctgatggaggagagcgctgagcaggcccagaggagagatgagatgctgaggatgtaccaggccctgaaggaggccctgggcatcatcggggacatcagcacagccaccgtgtccaccccagcccctcctcctgtggatgacagctggatccagcacagcagaagaagccccccacccagccccaccacccagaggcggcccaccctgagcgcccccctggcccggcccaccagcggccggggccctgccccagccatccccagccctggcccccacagcggggcccctcctgtgcccttccggcccggccccctgccccccttccccagcagcagtgacagctttggagccccaccccaggtgcccagccggcccacccgggccccacccagcgtgcccagccggcggcccccacccagccccacccggcccaccatcatccggcccctggagagcagcctgctggactag

SEQ ID NO: 19519 - DNA, 3111 bp, synthetic construct
  source 1..3111: mol_type = other DNA; note = Synthetic coding sequence
atgaggaagcaggaggtgaggacaggccgggaggccggccagggccacggcaccggcagccctgctgagcaggtgaaggccctgatggacctgctggccggcaagggcagccagggcagccaggccccccaggccctggacaggaccccagatgcccccctgggcccctgcagcaatgacagccgcatccagaggcacaggaaggccctgctgagcaaggtgggcggcggccctgagctgggcggcccctggcaccggctggccagcctgctgctggtggagggcctgacagacctgcagctgcgggagcatgacttcacccaggtggaggccacccggggcggcggccacccagccaggacagtggccctggacaggctcttcctgcccctgagccgggtgtctgtgcccccccgggtgtccatcaccatcggcgtggccggcatgggcaagaccaccctggtgcgccactttgtgcggctgtgggcccacggccaggtgggcaaggacttcagcctggtgctgcccctgaccttccgggacctgaacacccatgagaagctgtgtgccgacaggctcatctgcagcgtcttcccccacgtgggggagcccagcctggccgtggccgtgcctgcccgggccctgctgatcctggatggcctggatgaatgtaggacccccctggacttcagcaacacagtggcctgcacagaccccaagaaggagatccctgtggaccacctgatcaccaacatcatccggggcaacctcttccctgaggtgtccatctggatcaccagccggcccagcgccagcggccagatccctgggggcctggtggacaggatgacagagatccggggcttcaatgaggaggagatcaaggtgtgcctggagcagatgtttcctgaggaccaggccctgctgggctggatgctgagccaggtgcaggccgaccgggccctgtacctgatgtgcaccgtgcctgccttctgccgcctgaccggcatggccctgggccacctgtggaggagcaggacaggcccccaggatgctgagctgtggccacccaggaccctgtgtgagctgtacagctggtacttcaggatggccctgtctggagagggccaggagaagggcaaggccagcccccgcatcgagcaggtggcccatggaggcaggaagatggtgggcaccctgggccgcctggccttccacggcctgctgaagaagaagtatgtgttctatgagcaggacatgaaggcctttggagtggacctggccctgctgcagggcgccccctgcagctgcttcctgcagcgggaggagaccctggccagctctgtggcctactgcttcacccacctgagcctgcaggagtttgtggccgccgcctactactacggggccagccggcgggccatctttgacctcttcacagagagcggcgtgtcctggccccggctgggcttcctgacccacttccgctctgctgcccagagggccatgcaggccgaggatggccgcctggatgtgttcctgcgcttcctgagcggcctgctgagcccccgggtgaatgccctgctggccggcagcctgctggcccagggcgagcaccaggcctaccgcacccaggtggccgagctgctgcagggctgcctgcggccagatgctgctgtgtgtgcccgggccatcaacgtgctgcactgcctgcacgagctgcagcacacagagctggcccggtctgtggaggaggccatggagagcggggccctggcccggctgaccggccctgcccaccgggccgccctggcctacctgctgcaggtgtctgatgcctgtgcccaggaggccaacctgagcctgagcctgagccagggcgtgctgcagagcctgctgccccagctgctgtactgcaggaagctgcggctggacaccaaccagttccaggaccctgtgatggagctgctgggctctgtgctgagcggcaaggactgccgcatccagaagatcagcctggccgagaaccagatcagcaacaagggggccaaggccctggcccggagcctgctggtgaacagaagcctgaccagcctggacctgcggggcaacagcatcggcccccagggcgccaaggccctggctgatgccctgaagatcaacagaaccctgaccagcctgagcctgcagggcaacacagtgagagatgatggagcccgctccatggccgaggccctggccagcaacagaaccctgtccatgctgcacctgcagaagaacagcatcggccccatgggcgcccagaggatggctgacctgaagcagaacagaagcctgaaggagctgatgttcagcagcaacagcattggagatggaggagccaaggccctggccgaggccctgaaggtgaaccagggcctggagagcctggacctgcagagcaacagcatcagtgatgctggggtggccgccctgatgggcgccctgtgcaccaaccagaccctgctgagcctgagcctgcgggagaacagcatcagccctgagggcgcccaggccatcgcccacgccctgtgtgccaacagcaccctgaagaacctggacctgcagtggaacttcatccaggccggggccgcccaggccctgggccaggccctgcagctgaacagaagcctgaccagcctggacctgcaggagaatgccatcggagatgatggagcctgtgctgtggcccgggccctgaaggtgaacacagccctgacagccctgtacctgcaggtggccagcattggagccagcggggcccaggtgctgggggaggccctggccgtgaacagaaccctggagatcctggacctgcggggaaatgccatcggcgtggccggggccaaggccctggccaatgccctgaaggtgaacagcagcctgcggcggctgaacctgcaggagaacagcctgggcatggatggagccatctgcatcgccacagccctgagcggcaaccaccggctgcagcacatcaacctgcagggcaaccacatcggggacagcggggccaggatgatcagcgaggccatcaagaccaatgcccccacctgcaccgtggagatgtag

SEQ ID NO: 19520 - DNA, 2784 bp, synthetic construct
  source 1..2784: mol_type = other DNA; note = Synthetic coding sequence
atgttctggaagtttgacctgaacaccaccagccacgtggacaagctgctggacaaggagcacgtgaccctgcaggagctgatggatgaagatgacatcctgcaggagtgcaaggcccagaaccagaagctgctggacttcctgtgccggcagcagtgcatggaggagctggtgtccctcatcacccaggacccccccctggacatggaggagaaggtgcgcttcaagtaccccaacacagcctgtgagctgctgacctgtgatgtgccccagatcagtgaccggctgggcggagatgagagcctgctgagcctgctgtatgacttcctggaccacgagccccccctgaaccccctgctggccagcttcttcagcaagaccatcggcaacctgattgccaggaagacagagcaggtgatcaccttcctgaagaagaaggacaagttcatcagcctggtgctgaagcacatcggcaccagcgccctgatggacctgctgctgcggctggtgtcctgtgtggagcccgccggcctgcggcaggatgtgctgcactggctgaatgaggagaaggtgatccagaggctggtggagctgatccaccccagccaggatgaagatcggcagagcaatgccagccagaccctgtgtgacatcgtgcggctgggccgggaccagggcagccagctgcaggaggccctggagccagaccccctgctgacagccctggagagccaggactgtgtggagcagctgctgaagaacatgtttgatggagacagaacagagagctgcctggtgtctggcacccaggtgctgctgaccctgctggagaccaggagagtgggcacagagggcctggtggacagcttcagccagggcctggagaggagctatgctgtgagcagctctgtgctgcacggcatcgagccccggctgaaggacttccaccagctgctgctgaacccccccaagaagaaggccatcctgaccaccatcggcgtgctggaggagcccctgggcaatgcccggctgcatggagcccggctgatggccgccctgctgcacaccaacacccccagcatcaaccaggagctgtgccgcctgaacaccatggacctgctgctggacctcttcttcaagtacacctggaacaacttcctgcacttccaggtggagctgtgcatcgccgccatcctgagccacgccgcccgggaggagaggacagaggccagcggcagcgagagccgggtggagccccctcatgaaaatggaaacagaagcctggagaccccccagcctgctgccagcctgcctgacaacaccatggtgacccacctgttccagaagtgctgcctggtgcagaggatcctggaggcctgggaggccaatgaccacacccaggccgccggcggcatgagaagaggcaacatgggccacctgaccagaattgccaatgctgtggtgcagaacctggagcggggccctgtgcagacccacatcagcgaggtgatccggggcctgcctgctgactgccggggccgctgggagagctttgtggaggagaccctgacagagaccaacagaagaaacacagtggacctggccttcagtgactaccagatccagcagatgacagccaactttgtggaccagtttggcttcaatgatgaggagtttgctgaccaggatgacaacatcaatgccccctttgacagaattgctgagatcaacttcaacattgatgctgatgaggacagccccagcgctgccctgtttgaggcctgctgcagcgaccgcatccagccctttgatgatgatgaagatgaggacatctgggaggacagcgacacccgctgtgccgcccgggtgatggcccggcccaggtttggagcccctcatgccagcgagagctgcagcaagaatggacctgagcggggcggccaggacggcaaggccagcctggaggcccacagagatgcccctggagctggggcccccccagcccctgggaagaaggaggcccctcctgtggagggggacagcgaggccggggccatgtggacagctgtgtttgatgagcccgccaacagcacccccacagcccctggggtggtgagagatgtgggcagctctgtgtgggccgccggcaccagcgcccctgaggagaagggctgggccaagttcacagacttccagcccttctgctgcagcgagagcggcccccgctgcagcagccctgtggacacagagtgcagccacgccgagggcagccgcagccagggccctgagaaggccttcagccctgccagcccctgtgcctggaatgtgtgtgtgaccaggaaggcccccctgctggccagtgacagcagcagcagcggcggcagccacagtgaagatggagaccagaaggccgccagcgccatggatgctgtgtcccggggccctggccgggaggccccacccctgcccaccgtggccaggacagaggaggccgtgggccgggtgggctgtgccgacagccggctgctgagccctgcctgcccagcccccaaggaggtgacagctgccccagctgtggccgtgcccccagaggccaccgtggccatcaccacagccctgagcaaggccggccctgccatccccaccccagctgtgtcctctgccctggccgtggccgtgcccctgggccccatcatggctgtgacagctgccccagccatggtggccaccctgggcaccgtgaccaaggatggccagatgccccggcagaaggagctgccctag

SEQ ID NO: 19521 - DNA, 2220 bp, synthetic construct
  source 1..2220: mol_type = other DNA; note = Synthetic coding sequence
atgggcttcagcaacatggaggatgatggccctgaggaggaggagcgggtggccgagccccaggccaacttcaacaccccccaggccctgcgctttgaggagctgctggccaacctgctgaatgagcagcaccagatcgccaaggagctgtttgagcagctgaagatgaagaagcccagcgccaagcagcagaaggaggtggagaaggtgaagccccagtgcaaggaggtgcaccagaccctcatcctggaccctgcccagaggaagaggctgcagcagcagatgcagcagcacgtgcagctgctgacccagatccacctgctggccacctgcaaccccaacctgaaccctgaggccagcagcacccgcatctgcctgaaggagctgggcacctttgcccagagcagcatcgccctgcaccaccagtacaaccccaagttccagaccctcttccagccctgcaacctgatgggcgccatgcagctgattgaggacttcagcacccacgtgtccattgactgcagcccccacaagacagtgaagaagacagccaatgagttcccctgcctgcccaagcaggtggcctggatcctggccaccagcaaggtgttcatgtacccagagctgctgcctgtgtgcagcctgaaggccaagaacccccaggacaagatcctcttcaccaaggccgaggacaacctgctggccctgggcctgaagcactttgagggcacagagttcctgaaccccctcatcagcaagtacctgctgacctgcaagacagcccggcagctgactgtgcgcatcaagaacctgaacatgaacagagccccagacaacatcatcaagttctacaagaagaccaagcagctgcctgtgctgggcaagtgctgtgaggagatccagccccaccagtggaagccacccatcgagcgggaggagcaccggctgcccttctggctgaaggccagcctgcccagcatccaggaggagctgcggcacatggctgatggagcccgggaggtgggcaacatgacaggcaccacagagatcaacagcgaccagggcctggagaaggacaacagcgagctgggcagcgagacccgctaccccctgctgctgcccaagggcgtggtgctgaagctgaagcctgtggccgaccgcttccccaagaaggcctggaggcagaagaggagctctgtgctgaagcccctgctgatccagcccagccccagcctgcagcccagcttcaaccctgggaagaccccagcccagagcacccacagcgaggccccacccagcaagatggtgctgcgcatcccccaccccatccagcctgccaccgtgctgcagacagtgcctggggtgccccccctgggcgtgtctggaggagagagctttgagagccctgctgccctgcctgccatgcctcctgaggcccggaccagcttccccctgtctgagagccagaccctgctgagcagcgcccctgtgcccaaggtgatgatgcccagccctgccagctccatgttcaggaagccctacgtgagaagaagacccagcaagagaagaggagcccgggccttccgctgcatcaagccagcccctgtgatccacccagccagcgtcatcttcaccgtgcctgccaccaccgtgaagatcgtgtccctgggcggcggctgcaacatgatccagcctgtgaatgctgctgtggcccagagcccccagaccatccccatcgccaccctgctggtgaaccccaccagcttcccctgccccctgaaccagcccctggtggccagctctgtgagccccctcatcgtgtctggcaacagcgtgaacctgcccatccccagcaccccagaggacaaggcccacatgaatgtggacatcgcctgtgctgtggctgatggagaaaatgccttccagggcctggagcccaagctggagccccaggagctgagccccctgagcgccaccgtcttccccaaggtggagcacagccctggccccccacctgtggacaagcagtgccaggagggcctgtctgaaaattctgcctaccgctggacagtggtgaagacagaggagggccggcaggccctggagcccctgccccagggcatccaggagagcctgaacaacagcagccctggggacctggaggaggtggtgaagatggagccagaagatgccacagaggagatcagcggcttcctgtag

SEQ ID NO: 19522 - DNA, 1911 bp, synthetic construct
  source 1..1911: mol_type = other DNA; note = Synthetic coding sequence
atggagaaggctgtgaatgatggcagccacagcgaggagctgttctgccacctgaagaccatcagcgagaaggaggacctgccccgctgcaccagcgagagccacctgagctgcctgaagcaggacatcctgaatgagaagacagagctggaggccaccctgaaggaggccgagctggtgacccacagcgtggagctgctgctgcccctcttcaaggacaccatcgagaagatcaactttgaaaatgccaacctgagcgccctgaacctgaagatcagcgagcagaaggagatcctgatcaaggagctggacaccttcaagtctgtgaagctggccctggagcacctgctgaggaagagggactacaagcagacaggagacaacctgagctccatgctgctggagaacctgacagacaatgaaagtgagaacaccaacctgaagaagaaggtgtttgagaaggaggcccacatccaggagctgagctgcctcttccagagcgagaaggccaacaccctgaaggccaaccgcttcagccagagcgtgaaggtggtgcatgagcggctgcagatccagatccacaagcgggaggctgaaaatgacaagctgaaggagtatgtgaagagcctggagaccaagatcgccaagtggaacctgcagagcaggatgaacaagaatgaggccatcgtgatgaaggaggccagccggcagaagacagtggccctgaagaaggccagcaaggtgtacaagcagaggctggaccacttcaccggggccatcgagaagctgaccagccagatccgggaccaggaggccaagctgtctgagaccatcagcgccagcaatgcctggaagagccactatgagaagatcgtgattgagaagacagagctggaggtgcagatcgagaccatgaagaagcagatcatcaacctgctggaggacctgaagaagatggaggaccacggcaagaacagctgtgaggagatcctgaggaaggtgcacagcattgaatatgaaaatgagaccctgaacctggagaacaccaagctgaagctgcgcttcccctgccgcatcacagagagcaagaacatgaacatcctgattgtgctggacatgctgtgctacatcagcagcgagaagaccaccctggccgccctgaaggatgaggtggtgtctgtggagaatgagctgtctgagctgcaggaggtggagaagaagcagaagaccctcatcgagatgtacaagacccaggtgcagaagctgcaggaggccgctgagatcgtgaagagccgctgtgagaacctgctgcacaagaacaaccagatcaccaagaccaagaacaagaatgtggagaagatgaggggccagatggagagccacctgaaggagctggagcgggtgtgtgacagcctgacagctgctgagcggcggctgcacgagtgccaggagagcctgcagtgctgcaagggcaaatgtgccgaccaggagcacaccatccgggagctgcagggccaggtggatggcaaccacaacctgctgaccaagctgagcctggaggaggagaactgcctgatccagctgaagtgtgagaacctgcagcagaagctggagcagatggatgctgagaacaaggagctggagaagaagctggccaaccaggaggagtgcctgaagcacagcaacctgaagttcaaggagaagtctgctgagtacacagccctggcccggcagctggaggccgccctggaggagggccggcagaaggtggccgaggagattgagaagatgagcagccgggagagcgccctgcagatcaagatcctggacctggagacagagctgaggaagaagaatgaggagcagaaccagctggtgtgcaagatgaacagcgaccctgagaccccctag

SEQ ID NO: 19523 - DNA, 873 bp, synthetic construct
  source 1..873: mol_type = other DNA; note = Synthetic coding sequence
atggctgctgtggagaagaggcggcaggccgtgcccccacctgctggcttcacagacagcggccggcagagcgtgtccagagctgctggagctgctgagagcgaggaggacttcctgcggcaggtgggcgtgacagagatgctgcgggccgccctgctgaaggtgctggaggcccggcctgaggagcccatcgccttcctggcccactactttgagaacatgggcctgcggagccctgtgaatggaggagctggggagcccccaggccagctgctgctgcagcagcagaggctgggccgggccctgtggcacctgcggctggcccaccacagccagagagctgccttcaacaacaacgtgtctgtggcctatgaatgtctgtctgctgggggccgcaggaagaggcctggcctggatggccgcacctacagcgagctgctgcggcgcatctgcagagatggccaggcccctgaggaggtggtggcccccctgctgaggaaggtgcagtgccgggaccatgaagctgtgcccctgtctgtgttccgggccggcaccctgacctgctttgtgctgctggagtttgtggcccgggccggggccctcttccagctgctggaggacagcgctgctgctgtggccgacagaagagtgggccaggccgtgctggacaccctggagggcgccctgcaggccagtgatgctgctgccccagcccgcttcctggaggccggcagccggctgggccctgacagcctggccctggccctggacagagctgtgggcggcagaagacccagcgcccccatgacccgggaggagttcctggagagagctgctgccctcttcatcgccaaggtgaagcctgtgggctag

SEQ ID NO: 19524 - DNA, 1221 bp, synthetic construct
  source 1..1221: mol_type = other DNA; note = Synthetic coding sequence
atggctgacagccagctgttctgtgtggccgaggagaggagcggccactgtgctgtggtggatggcaacttcctgtatgtgtggggcggctacgtgtccattgaagataatgaggtgtacctgcccaatgatgagatctggacctatgacattgattctggcctgtggaggatgcacctgatggagggggagctgcctgcctccatgagcggcagctgtggggcctgcatcaacgggaagctgtacatctttggaggctatgatgacaagggctacagcaaccggctgtactttgtgaacctgcggaccagagatgagacctacatctgggagaagatcacagactttgagggccagccccccaccccccgggacaagctgagctgctgggtgtacaaggacaggctcatctactttggaggctacggctgcagaagacacagcgagctgcaggactgctttgatgtgcatgatgcctcctgggaggagcagatcttctggggctggcacaatgatgtgcacatctttgacaccaagacccagacctggttccagcctgagatcaagggcggcgtgcccccccagccccgggccgcccacacctgtgctgtgctgggcaacaagggctacatctttggaggccgggtgctgcagaccaggatgaatgacctgcactacctgaacctggacacctggacctggagcggccgcatcaccatcaatggagagagccccaagcaccgctcctggcacaccctgacccccatcgcagatgacaagctgttcctgtgtggcggcctgtctgctgacaacatccccctgagtgatggctggatccacaacgtgaccaccaactgctggaagcagctgacccacctgcccaagacccggccccggctgtggcacacagcctgcctgggcaaggaaaatgagatcatggtgtttggaggcagcaaggatgacctgctggccctggacaccggccactgcaatgacctgctgatcttccagacccagccctacagcctgctgcggagctgcctggactgcatcggcaagaacagcatcatgctggagagccagatcagcctgctgccccccaagctgctgcagcaggtgctgaagaagatcaccttctgggccgccgccaaccaccgggaggagcagagggtgcagaaggaggagacagagaacaagtaccagtggatcagcagcaactag

SEQ ID NO: 19525 - DNA, 1113 bp, synthetic construct
  source 1..1113: mol_type = other DNA; note = Synthetic coding sequence
atggtgcagcccttcaccaccatccccttccccccaccaccccagaatggcatccccacagaatatggagtgccccacacccaggactatgccggccagacaggagagcacaacctgaccctgtatggcagcacccaggcccacggggagcagagcagcaacagccccagcacccagaatggcagcctgaccacagaaggaggagcccagacagatggccagcagagccagacccagagcagcgagaacagcgagagcaagagcacccccaagaggctgcacgtgagcaacatccccttccgcttccgggaccctgacctgcggcagatgtttggccagtttgggaagatcctggatgtggagatcatcttcaatgaaagaggcagcaagggcttcggctttgtgacctttgagaacagcgcagatgctgaccgggcccgggagaagctgcatggaacagtggtggagggcaggaagattgaggtgaacaatgccacagcccgggtgatgaccaacaagaagatggtgaccccctatgccaacggctggaagctgagccctgtggtgggcgctgtgtatggccctgagctgtatgctgccagcagcttccaggctgatgtgtccctgggcaatgatgctgctgtgcccctgagcggccggggcggcatcaacacctacatccccctcatcatccctggcttcccctaccccacagctgccaccacagctgctgccttccggggggcccacctgcggggccggggccgcacagtgtatggagctgtgcgggctgtgcccccaacagccatcccagcctacccaggagtggtgtaccaggacggcttctatggagctgacctgtacattgaaagtgccaactgcttccgcagcaacagagtggacatgcagcccacagacatgcacagcctgctgctgcagccccagccccccctgctgcagcccctgcagcccctgactgtgacagtgatggccggctgcacccagcccacccccaccatgcccctgcccctgcccctggccatggagctggccctgtggagggtgtacacagaggtggccacagctgacctgcccccaacagaggtgacctag

SEQ ID NO: 19526 - DNA, 534 bp, synthetic construct
  source 1..534: mol_type = other DNA; note = Synthetic coding sequence
atgtctgaagattctgagaaggaggactacagcgacaggaccatcagtgatgaagatgaaagtgatgaggacatgttcatgaagtttgtgtctgaggacctgcaccgctgtgccctgctgacagctgacagctttggagaccccttcttccccaggaccacccagatcctgctggagtaccagctgggccgctgggtgccccggctgcgggagccccgggacctgtatggagtgagcagcagcggccccctgagccccacccgctggccctaccactgtgaggtgattgatgagaaggtgcagcacattgatggagtgtcctgctggagcgagagccaccaggccggggcccagtggtgtgacctgggcagcctgcagcccccaccaccccgcttcaagagatttgcctgcttcagcctgctgagcagccgggactacagaagagtgccccccaggtctgccaactttgtgttcctggtggagaccggcttccaccacgtgggccaggacggcctgcggctgctgaccagctag

SEQ ID NO: 19527 - DNA, 1827 bp, synthetic construct
  source 1..1827: mol_type = other DNA; note = Synthetic coding sequence
atgtctgacaagagtgacctgaaggccgagctggagaggaagaagcagaggctggcccagatccgggaggagaagaagaggaaggaggaggagaggaagaagaaggaggccgacatgcagcagaagaaggagcctgtgcaggatgacagcgacctggacaggaagaggcgggagacagaggccctgctgcagagcatcggcatcagccctgagccccccctggtgcccacccccatgagccccagcagcaagtctgtgtccacccccagcgaggccggcagccaggacagcggggacctgggccccctgacccggcggcggctgcacaagctgggcgtgtccaaggtgacccaggtggacttcctgccccgggaggtggtgtcctacagcaaggagacccagacccccctggccacccaccagagcgaggaggatgaagaagatgaggagatggtggagagcaaggtgggccaggacagcgagctggagaaccaggacaagaagcaggaggtgaaggaggccccaccccgggagctgacagaggaggagaagcagcagatcctgcacagcgaggagttcctgatcttctttgacaggaccatccgggtcatcgagcgggccctggccgaggacagcgacatcttctttgactacagcggccgggagctggaggagaaggatggagatgtgcaggccggggccaacctgtccttcaaccggcagttctatgatgagcactggagcaagcaccgggtggtgacctgcatggactggagcctgcagtacccagagctgatggtggccagctacaacaacaatgaagatgcccctcatgagccagatggagtggccctggtgtggaacatgaagttcaagaagaccaccccagaatatgtgttccactgccagagctctgtgatgtctgtgtgctttgcccgcttccaccccaacctggtggtgggcggcacctacagcggccagatcgtgctgtgggacaacagaagccacaggaggacccctgtgcagaggacccccctgtctgctgctgcccacacccaccctgtgtactgtgtgaatgtggtgggcacccagaatgcccacaacctgatcaccgtgtccacagatggcaagatgtgctcctggagcctggacatgctgagcaccccccaggagagcatggagctggtgtacaacaagagcaagcctgtggccgtgacaggcatggccttccccactggagatgtgaacaactttgtggtgggcagcgaggagggcaccgtgtacacagcctgcagacatggcagcaaggccggcattggagaggtgtttgagggccaccagggccctgtgacaggcatcaactgccacatggctgtgggccccatcgacttcagccacctgtttgtgaccagcagctttgactggacagtgaagctgtggaccaccaagcacaacaagcccctgtacagctttgaggacaatgctgactatgtgtatgatgtgatgtggagccctgtgcacccagccctgtttgcctgtgtggatggcatgggccgcctggacctgtggaacctgaacaatgacacagaggtgcccacagcctctgtggccatcgagggcgccagcgccctgaacagagtgcgctgggcccaggccggcaaggaggtggccgtgggggacagcgagggccgcatctgggtgtatgatgtgggggagctggccgtgccccacaatgatgagtggaccaggtttgcccggaccctggtggagatccgggccaacagagctgacagcgaggaggagggcaccgtggagctgagcgcctag

SEQ ID NO: 19528 - DNA, 627 bp, synthetic construct
  source 1..627: mol_type = other DNA; note = Synthetic coding sequence
atggagggcgctgctgcccctgtggccggggacagaccagacctgggcctgggcgcccctggcagcccccgggaggccgtggccggggccacagctgccctggagcccaggaagccccacggcgtgaagaggcaccaccacaagcacaacctgaagcacagatatgagctgcaggagaccctgggcaagggcacctacggcaaggtgaagagggccacagagcgcttcagcggccgggtggtggccatcaagagcatcaggaaggacaagatcaaggatgagcaggacatggtgcacatcagaagagaaattgagatcatgagcagcctgaaccacccccacatcatcagcatctatgaggtgtttgagaacaaggacaagatcgtcatcatcatggagtatgccagcaaaggagagctgtatgactacatcagcgagcggcggcggctgtctgagcgggagaccaggcacttcttccggcagatcgtgtctgctgtgcactactgccacaagaatggagtggtgcaccgggacctgaagctgaagaggcccagccgggagaaccaggtgaccaccctgccccagagcgctgtgtccctgcggagctgctggacagtgatgatgtag

SEQ ID NO: 19529 - DNA, 990 bp, synthetic construct
  source 1..990: mol_type = other DNA; note = Synthetic coding sequence
atggaggtggccgagcccagcagccccacagaggaggaggaggaggaggaggagcacagcgctgagccccggcccaggaccaggagcaaccctgagggcgcagaagatagagctgtgggcgcccaggcctctgtgggcagccgctctgagggggagggggaggccgccagcgcagatgatggcagcctgaacaccagcggggccggccccaagtcctggcaggtgcccccaccagcccctgaggtgcagatccgcaccccccgggtgaactgcccagagaaggtgatcatctgcctggacctgtctgaggagatgagcctgcccaagctggagagcttcaacggcagcaagaccaatgccctgaatgtgtcccagaagatgattgagatgtttgtgaggaccaagcacaagattgacaagagccatgaatttgccctggtggtggtgaatgatgacacagcctggctgagcggcctgaccagtgacccccgggagctgtgcagctgcctgtatgacctggagacagccagctgcagcaccttcaacctggagggcctcttcagcctcatccagcagaagacagagctgcctgtgacagaaaatgtgcagaccatccccccaccctacgtggtgaggaccatcctggtgtacagccggcccccctgccagccccagttcagcctgacagagcccatgaagaagatgttccagtgcccctacttcttctttgatgtggtgtacatccacaacggcacagaggagaaggaggaggagatgtcctggaaggacatgtttgccttcatgggcagcctggacaccaagggcaccagctacaagtatgaggtggccctggccggccctgccctggagctgcacaactgcatggccaagctgctggcccaccccctgcagaggccctgccagagccacgccagctacagcctgctggaggaggaggatgaggccatcgaggtggaggccaccgtgtag

SEQ ID NO: 19530 - DNA, 885 bp, synthetic construct
  source 1..885: mol_type = other DNA; note = Synthetic coding sequence
atgagccagcctgctgggggccgcaggaagcccaggaccctgggcccccctgtgtgcagcatccggcccttcaagagcagcgagcagtacctggaggccatgaaggaggacctggccgagtggctgcgggacctgtatggcctggacattgatgctgccaacttcctgcaggtgctggagaccggcctggtgctgtgccagcacgccaacgtggtgacagatgctgccctggccttcctggccgaggccccagcccaggcccagaagatccccatgccccgggtgggcgtgtcctgcaatggagctgcccagcccggcaccttccaggcccgggacaacgtgagcaacttcatccagtggtgcaggaaggagatgggcatccaggaggtgctgatgtttgaaacagaggacctggtgctgaggaagaatgtgaagaatgtggtgctgtgcctgctggagctgggccggcgggcctggaggtttggagtggccgcccccaccctggtgcagctggaggaggagattgaggaggaggtgcggcgggagctggccctgccccccctgccccagcccggcccagatggagctgagccctgtgagcccctgcacgtgcccagcgctgtgctgcacggccagagcgtgtatgtgttcctgggccctgcccggcagccccccaaggaccggctgctgcgggctgtgctgggcagcaaaggaggagaggccagccgggtggatggagcctctgtgggggaggaggaggaggagggcaaggaggagaaggagcctgctgcccccctggagagcagcccccagcccccagagggcctgcagccccactggctgaaccaggcccccctgcccccagaggaggagagctgggtgtag

SEQ ID NO: 19531 - DNA, 1554 bp, synthetic construct; identical to SEQ ID NO: 18881
  source 1..1554: mol_type = other DNA; note = Synthetic coding sequence

SEQ ID NO: 19532 - DNA, 951 bp, synthetic construct
  source 1..951: mol_type = other DNA; note = Synthetic coding sequence
atggccacctttgtggagctgagcaccaaggccaagatgcccatcgtgggcctgggcacctggaagagccccctgggcaaggtgaaggaggccgtgaaggtggccattgatgctggctaccgccacatcgactgtgcctacgtgtaccagaatgaacatgaggtgggggaggccatccaggagaagatccaggagaaggctgtgaagagagaagatctcttcatcgtgtccaagctgtggcccaccttctttgagcggcccctggtgaggaaggcctttgagaagaccctgaaggacctgaagctgagctacctggatgtgtacctgatccactggccccagggcttcaagtctggagatgacctcttccccaaggatgacaagggaaatgccatcggcggcaaggccaccttcctggatgcctgggaggccatggaggagctggtggatgagggcctggtgaaggccctgggcgtgagcaacttcagccacttccagatcgagaagctgctgaacaagccaggcctgaagtacaagcctgtgaccaaccaggtggagtgccacccctacctgacccaggagaagctgatccagtactgccacagcaagggcatcaccgtgacagcctacagccccctgggcagcccagaccggccctgggccaagccagaggaccccagcctgctggaggaccccaagatcaaggagattgctgccaagcacaagaagacagctgcccaggtgctgatccgcttccacatccagagaaatgtgattgtcatccccaagtctgtgaccccagcccgcatcgtggagaacatccaggtgtttgacttcaagctgagtgatgaggagatggccaccatcctgtccttcaacagaaactggagggcctgcaatgtgctgcagagcagccacctggaggactaccccttcaatgctgagtactag

SEQ ID NO: 19533 - DNA, 8274 bp, synthetic construct
  source 1..8274: mol_type = other DNA; note = Synthetic coding sequence
gagcccaaggtggtgtttgccaaggagcagcctgtgcaccgggaggtgcaggcccaggccggggccagcaccaccctgagctgtgaggtggcccaggcccagacagaggtgatgtggtacaaggatggcaagaagctgtccttcagcagcaaggtgaggatggaggccgtgggctgcacccggcggctggtggtgcagcaggccggccaggccgtggccggggagtacagctgtgaggccggcagccagaggctgtccttccacctgcacgtggccgagcccaaggctgtgtttgccaaggagcagcctgcccaccgggaggtgcaggccgaggccggggccagcgccaccctgagctgtgaggtggcccaggcccagacagaggtgacctggtacaaggatggcaagaagctgagcagcagcctgaaggtgcacgtggaggccgccggctgcacccggcggctggtggtgcagcaggccggccaggccgacacaggagagtacagctgtgaggccggcggccagcagctgtccttccggctgcaggtggccgagcccaaggctgtgtttgccaaggagcagcctgccagccgggaggtgcaggccgaggccggcaccagcgccaccctgagctgtgaggtggcccaggcccagacagaggtgacctggtacaaggatggcaagaagctgagcagcagcagcaaggtgaggatggaggccgtgggctgcacccggcggctggtggtgcaggaggccggccaggctgatgctggggagtacagctgcaaggccggggaccagaggctgtccttccacctgcacgtggccgagcccaaggtggtgtttgccaaggagcagcctgcccaccgggaggtgcaggccgaggccggggccagcgccaccctgagctgtgaggtggcccaggcccagacagaggtgacctggtacaaggatggcaagaagctgagcagcagcagcaaggtgcgggtggaggccgtgggctgcacccggcggctggtggtgcagcaggccggccaggccgaggccggggagtacagctgtgaggccggcggccagcagctgtccttccggctgcaggtggccgagcccaaggctgtgtttgccaaggagcaggtggtgtttgccaaggaccagcctgtgcaccgggaggtgcaggccgaggccggcaccagcaccatgctgagctgtgaggtggcccaggcccagacagaggtgatgtggtacaaggatggcaagaagctgagcagcagcagcaagatgagggtggaggccgtgggctgcacccggcggctggtggtgcaggaggccggccaggctgatgctggggagtacagctgtgaggccggcggccagaggctgtccttccacctgcacgtggccgagcccaaggtggtgtttgccaaggagcagcctgcctgccgggaggtgcaggccgaggccggggccagcgccaccctgagctgtgaggtggcccagggccagatggaggtgacctggtacaaggatggcaagaagctgagcagcagcagcaaggtgcacatggaggccagcggctacacccggcggctggtggtgcagcaggccggccaggctgatgctggggagtacagctgtgaggccggcggccagaggctgtccttccggctgcacgtggccgagctggagccccagatcagcgagcggccctgcagaagagagcccctggtggtgaaggagcacgaggacatcatcctgacagccaccctggccaccccatctgctgccaccgtgacctggctgaaggatggagtggagatcagaagaagcaagagacatgaaacagccagccagggcgacacccacaccctgactgtgcacggggcccaggtgctggacagcgccatctacagctgccgggtgggcgctgagggccaggacttccctgtgcaggtggaggaggtggccgccaagttctgccgcctgctggagcctgtgtgtggggagctgggcggcaccgtgaccctggcctgtgagctgagccctgcctgtgccgaggtggtgtggaggtgtggcaacacccagctgcgggtgggcaagcgcttccagatggtggccgagggccctgtgcgcagcctgactgtgctgggcctgcgggcagaagatgctggggagtatgtgtgtgagagcagagatgaccacaccagcgcccagctgactgtgtctgtgccccgggtggtgaagttcatgagcggcctgagcacagtggtggccgaggagggcggggaggccaccttccagtgtgtggtgagccccagtgatgtggccgtggtgtggttcagagatggagccctgctgcagcccagcgagaagtttgccatcagccagagcggggccagccacagcctgaccatcagtgacctggtgctggaggatgctggccagatcaccgtggaggccgagggcgccagcagcagcgctgccctgcgggtgcgggaggcccctgtgctcttcaagaagaagctggagccccagacagtggaggagaggagctctgtgaccctggaggtggagctgacccggccctggccagagctgcgctggaccagaaatgccacagccctggcccctgggaagaatgtggagatccacgccgagggcgcccggcaccggctggtgctgcacaacgtgggctttgctgaccggggcttcttcggctgtgagaccccagatgacaagacccaggccaagctgactgtggagatgaggcaggtgcggctggtgcggggcctgcaggccgtggaggcccgggagcagggcacagccaccatggaggtgcagctgagccatgctgatgtggatggctcctggaccagagatggcctgcgcttccagcagggccccacctgccacctggccgtgcggggccccatgcacaccctgaccctgagcggcctgcggcctgaggacagcggcctgatggtgttcaaggccgagggcgtgcacaccagcgcccggctggtggtgacagagctgcctgtgtccttcagccggcccctgcaggatgtggtgaccacagagaaggagaaggtgaccctggagtgtgagctgagccggcccaacgtggatgtgcgctggctgaaggatggagtggagctgcgggccggcaagaccatggccatcgccgcccagggcgcctgccgcagcctgaccatctaccgctgtgaatttgctgaccagggcgtgtatgtgtgtgatgcccatgatgcccagagcagcgcctctgtgaaggtgcagggccgcacctacaccctcatctacagaagagtgctggccgaggatgctggggagatccagtttgtggccgagaatgctgagagccgggcccagctgcgggtgaaggagctgcctgtgaccctggtgcggcccctgcgggacaagatcgccatggagaagcaccggggcgtgctggagtgccaggtgtcccgggccagcgcccaggtgcgctggttcaagggcagccaggagctgcagcccggccccaagtatgagctggtgtctgatggcctgtacaggaagctgatcatcagtgatgtgcatgctgaagatgaggacacctacacctgtgatgctggagatgtgaagaccagcgcccagttctttgtggaggagcagagcatcaccatcgtgcggggcctgcaggatgtgacagtgatggagcccgccccagcctggtttgaatgtgagaccagcatccccagcgtgcggccccccaagtggctgctgggcaagacagtgctgcaggccggcggcaatgtgggcctggagcaggagggcaccgtgcaccggctgatgctgcggaggacctgcagcaccatgactggacctgtgcacttcaccgtgggcaagagccgcagcagcgcccggctggtggtgtctgacatccctgtggtgctgacccggcccctggagcccaagacaggccgggagctgcagagcgtggtgctgagctgtgacttccggcctgcccccaaggctgtgcagtggtacaaggatgacacccccctgagccccagcgagaagttcaagatgagcctggagggccagatggccgagctgcgcatcctgcggctgatgccagcagatgctggggtgtaccgctgccaggccggcagcgcccacagcagcacagaggtgacagtggaggcccgggaggtgacagtgacaggccccctgcaggatgctgaggccacagaggagggctgggccagcttcagctgtgagctgagccatgaagatgaggaggtggagtggagcctgaatggcatgcccctgtacaatgacagcttccacgagatcagccacaagggcagaagacacaccctggtgctgaagagcatccagagagcagatgctggcatcgtgcgggccagcagcctgaaggtgtccaccagcgcccggctggaggtgcgggtgaagcctgtggtgttcctgaaggccctggatgacctgtctgctgaggagcggggcaccctggccctgcagtgtgaggtgtctgaccctgaggcccacgtggtgtggaggaaggatggagtgcagctgggccccagcgacaagtatgacttcctgcacacagctggcacccggggcctggtggtgcatgatgtgtccccagaagatgctggcctgtacacctgccacgtgggcagcgaggagacccgggcccgggtgcgggtgcatgacctgcacgtgggcatcaccaagaggctgaagaccatggaggtgctggagggggagagctgcagctttgaatgtgtgctgagccatgagagcgccagtgaccctgccatgtggacagtgggcggcaagacagtgggcagcagcagccgcttccaggccacccggcagggcaggaagtacatcctggtggtgcgggaggccgcccccagtgatgctggggaggtggtgttttctgtgcggggcctgaccagcaaggccagcctcatcgtgcgggagaggcctgctgccatcatcaagcccctggaggaccagtgggtggcccctggagaagatgtggagctgcgctgtgagctgagccgggccggcacccctgtgcactggctgaaggacaggaaggccatcaggaagagccagaagtatgatgtggtgtgtgagggcaccatggccatgctggtgatccggggggccagcctgaaggatgctggggagtacacctgtgaggtggaggccagcaagagcacagccagcctgcacgtggaggagaaggccaactgcttcacagaggagctgaccaacctgcaggtggaggagaagggcacagctgtgttcacctgcaagacagagcaccctgctgccaccgtgacctggaggaagggcctgctggagctgcgggccagcggcaagcaccagcccagccaggagggcctgaccctgcggctgaccatcagcgccctggagaaggctgacagcgacacctacacctgtgacatcggccaggcccagagccgggcccagctgctggtgcagggccggcgggtgcacatcatcgaggacctggaggatgtggatgtgcaggagggcagcagcgccaccttccgctgccgcatcagccctgccaactatgagcctgtgcactggttcctggacaagacccccctgcacgccaatgagctgaatgaaattgatgcccagcccggcggctaccacgtgctgaccctgcggcagctggccctgaaggacagcggcaccatctactttgaagctggggaccagagggccagcgctgccctgcgggtgacagagaagcccagcgtcttcagccgggagctgacagatgccaccatcacagaaggagaggacctgaccctggtgtgtgagaccagcacctgtgacatccctgtgtgctggaccaaggatggcaagaccctgcggggcagcgcccgctgccagctgagccatgagggccaccgggcccagctgctgatcaccggggccaccctgcaggacagcggccgctacaagtgtgaggccggcggggcctgcagcagcagcatcgtgcgggtgcacgcccggcctgtgcgcttccaggaggccctgaaggacctggaggtgctggagggcggggccgccaccctgcgctgtgtgctgagctctgtggccgcccctgtgaagtggtgctacggcaacaacgtgctgcggcctggggacaagtacagcctgcggcaggagggcgccatgctggagctggtggtgaggaacctgcggccccaggacagcggccgctacagctgcagctttggagaccagaccaccagcgccaccctgactgtgacagccctgcctgcccagttcatcggcaagctgaggaacaaggaggccacagaaggagccacagccaccctgcgctgtgagctgagcaaggccgcccctgtggagtggaggaagggcagcgagaccctgagagatggagaccgctactgcctgcggcaggatggagccatgtgtgagctgcagatccggggcctggccatggtggatgctgctgagtacagctgtgtgtgtggggaggagaggaccagcgccagcctgaccatccggcccatgcctgcccacttcatcggccgcctgcggcaccaggagagcattgaaggagccacagccaccctgcgctgtgagctgagcaaggccgcccctgtggagtggaggaagggccgggagagcctgagagatggagacagacacagcctgcggcaggatggagctgtgtgtgagctgcagatctgtggcctggccgtggctgatgctggggagtacagctgtgtgtgtggggaggagaggaccagcgccaccctgactgtgaaggccctgcctgccaagttcacagagggcctgagaaatgaggaggccgtggagggcgccacagccatgctgtggtgtgagctgagcaaggtggcccctgtggagtggaggaagggccctgagaacctgagagatggagaccgctacatcctgcggcaggagggcacccgctgtgagctgcagatctgtggcctggccatggctgatgctggggagtacctgtgtgtgtgtggccaggagaggaccagcgccaccctgaccatccgggccctgcctgcccgcttcattgaagatgtgaagaaccaggaggcccgggagggcgccacagctgtgctgcagtgtgagctgaacagcgctgcccctgtggagtggaggaagggcagcgagaccctgagagatggagaccgctacagcctgcggcaggacggcaccaagtgtgagctgcagatccggggcctggccatggctgacaccggggagtacagctgtgtgtgtggccaggagaggaccagcgccatgctgactgtgcgggccctgcccatcaagttcacagagggcctgagaaatgaggaggccacagaaggagccacagctgtgctgcgctgtgagctgagcaagatggcccctgtggagtggtggaagggccacgagaccctgagagatggagacagacacagcctgcggcaggatggagcccgctgtgagctgcagatccggggcctggtggccgaggatgctggggagtacctgtgcatgtgtgggaaggagaggaccagcgccatgctgactgtgcgggccatgcccagcaagttcatcgagggcctgagaaatgaggaggccacagaaggagacacagccaccctgtggtgtgagctgagcaaggccgcccctgtggagtggaggaagggccacgagaccctgagagatggagacagacacagcctgcggcaggacggcagccgctgtgagctgcagatccggggcctggccgtggtggatgctggggagtacagctgtgtgtgtggccaggagaggaccagcgccaccctgactgtgcgggccctgcctgcccgcttcattgaagatgtgaagaaccaggaggcccgggagggcgccacagctgtgctgcagtgtgagctgagcaaggccgcccctgtggagtggaggaagggcagcgagaccctgcggggcggggaccgctacagcctgcggcaggacggcacccgctgtgagctgcagatccacggcctgtctgtggccgacaccggggagtacagctgtgtgtgtggccaggagaggaccagcgccaccctgactgtgcgggccctgcctgcccggcacagccgctctgaggaccagggcggcctgcggcggggccacagctacacagctgtgtag

SEQ ID NO: 19534 - DNA, 1449 bp, synthetic construct
  source 1..1449: mol_type = other DNA; note = Synthetic coding sequence
atggtgatggagaagcccagccccctgctggtgggccgggagtttgtgcggcagtactacaccctgctgaacaaggcccctgagtacctgcaccgcttctacggcaggaacagcagctatgtgcacggcggcgtggatgccagcggcaagccccaggaggccgtgtatggccagaatgacatccaccacaaggtgctgagcctgaacttcagcgagtgccacaccaagatcagacatgtggatgcccacgccaccctgagtgatggagtggtggtgcaggtgatgggcctgctgagcaacagcggccagcctgagaggaagttcatgcagacctttgtgctggcccctgagggctctgtgcccaacaagttctacgtgcacaatgacatgttccgctatgaagatgaggtgtttggagacagcgagcctgagctggatgaggagagtgaagatgaggtggaggaggagcaggaggagcggcagcccagccctgagcctgtgcaggagaatgccaacagcggctactatgaggcccaccctgtgaccaatggaattgaggagcccctggaggagagcagccatgagcctgagcctgagcctgagagcgagaccaagacagaggagctgaagccccaggtggaggagaagaacctggaggagctggaggagaagagcaccaccccacctcctgctgagcctgtgtccctgccccaggagccccccaaggccttctcctgggcctctgtgaccagcaagaacctgcccccatctggaacagtgagcagcagcggcatccccccccacgtgaaggcccctgtgtcccagccccgggtggaggccaagccagaggtgcagagccagcccccccgggtgcgggagcagaggccccgggagcggcccggcttccccccccggggccccaggcctggccgcggggacatggagcagaatgacagcgacaacagacgcatcatccgctacccagacagccaccagctgtttgtgggcaacctgccccatgacattgatgaaaatgagctgaaggagttcttcatgagctttggaaatgtggtggagctgcgcatcaacaccaagggcgtgggcggcaagctgcccaactttggatttgtggtgtttgatgacagcgagcctgtgcagaggatcctgattgccaagcccatcatgttccggggggaggtgcggctgaatgtggaggagaagaagaccagggctgcccgggagcgggagacccggggcggcggagatgaccggcgggacatcagaagaaatgaccggggccctgggggcccccggggcatcgtgggcggcggcatgatgagggacagagatggccggggccccccaccccggggcggcatggcccagaagctgggcagcggccggggcaccggccagatggagggccgcttcaccggccagaggaggtag

SEQ ID NO: 19535 - DNA, 807 bp, synthetic construct
  source 1..807: mol_type = other DNA; note = Synthetic coding sequence
atgagcggcaggaagaggagcttcaccttcggggcctatggaggagtggacaagagcttcaccagcagaagatctgtgtggaggagtgatggccagaaccagcacttcccccaggccctggacctgagccgggtgaacctggtgcccagctacacccccagcctgtaccccaagaacacagacctgtttgagatgattgagaagatgcagggcagcaggatggatgagcagcgctgcagcttccccccacccctgaagacagaggaggactacatcccctaccccagcgtgcatgaggtgctgggccgggagggccccttccccctcatcctgctgccccagtttggaggctactggattgagggcaccaaccacgagatcaccagcatccctgagacagagcccctgcagagccccaccaccaaggtgaagctggagtgcaaccccacagcccgcatctacaggaagcacttcctgggcaaggagcacttcaactactacagcctggatgctgccctgggccacctggtgttcagcctgaagtatgatgtgattggagaccaggagcacctgcggctgctgctgcggaccaagtgcaggacctaccatgatgtgatccccatcagctgcctgacagagttccccaacgtggtgcagatggccaagctggtgtgtgaagatgtgaatgtggaccgcttctaccctgtgctgtaccccaaggccagccggctgattgtgacctttgatgaacatgtgatcagcaacaacttcaagtttggagtcatctaccagaagctgggccagtag

SEQ ID NO: 19536 - DNA, 606 bp, synthetic construct; identical to SEQ ID NO: 19014
  source 1..606: mol_type = other DNA; note = Synthetic coding sequence

SEQ ID NO: 19537 - DNA, 1707 bp, synthetic construct
  source 1..1707: mol_type = other DNA; note = Synthetic coding sequence
atgggcctgctgaccttcagagatgtggccatcgagttcagcctggaggagtggcagtgcctggacacagcccagaggaacctgtacaagaatgtcatcctggagaactacagaaacctggtgttcctgggcattgctgtgtccaagcaggacctgatcacctgcctggagcaggagaaggagcccctgactgtgaagagacatgagatggtgaatgagccccctgtgatgtgcagccactttgcccaggagttctggccagagcagaacatcaaggacagctttgagaaggtgaccctgcggcgctatgaaaaatgtggaaatgacaacttccagctgaagggctgcaagtctgtggatgagtgcaagctgcacaagggcggctacaacggcctgaaccagtgcctgcccaccatgcagagcaagatgttccagtgtgacaagtatgtgaaggtgttcaacaagttcagccacagcgacagacacaagatcaagcacatggagaacaagcccttcaagtgcaaggaatgtggccgctccttctgcatgctgagccacctgaccaggcatgagaggaactacaccaaggtgaacttctgcaagtgtgaggagtgtgagaaggctgtgaaccagagcagcaagctgaccaagcacaagaggatctacacctgtgagaagctgtacaagtgccaggagtgtgacaggaccttcaaccagttcagcaacctgacagagtacaagaaggactatgcccgggagaagccctacaagtgtgaggagtgtgggaaggccttcaaccagagcagccacctgaccacccacaagatcatccacactggagagaagccctacaagtgtgaggagtgtgggaaggccttcaaccagttcagcaacctgaccacccacaagaagatccacactggagagcagccctacatctgtgaggagtgtgggaaggccttcacccagagcagcaccctgaccacccacaagaggatccacactggagagaagccctacaagtgtgaggagtgtgggaaggccttcaacagaagcagcaagctgacagagcacaagaacatccacactggagagcagccctacaagtgtgaggagtgtgggaaggccttcaacagaagcagcaacctgacagagcacaggaagatccacacagaggagaagccctacaagtgcaaggaatgtgggaaggccttcaagcacagcagcgccctgaccacccacaagaggatccacactggagagaagccctacaagtgtgaggagtgtgggaaggccttcaacagaagcagcaagctgacagagcacaagaagctgcacacaggcaagaagccctacaagtgtgaggagtgtgggaaggccttcatccagagcagcaagctgacagagcacaagaagatccacagcggggagatcccctacaagtgtgaggagtgtgggaaggccttcaagcacagcagcagcctgaccacccacaagaggatccacactggagagaagccctacaagtgtgaggagtgtgggaaggccttcagccgcagcagcaagctgacagagcacaagatcatccacactggagagaagccctacaagtgtgagcgctgtgacaaggccttcaaccagagcgccaacctgaccaagcacaagaagatccacactggagagaagctgcagaactggaatgtgtag

SEQ ID NO: 19538 - DNA, 1383 bp, synthetic construct
  source 1..1383: mol_type = other DNA; note = Synthetic coding sequence
atggattctgagctgatgcacagcatcgtgggcagctaccacaagcccccagagcgggtgtttgtgcccagcttcacccagaatgagcccagccagaactgccacccagccaacctggaggtgaccagccccaagatcctgcacagccccaacagccaggccctgatcctggccctgaagaccctgcaggagaagatccaccggctggagctggagaggacccaggccgaggacaacctgaacatcctgagccgggaggccgcccagtacaagaaggccctggagaatgagaccaatgaaagaaacctggcccaccaggagctgatcaagcagaagaaggacatcagcatccagctgagcagcgcccagagccgctgcaccctgctggagaagcagctggagtacaccaagaggatggtgctgaatgtggagcgggagaagaacatgatcctggagcagcaggcccagctgcagcgggagaaggagcaggaccagatgaagctgtatgccaagctggagaagctggatgtgctggagaaggagtgcttccggctgaccaccacccagaagacagctgaggacaagatcaagcacctggaggagaagctgaaggaggaggagcaccagaggaagctgttccaggacaaggccagcgagctgcagacaggcctggagatcagcaagatcatcatgagctctgtgagcaacctgaagcacagcaaggagaagaagaagagcagcaagaagaccaagtgcatcaagagaagaccaccctggcagatctgcagcaagtttggagccctgccctttgtggccgagaagatgaggcagcaccgggacccccacatcctgcagaagcccttcaacgtgacagagacccgctgcctgcccaagcccagcaggaccacctcctggtgcaaggccatccccccagattctgagaagagcatcagcatctgtgacaacctgtctgagctgctgatggccatgcaggatgagctggaccagatgtccatggagcaccaggagctgctgaagcagatgaaggagacagagagccacagcgtgtgtgatgacattgaatgtgagctggagtgcctgctgaagaagatggagatcaagggggagcagatcagcaagctgaagaagcaccaggacagcgtgtgcaagctgcagcagaaggtgcagaacagcaagatgtctgaggccagcggcatccagcaggaggacagctaccccaagggcagcaagaacatcaagaacagccccaggaagtgcctgacagacaccaacctcttccagaagaacagcagcttccaccccatccgggtgcacaacctgcagatgaagctgcggagagatgacatcatgtgggagcagtag

SEQ ID NO: 19539 - DNA, 1833 bp, synthetic construct
  source 1..1833: mol_type = other DNA; note = Synthetic coding sequence
atgagccagaccagcctgaagcagaagaagaatgaacctggcatgaggagcagcaaggagagcctggaggccgagaagaggaaggagagtgacaagacaggagtgcggctgagcaaccagatgagaagagctgtgaaccccaaccacagcctgcgctgctgccccttccagggccacagcagctgccgccgctgcctgtgtgccgctgagggcacagccctgggcccctgccacaccatccgcatctacatccacatgtgcctgctgtgggagcagggccagcagatcaccatgatgaggggcagccaggagagcagcctgaggaagacagacagccggggctacctggtgcgcagccagtggagccgcatcagccgcagccccagcaccaaggcccccagcattgatgagcccaggagcaggaacaccagcgccaagctgcccagcagcagcaccagcagcaggacccccagcaccagccccagcctgcatgacagcagccccccacccctgagcggccagcccagcctgcagcccccagccagcccccagctgcccaggagcctggacagcaggcctcccaccccacctgagccagaccccggcagccgccgcagcaccaagatgcaggagaaccctgaggcctgggcccagggcatcgtgcgggagatccggcagacccgggacagccagcccctggagtacagcaggaccagccccacagagtggaagagcagcagccagaggcggggcatctacccagccagcacccagctggacaggaacagcctgtctgagcagcagcagcagcagagagaagatgaagatgattatgaggccgcctactgggcctccatgaggagcttctatgagaagaaccccagctgcagccggccctggccacccaagcccaagaatgccatcaccatcgccctgagcagctgtgccctcttcaacatggtggatggcaggaagatctatgagcaggagggcctggagaagtacatggagtaccagctgaccaatgaaaatgtcatcctgaccccaggccctgccttccgctttgtgaaggccctgcagtatgtgaatgcccggctgcgggacctgtacccagatgagcaggacctgtttgatattgtgctgatgaccaacaaccacgcccaggtgggcgtgcggctcatcaacagcgtgaaccactacggcctgctgattgaccgcttctgcctgaccggcggcaaggaccccatcggctacctgaaggcctacctgaccaacctgtacatcgctgctgacagcgagaaggtgcaggaggccatccaggagggcatcgccagcgccaccatgtttgatggagccaaggacatggcctactgtgacacccagctgcgggtggcctttgatggagatgctgtgctcttcagtgatgaaagtgagcacttcaccaaggagcacggcctggacaagttcttccagtatgacaccctgtgtgagagcaagcccctggcccagggccccctgaagggcttcctggaggacctgggccgcctgcagaagaagttctacgccaagaatgaaaggctgctgtgccccatccgcacctacctggtgacagcccggtctgctgccagcagcggggcccgggtgctgaagaccctgcggcgctggggcctggagattgatgaggccctcttcctggccggggcccccaagagccccatcctggtgaagatccggccccacatcttctttgatgaccacatgttccacatcgagggcgcccagaggctgggcagcattgctgcctacggcttcaacaagaagttcagcagctag

SEQ ID NO: 19540 - DNA, 456 bp, synthetic construct
  source 1..456: mol_type = other DNA; note = Synthetic coding sequence
atgagcaagaacacagtgagcagcgcccgcttcaggaaggtggatgtggatgaatatgatgagaacaagtttgtggatgaggaggatggaggagatggccaggccggcccagatgaaggagaggtggacagctgcctgcggcagggcaacatgacagctgccctgcaggccgccctgaagaacccccccatcaacaccaagagccaggccgtgaaggacagagctggcagcatcgtgctgaaggtgctgatctccttcaaggccaatgacatcgagaaggctgtgcagagcctggacaagaatggagtggacctgctgatgaagtacatctacaagggctttgagagccccagcgacaacagcagcgccatgctgctgcagtggcatgagaaggccctggccgccggcggcgtgggcagcatcgtgcgggtgctgacagccaggaagacagtgtag

SEQ ID NO: 19541 - DNA, 3522 bp, synthetic construct
  source 1..3522: mol_type = other DNA; note = Synthetic coding sequence
atggtgacagtgggcaccaacatcctgcccagcaggcctgctgccagcgccaacacagcccgggaggatgctgccctcttcagccgccgcatcccccccaggcacaagaatggagctgcccagcccggggccgcccctggccctggggcccctggggccaacatgggaaatgcccacagcaagagcggggacagacattctgccctgcccggccggcctgagctgtccttctacggcagcttccccaggaagtggagcgaaaatgtgttcctggacaatgagctgctgaccagcaagatcctgtctgtgctgcggccccagagcgagcggggcttccgggccggggacctgcgctaccccacccacttcctgagcaccaacagcgtgctggcctctgtgacagccagcctgaaggagcacccccggggcaccctgctgagtgatggcagccctgccctgagcagaaatgtgggcatgacagtgtcccagaagggcggcccccagcccacccccagccctgctggccctggcacccagctgggccccatcaccggggagatggatgaggccgacagcgccttcctgaagttcaagcagacagcagatgacagcctgagcctgaccagccccaacacagagagcatctttgtggaggacccctacacagccagcctgcggagtgaaattgaaagtgatggccacgagtttgaggccgagagctggagcctggccgtggatgctgcctatgccaagaagcagaagcgggaggtggtgaagaggcaggatgtgctgtatgagctgatgcagacagaggtgcaccacgtgaggaccctgaagatcatgctgaaggtgtacagccgggccctgcaggaggagctgcagttcagcagcaaggccatcggccgcctcttcccctgtgctgatgacctgctggagacccacagccacttcctggcccggctgaaggagcggcggcaggagagcctggaggagggcagtgacagaaattatgtgatccagaagatcggggacctgctggtgcagcagttctctggagaaaatggagagaggatgaaggagaagtatggagtcttctgcagcggccacaatgaggccgtgagccactacaagctgctgctgcagcagaacaagaagttccagaacctgatcaagaagattggcaacttcagcatcgtgcggcggctgggcgtgcaggagtgcatcctgctggtgacccagaggatcaccaagtaccctgtgctggtggagcgcatcatccagaacacagaagctggaacagaggactatgaggacctgacccaggccctgaacctgatcaaggacatcatcagccaggtggatgccaaggtgtctgaatgtgagaagggccagaggctgcgggagattgctgggaagatggacctgaagagcagcagcaagctgaagaatggcctgaccttcaggaaggaggacatgctgcagaggcagctgcacctggagggcatgctgtgctggaagaccaccagcggccgcctgaaggacatcctggccatcctgctgacagatgtgctgctgctgctgcaggagaaggaccagaagtatgtgtttgcctctgtggacagcaagccccctgtgatcagcctgcagaagctgattgtgcgggaggtggccaatgaggagaaggccatgttcctgatcagcgccagcctgcagggccctgagatgtatgagatctacaccagcagcaaggaggacagaaatgcctggatggcccacatccagagagctgtggagagctgcccagatgaggaggagggccccttcagcctgcctgaggaggagaggaaggtggtggaggcccgggccacccggctgcgggacttccaggagcggctgtccatgaaggaccagctgattgcccagagcctgctggagaagcagcagatctacctggagatggccgagatgggcggcctggaggacctgccccagccccggggcctcttccggggcggggaccccagcgagaccctgcagggcgagctgatcctgaagagcgccatgtctgaaattgagggcatccagagcctcatctgccggcagctgggcagcgccaacggccaggccgaggatggcggcagcagcacaggccccccccggcgggcagagacctttgctggctatgactgcaccaacagccccaccaagaatggcagcttcaagaagaaggtgagcagcacagacccccggccccgggactggaggggcccccccaacagcccagacctgaagctgagtgacagcgacatccctggcagcagcgaggagagcccccaggtggtggaggcccctggaacagaaagtgacccccggctgcccaccgtgctggagagcgagctggtgcagaggatccagaccctgagccagctgctgctgaacctgcaggccgtcatcgcccaccaggacagctatgtggagacccagagagctgccatccaggagcgggagaagcagttccggctgcagagcacccggggcaacctgctgctggagcaggagcggcagaggaactttgagaagcagcgggaggagcgggccgccctggagaagctgcagagccagctgcggcatgagcagcagcgctgggagcgggagcggcagtggcagcaccaggagctggagcgggccggggcccggctgcaggagcgggagggggaggcccggcagctgcgggagcggctggagcaggagagagctgagctggagcggcagaggcaggcctaccagcacgacctggagcggctgcgggaggcccagagagctgtggagcgggagcgggagcggctggagctgctgcggcggctgaagaagcagaacacagcccctggggccctgcccccagacaccctggccgaggcccagccccccagccaccccccatccttcaatggagagggcctggagggcccccgggtgtccatgctgcccagcggcgtgggcccagaatatgcagagaggcctgaggtggcccggcgggacagcgcccccacagagaaccggctggccaagagtgatgtgcccatccagctgctgagcgccaccaaccagttccagaggcaggccgctgtgcagcagcagatccccaccaagctggccgccagcaccaagggcggcaaggacaagggcggcaagagccggggcagccagcgctgggagagcagcgccagctttgacctgaagcagcagctgctgctgaacaagctgatgggcaaggatgagagcaccagcaggaacagaagaagcctgagccccatcctgcccggccgccacagccctgcccctcctccagaccccggcttccctgcccccagccccccacctgctgacagccccagcgagggcttcagcctgaaggccggcggcacagccctgctgcccggccccccagcccccagccccctgcctgccacccccctgagcgccaaggaggatgccagcaaggaggatgtgatcttcttctag

SEQ ID NO: 19542 - DNA, 1674 bp, synthetic construct
  source 1..1674: mol_type = other DNA; note = Synthetic coding sequence
atggacagcacagtgcccagcgccctggagctgccccagaggctggccctgaacccccgggagagccccaggagccctgaggaggaggagccccacctgctgagcagcctggccgctgtgcagaccctggccagcgtcatccggccctgctacggcccccacggccggcagaagttcctggtgaccatgaagggggagaccgtgtgcaccggctgtgccacagccatcctgcgggccctggagctggagcaccctgctgcctggctgctgcgggaggccggccagacccaggctgaaaattctggagatggaacagcctttgtggtgctgctgacagaggccctgctggagcaggccgagcagctgctgaaggccggcctgccccggccccagctgcgggaggcctatgccacagccacagctgaggtgctggccaccctgcccagcctggccatccagagcctgggccccctggaggaccccagctgggccctgcacagcgtgatgaacacccacaccctgagccccatggaccacctgaccaagctggtggcccacgcctgctgggccatcaaggagctggatggcagcttcaagccagagcgggtgggcgtgtgtgccctgcccggcggcaccctggaggacagctgcctgctgcccggcctggccatcagcggcaagctgtgtggccagatggccaccgtgctgagcggggcccgggtggccctgtttgcctgccccttcggccctgcccaccccaatgccccagccacagcccggctgagcagccctgctgacctggcccagttcagcaagggcagtgaccagctgctggagaagcaggtgggccagctggccgccgccggcatcaacgtggccgtggtgctgggggaggtggatgaggagaccctgaccctggccgacaagtatggcatcgtggtgatccaggcccgctcctggatggagatcatctacctgtctgaggtgctggacacccccctgctgccccggctgctgcccccccagaggcctgggaagtgccagagggtgtaccggcaggagctgggagatggcctggccgtggtgtttgagtgggagtgcaccggcaccccagccctgactgtggtgctgcggggggccaccacccagggcctgcggtctgctgagcaggccgtgtaccacggcattgatgcctacttccagctgtgccaggaccccaggctcatccctggggccggggccacagagatggccctggccaagatgctgagtgacaagggcagccggctggagggccccagcggccctgccttcctggcctttgcctgggccctgaagtacctgcccaagaccctggccgagaatgccggcctggccgtgtctgatgtgatggccgagatgtctggagtgcaccagggcggcaacctgctgatgggcgtgggcacagagggcatcatcaacgtggcccaggagggcgtgtgggacaccctcatcgtgaaggcccagggcttccgggctgtggccgaggtggtgctgcagctggtgacagtggatgagatcgtggtggccaagaagagccccacccaccaggagatctggaacccagacagcaagaagaccaagaagcaccccccacctgtggagaccaagaagatcctgggcctgaacaactag

SEQ ID NO: 19543 - DNA, 939 bp, synthetic construct
  source 1..939: mol_type = other DNA; note = Synthetic coding sequence
atgaccaggagcctcttcaagggcaacttctggagcgctgacatcctgagcaccatcggctatgacaacatcatccagcacctgaacaacggcaggaagaactgcaaggagtttgaggacttcctgaaggagcgggccgccatcgaggagagatatggcaaggacctgctgaacctgagcaggaagaagccctgtggccagagcgagatcaacaccctgaagagggccctggaggtgttcaagcagcaggtggacaacgtggcccagtgccacatccagctggcccagagcctgcgggaggaggccaggaagatggaggagttccgggagaagcagaagctgcagaggaagaagacagagctgatcatggatgccatccacaagcagaagagcctgcagttcaagaagaccatggatgccaagaagaactatgagcagaagtgccgggacaaggatgaggccgagcaggccgtgagccgcagcgccaacctggtgaaccccaagcagcaggagaagctgtttgtgaagctggccaccagcaagacagctgtggaggacagcgacaaggcctacatgctgcacatcggcaccctggacaaggtgcgggaggagtggcagagcgagcacatcaaggcctgtgaggcctttgaggcccaggagtgtgagcgcatcaacttcttcagaaatgccctgtggctgcacgtgaaccagctgagccagcagtgtgtgaccagtgatgagcaccccagctgcatgaggatcagcaccccacccaggaggatgcagagccagcaggagcggctgcagggcctgacctggcagggcgaggaccccagccagttcctgaaggcccaccagatgatccccatcaccctgtggctgatgaccaccgtgtgcagcatcagcaagatcaatgagacccgggccttctctggatag

SEQ ID NO: 19544 - DNA, 3693 bp, synthetic construct
  source 1..3693: mol_type = other DNA; note = Synthetic coding sequence
atgcccaggaagggcacccagcccagcacagccaggagaagagaggagggccccccaccacccagcccagatggagccagcagtgatgctgagcctgagccccccagcggccgcacagagagccctgccacagctgctgagacagccagcgaggagctggacaacagaagcctggaggagatcctgaacagcatccccccacctcctcctccagccatgaccaatgaagctggggccccccggctgatgatcacccacatcgtgaaccagaacttcaagagctatgctggggagaagatcctgggccccttccacaagcgcttcagctgcatcatcggccccaatggaagtggcaagagcaatgtgattgacagcatgctgtttgtgtttggctaccgggcccagaagatccgcagcaagaagctgtctgtgctgatccacaacagtgatgagcacaaggacatccagagctgcaccgtggaggtgcacttccagaagatcatcgacaaggagggagatgattatgaagtcatccccaacagcaacttctacgtgtccaggacagcctgccgggacaacacctctgtgtaccacatcagcggcaagaagaagaccttcaaggatgtgggcaacctgctgcggagccacggcatcgacctggaccacaaccgcttcctgatcctgcagggcgaggtggagcagatcgccatgatgaagcccaagggccagacagaacatgatgagggcatgctggagtacctggaggacatcatcggctgcggccgcctgaatgagcccatcaaggtgctgtgccggcgggtggagatcctgaatgagcacagaggagagaagctgaacagagtgaagatggtggagaaggagaaggatgccctggagggggagaagaacatcgccatcgagttcctgaccctggagaatgagatcttcaggaagaagaaccacgtgtgccagtactacatctatgagctgcagaagagaattgctgagatggagacccagaaggagaagatccacgaggacaccaaggagatcaatgagaagagcaacatcctgagcaatgagatgaaggccaagaacaaggatgtgaaggacacagagaagaagctgaacaagatcaccaagttcatcgaggagaacaaggagaagttcacccagctggacctggaggatgtgcaggtgcgggagaagctgaagcacgccaccagcaaggccaagaagctggagaagcagctgcagaaggacaaggagaaggtggaggagttcaagagcatcccagccaagagcaacaacatcatcaatgagaccaccaccagaaataatgccctggagaaggagaaggagaaggaggagaagaagctgaaggaggtgatggacagcctgaagcaggagacccagggcctgcagaaggagaaggagagccgggagaaggagctgatgggcttcagcaagtctgtgaatgaggcccggagcaagatggatgtggcccagagcgagctggacatctacctgagccgccacaacacagctgtgtcccagctgaccaaggccaaggaggccctgattgctgccagcgagaccctgaaggagaggaaggccgccatccgggacatcgagggcaagctgccccagacagagcaggagctgaaggagaaggagaaggagctgcagaagctgacccaggaggagaccaacttcaagagcctggtgcatgacctcttccagaaggtggaggaggccaagagcagcctggccatgaacagaagccggggcaaggtgctggatgccatcatccaggagaagaagagcggccgcatccctggcatctacggccgcctgggggacctgggcgccattgatgagaagtatgatgtggccatcagcagctgctgccacgccctggactacatcgtggtggacagcattgacatcgcccaggagtgtgtgaacttcctgaagaggcagaacattggagtggccaccttcatcggcctggacaagatggctgtgtgggccaagaagatgacagagatccagaccccagagaacaccccccggctgtttgacctggtgaaggtgaaggatgagaagatccggcaggccttctactttgccctgcgggacaccctggtggccgacaacctggaccaggccaccagggtggcctaccagaaggaccggcgctggagggtggtgaccctgcagggccagatcatcgagcagagcggcaccatgactggaggcggcagcaaggtgatgaagggccgcatgggcagcagcctggtgattgagatcagcgaggaggaggtgaacaagatggagagccagctgcagaatgacagcaagaaggccatgcagatccaggagcagaaggtgcagctggaggagcgggtggtgaagctgcggcacagcgagcgggagatgaggaacaccctggagaagttcaccgccagcatccagaggctgattgagcaggaggagtacctgaatgtgcaggtgaaggagctggaggccaacgtgctggccacagccccagacaagaagaagcagaagctgctggaggagaatgtgtctgccttcaagacagaatatgatgctgtggccgagaaggccggcaaggtggaggccgaggtgaagaggctgcacaacaccatcgtggagatcaacaaccacaagctgaaggcccagcaggacaagctggacaagatcaacaagcagctggatgaatgtgccagcgccatcaccaaggcccaggtggccatcaagacagctgacaggaacctgcagaaggcccaggacagcgtgctgaggacagagaaggagatcaaggacacagagaaggaggtggatgacctgacagctgagctgaagagcctggaggacaaggctgctgaggtggtgaagaacaccaatgctgctgagatcagcaagatcagcctgcaccccatcgaggacaaccccatcgaggagatctctgtgctgagccctgaggacctggaggccatcaagaacccagacagcatcaccaaccagatcgccctgctggaggcccgctgccacgagatgaagcccaacctgggcgccatcgccgagtacaagaagaaggaggagctgtacctgcagagggtggccgagctggacaagatcacctatgagcgggacagcttccggcaggcctatgaggacctgaggaagcagaggctgaatgagttcatggccggcttctacatcatcaccaacaagctgaaggagaactaccagatgctgaccctgggcggagatgctgagctggagctggtggacagcctggaccccttcagcgagggcatcatgttttctgtgcggccccccaagaagtcctggaagaagatcttcaacctgagcggcggggagaagaccctgagcagcctggccctggtgtttgccctgcaccactacaagcccacccccctgtacttcatggatgaaattgatgctgccctggacttcaagaatgtgtccatcgtggccttctacatctatgagcagaccaagaatgcccagttcatcatcatcagcctgaggaacaacatgtttgagatcagtgaccggctgattggcatctacaagacctacaacatcaccaagtctgtggccgtgaaccccaaggagatcgccagcaagggcctgtgctag

SEQ ID NO: 19545 - DNA, 2661 bp, synthetic construct
  source 1..2661: mol_type = other DNA; note = Synthetic coding sequence
atggagctgcgctgtggcggcctgctcttcagcagcagatttgacagcggcaacctggcccacgtggagaaggtggagagcctgagcagtgatggagagggcgtgggcggcggggccagcgccctgaccagcggcatcgccagcagcccagactatgagttcaacgtgtggaccaggccagactgtgccgagacagaatttgaaaatggaaacagatcctggttctacttctctgtgcggggcggcatgcctgggaagctgatcaagatcaacatcatgaacatgaacaagcagagcaagctgtacagccagggcatggccccctttgtgaggaccctgcccacccggccccgctgggagcgcatccgggaccggcccacctttgagatgacagagacccagtttgtgctgagctttgtgcacagatttgtggagggccgcggggccaccaccttctttgccttctgctaccccttctcctacagcgactgccaggagctgctgaaccagctggaccagcgcttccctgagaaccaccccacccacagcagccccctggacaccatctactaccaccgggagctgctgtgctacagcctggatggcctgcgggtggacctgctgaccatcaccagctgccacggcctgcgggaggaccgggagccccggctggagcagctgttcccagacaccagcaccccccggcccttccgctttgctgggaagaggatcttcttcctgagcagccgggtgcaccctggagagacccccagcagctttgtgttcaacggcttcctggacttcatcctgcggccagatgacccccgggcccagaccctgcggcggctgtttgtgttcaagctgatccccatgctgaacccagatggagtggtgcggggccactacagaacagacagccggggcgtgaacctgaaccggcagtacctgaagccagatgctgtgctgcacccagccatctatggagccaaggctgtgctgctgtaccaccacgtgcacagccggctgaacagccagagcagcagcgagcaccagcccagcagctgcctgcccccagatgcccctgtgtctgacctggagaaggccaacaacctgcagaatgaggcccagtgtggccacagcgctgacagacacaatgctgaggcctggaagcagacagagcctgctgagcagaagctgaacagcgtgtggatcatgccccagcagagcgctggcctggaggagagcgccccagacaccatcccccccaaggagagcggcgtggcctactacgtggacctgcacggccacgccagcaagaggggctgcttcatgtatggcaacagcttcagtgatgagagcacccaggtggagaacatgctgtaccccaagctgatcagcctgaacagcgcccactttgacttccagggctgcaacttcagcgagaagaacatgtatgcccgggacagaagagatggccagagcaaggagggcagcggccgggtggccatctacaaggccagcggcatcatccacagctacaccctggagtgcaactacaacacaggccgctctgtgaacagcatcccagctgcctgccacgacaatggccgggccagccccccacctcctccagccttccccagccgctacacagtggagctgtttgagcaggtgggccgggccatggccatcgccgccctggacatggccgagtgcaacccctggccccgcatcgtgctgtctgagcacagcagcctgaccaacctgcgggcctggatgctgaagcacgtgaggaacagccggggcctgagcagcaccctgaatgtgggcgtgaacaagaagaggggcctgcggaccccacccaagagccacaacggcctgcctgtgtcctgcagcgagaacaccctgagccgggcccgctccttcagcacaggcaccagcgctgggggcagcagcagcagccagcagaacagcccccagatgaagaacagccccagcttccccttccacggcagcaggcctgctggcctgcccggcctgggcagcagcacccagaaggtgacccaccgggtgctgggccctgtgcgggagcccaggagccaggacagaagacggcagcagcagcccctgaaccacaggcctgctggcagcctggcccccagccctgcccccaccagcagcggccctgccagcagccacaagctgggcagctgcctgctgcctgacagcttcaacatccctggcagcagctgcagcctgctgagcagcggggacaagccagaggccgtgatggtgattggcaagggcctgctgggcactggagccaggatgccctgcatcaagacccggctgcaggcccggccccggctgggccggggcagcccccccacccggcggggcatgaagggcagcagcggccccaccagccccacccccaggacccgggagagcagcgagctggagctgggcagctgcagcgccaccccaggcctgccccaggcccggcccccccggcccaggtctgccccagccttcagccccatcagctgcagcctgagtgacagccccagctggaactgctacagccggggccccctgggccagcctgaggtgtgctttgtgcccaagagcccccccctgactgtgagcccccgggtgtag

SEQ ID NO: 19546 - DNA, 4221 bp, synthetic construct; identical to SEQ ID NO: 19364
  source 1..4221: mol_type = other DNA; note = Synthetic coding sequence

SEQ ID NO: 19547 - DNA, 1308 bp, synthetic construct
  source 1..1308: mol_type = other DNA; note = Synthetic coding sequence
atgggagacctggagctgctgctgcctggagaggccgaggtgctggtgcggggcctgcgctccttccccctgcgggagatgggcagcgagggctggaaccagcagcacgagaacctggagaagctgaacatgcaggccatcctggatgccaccgtgtcccagggcgagcccatccaggagctgctggtgacccacggcaaggtgcccaccctggtggaggagctgattgctgtggagatgtggaagcagaaggtgtttcctgtgttctgccgggtggaggacttcaagccccagaacaccttccccatctacatggtggtgcaccacgaggccagcatcatcaacctgctggagaccgtcttcttccacaaggaggtgtgtgagagcgcagaagatactgtgctggacctggtggactactgccacaggaagctgaccctgctggtggcccagagcggctgcggcggccccccagagggggagggcagccaggacagcaaccccatgcaggagctgcagaagcaggccgagctgatggagtttgaaattgccctgaaggccctgtctgtgctgcgctacatcacagactgtgtggaccggcagtggagcgtgtcccagcccccccagctggcccacctgaagaggatccagaggctgcaccctgtgtgctggttcctgagccctgggaagctgcagcagtttgagggcagccgctggcacacagtggcccccagcgagcagcagaagctgagcaagctggatggccaggtgtggatcgccctgtacaacctgctgctgagccctgaggcccaggcccgctactgcctgaccagctttgccaagggccgcctgctgaagctgcgggccttcctgacagacaccctgctggaccagctgcccaacctggcccacctgcagagcttcctggcccacctgaccctgacagagacccagccccccaagaaggacctggtgctggagcagatccctgagatctgggagcggctggagagagaaaatagaggcaagtggcaggccatcgccaagcaccagctgcagcacgtgttcagccccagcgagcaggacctgcggctgcaggcccggcgctgggccgagacctaccgcctggatgtgctggaggccgtggcccctgagcggccccgctgtgcctactgcagcgctgaggccagcaagcgctgcagccgctgccagaatgagtggtactgctgccgggagtgccaggtgaagcactgggagaagcacggcaagacctgtgtgctggccgcccagggcgaccgggccaagtag

SEQ ID NO: 19548 - DNA, 1377 bp, synthetic construct
  source 1..1377: mol_type = other DNA; note = Synthetic coding sequence
atgaatgaggccatggccacagacagcccccggcggcccagccgctgcacaggaggagtggtggtgcggccccaggccgtgacagagcagagctacatggagagcgtggtgaccttcctgcaggatgtggtgccccaggtgtactgctgcggggacaacatccagagctacacagccaccgtcatctctgctgccaagaccctgaagagcggcctgaccatggtgggcaaggtggtgacccagctgaccggcaccctgcccagcggcgtgacagaagatgatgtggccatccacagcaacagccgccgcagccccctggtgcccggcatcatcaccgtcatcgacacagagaccgtgggggagggccaggtgctggtgtctgaggacagcgacagtgatggcatcgtggcccacttccctgcccacgagaagcctgtgtgctgcatggccttcaacaccagcggcatgctgctggtgaccacagacaccctgggccatgacttccacgtgttccagatcctgacccacccctggagcagcagccagtgtgctgtgcaccacctgtacaccctgcacagaggagaaacagaggccaaggtgcaggacatctgcttcagccatgactgccgctgggtggtggtgtccaccctgcggggcaccagccacgtgttccccatcaacccctatggaggccagccctgtgtgaggacccacatgagcccccgggtggtgaacaggatgagccgcttccagaagtctgctggcctggaggagattgagcaggagctgaccagcaagcagggcggccgctgcagccctgtgcccggcctgagcagcagccccagcggcagccccctgcacggcaagctgaacagccaggacagctacaacaacttcaccaacaacaaccctggcaacccccggctgagccccctgcccagcctgatggtggtgatgcccctggcccagatcaagcagcccatgaccctgggcaccatcaccaagaggacaggcaaggtgaagcccccaccccagatcagccccagcaagtccatgggcggggagttctgtgtggccgccatcttcggcaccagccgctcctggtttgccaacaatgccggcctgaagcgggagaaggaccagagcaagcaggtggtggtggagagcctgtacatcatcagctgctacggcaccctggtggagcacatgatggagccccagcccctgaatggcatgaactgcagccaccggctgatgcagaccaccctgtgcagcagcctgcagatgcagtacagcatcatcagcagctgcctgctggcctggttccccctggaggtgctgggccccctgctggacatgggcctgaccaccgtgtag

SEQ ID NO: 19549 - DNA, 309 bp, synthetic construct
  source 1..309: mol_type = other DNA; note = Synthetic coding sequence
atgagggccagcccctgcatcagccagcctgctgcctcctggcacccccggcccagcgccctgcggcccacagctggcagcggccctgacaccaggaccccaggcaccgtggaggatggcagcgccccctgcccagccttccgcagccctgctgtgagcccctgtggggaggagccctgctgcttccagatcagccctgctgaggagaccctggagctgggccgcctggtgtccccaggctgccacaagagcagcgccccccaggagcggcggctggacccccgggcccgctgtgtggtgcacatctag

SEQ ID NO: 19550 - DNA, 4227 bp, synthetic construct; identical to SEQ ID NO: 19164
  source 1..4227: mol_type = other DNA; note = Synthetic coding sequence

SEQ ID NO: 19551 - DNA, 2994 bp, synthetic construct
  source 1..2994: mol_type = other DNA; note = Synthetic coding sequence
cggcccccacctgctggcccccaggcccctgagggcgcccgggccggcagcaggcctgtgcagctgctggccctgctgagctcctggtgtgaggagctgggccgcctgctgctgctgcggcaccagaagagccggcagagcgaccccccaggcaagctgcccatgcagccccccctgagctccatgagctccatgaagcccaccctgagccacagtgatggcagcttcccctatgacagcgtgccctggcagcagaacaccaaccagcccccaggcagcctgtctgtggtgaccaccgtgtggggcgtgaccaacaccagccagagccaggtgctgggcaaccccatggccaatgccaacaaccccatgaaccctgggggcaaccccatggccagcggcatgaccaccagcaaccctggcctgaacagcccccagtttgctggccagcagcagcagttcagcgccaaggccggccctgcccagccctacatccagcagagcatgtatggccggcccaactacccaggcagcggcggctttggagccagctacccaggcggccccaatgccccagctggcatgggcatccccccccacacccggcccccagctgacttcacccagcctgctgctgctgctgctgctgctgctgtggccgctgctgctgccacagccacagccacagccacagccaccgtggccgccctgcaggagacccagaacaaggacatcaaccagtatggccccatgggccccacccaggcctacaacagccagttcatgaaccagcccggcccccggggccctgcctccatgggcggctccatgaacccagcctccatggctgctggcatgacccccagcggcatgagcggcccccccatgggcatgaaccagccccggcccccaggcatcagccccttcggcacccacggccagaggatgccccagcagacctacccaggcccccggccccagagcctgcccatccagaacatcaagaggccctacccaggagagcccaactacggcaaccagcagtatggccccaacagccagttccccacccagcccggccagtacccagcccccaaccccccccggcccctgaccagccccaactacccaggccagaggatgcccagccagcccagcagcggccagtaccccccacccaccgtgaacatgggccagtactacaagccagagcagttcaacggccagaacaacaccttcagcggcagcagctacagcaactacagccagggcaatgtgaaccggccccccaggcctgtgcctgtggccaactacccccacagccctgtgcccggcaaccccaccccacccatgaccccaggcagcagcatccccccctacctgagccccagccaggatgtgaagccacccttccccccagacatcaagcccaacatgtctgccctgcccccacctccagccaaccacaatgatgagctgcggctgaccttccctgtgagagatggagtggtgctggagcccttccggctggagcacaacctggccgtgagcaaccacgtgttccacctgcggcccaccgtgcaccagaccctgatgtggaggagtgacctggagctgcagttcaagtgctaccaccacgaggaccggcagatgaacaccaactggccagcctctgtgcaggtgtctgtgaatgccacccccctgaccatcgagcggggggacaacaagaccagccacaagcccctgcacctgaagcacgtgtgccagcctggaagaaacaccatccagatcaccgtgacagcctgctgctgcagccacctgtttgtgctgcagctggtgcaccggcccagcgtgcgctctgtgctgcagggcctgctgaagaagaggctgctgcctgctgagcactgcatcaccaagatcaagaggaacttcagctctgtggccgccagcagcggcaacaccaccctgaatggagaagatggagtggagcagacagccatcaaggtgtccctgaagtgccccatcaccttccgccgcatccagctgcctgcccggggccatgactgcaagcacgtgcagtgctttgacctggagagctacctgcagctgaactgtgagcggggcacctggcgctgccctgtgtgcaacaagacagccctgctggagggcctggaggtggaccagtacatgtggggcatcctgaatgccatccagcacagcgagtttgaggaggtgaccatcgaccccacctgctcctggaggcctgtgcccatcaagagtgacctgcacatcaaggatgatcctgatggcatccccagcaagcgcttcaagaccatgagccccagccagatgatcatgcccaacgtgatggagatgattgctgccctgggccctggccccagcccctaccccctgcccccacctcctgggggcaccaacagcaatgactacagcagccagggcaacaactaccagggccacggcaactttgacttcccccacggcaaccctgggggcacctccatgaatgacttcatgcacggccccccccagctgagccaccccccagacatgcccaacaacatggccgccctggagaagcccctgagccaccccatgcaggagaccatgcctcatgctggcagcagtgaccagccccaccccagcatccagcagggcctgcacgtgccccaccccagcagccagagcggcccccccctgcaccacagcggggcccctcctcctccacccagccagcccccccggcagcccccccaggccgcccccagcagccacccccacagcgacctgaccttcaaccccagcagcgccctggagggccaggccggggcccagggcgccagtgacatgcctgagcccagcctggacctgctgcctgagctgaccaacccagatgagctgctgagctacctggaccccccagacctgcccagcaacagcaatgatgacctgctgagcctgtttgagaacaactag

SEQ ID NO: 19552 - DNA, 3405 bp, synthetic construct
  source 1..3405: mol_type = other DNA; note = Synthetic coding sequence
atgggcaaggagcaggagctgctggaggccgccaggacaggccacctgcctgctgtggagaagctgctgagcggcaagaggctgagcagcggctttggaggcggcggcggcggcggcagcggcggcggcggcggcggcagcggcggcggcggcggcggcctgggcagcagcagccaccccctgagcagcctgctgtccatgtggaggggccccaacgtgaactgtgtggacagcacaggctacacccccctgcaccacgccgccctgaatggccacaaggatgtggtggaggtgctgctgagaaatgatgccctgaccaacgtggccgacagcaagggctgctaccccctgcacctggccgcctggaagggagatgcccagatcgtgcggctgctgatccaccagggccccagccacaccagggtgaatgagcagaacaatgacaatgaaacagccctgcactgtgccgcccagtatggccacacagaggtggtgaaggtgctgctggaggagctgacagaccccaccatgaggaacaacaagtttgagacccccctggacctggccgccctgtatggccgcctggaggtggtgaagatgctgctgaatgcccaccccaacctgctgagctgcaacaccaagaagcacacccccctgcacctggccgccagaaatggccacaaggctgtggtgcaggtgctgctggatgctggcatggacagcaactaccagacagagatgggcagcgccctgcacgaggccgccctgtttgggaagacagatgtggtgcagatcctgctggccgccggcacagatgtgaacatcaaggacaaccacggcctgacagccctggacacagtgcgggagctgcccagccagaagagccagcagattgctgccctgattgaggaccacatgaccgggaagaggagcaccaaggaggtggacaagaccccaccaccccagcccccactcatcagctccatggacagcatcagccagaagagccagggagatgtggagaaggctgtgacagagctgatcatcgactttgatgccaatgctgaggaggagggcccctatgaggccctgtacaatgccatcagctgccacagcctggacagcatggccagcggccgcagcagtgaccaggacagcaccaacaaggaggccgaggccgccggcgtgaagccagctggggtgcggccccgggagaggcctcctcctccagccaagcccccaccagatgaggaggaggaggaccacatcgacaagaagtacttccccctgacagccagcgaggtgctgtccatgaggccccgcatccacggcagcgctgcccgggaggaggatgagcacccctatgagctgctgctgacagctgagaccaagaaggtggtgctggtggatggcaagaccaaggaccacagaagaagcagcagcagccgcagccaggacagcgctgagggccaggacggccaggtgcctgagcagttcagcggcctgctgcacggcagcagccctgtgtgtgaggtgggccaggaccccttccagctgctgtgcacagctggccagagccacccagatggcagcccccagcagggcgcctgccacaaggcctccatgcagctggaggagactggagtgcacgcccctggggccagccagcccagcgccctggaccagagcaagagggtgggctacctgaccggcctgcccaccaccaacagccgcagccaccctgagaccctgacccacacagccagcccccaccctgggggcgctgaggagggggacagaagtggggcccggagccgggccccacccaccagcaagcccaaggccgagctgaagctgagccgcagcctgagcaagagtgacagcgacctgctgacctgcagccccacagaagatgccaccatgggcagccgctctgagagcctgagcaactgcagcatcggcaagaagaggctggagaagagccccagctttgccagcgagtgggatgaaattgagaagatcatgagcagcatcggggagggcatcgacttcagccaggagcggcagaagatcagcggcctgcggaccctggagcagagcgtgggggagtggctggagagcatcggcctgcagcagtatgagagcaagctgctgctgaatggatttgatgatgtgcacttcctgggcagcaatgtgatggaggagcaggacctgcgggacatcggcatcagtgacccccagcacaggaggaagctgctgcaggccgcccggagcctgcccaaggtgaaggccctgggctatgatggcaacagcccccccagcgtgcccagctggctggacagcctgggcctgcaggactatgtgcacagcttcctgagcagcggctacagcagcattgacacagtgaagaacctgtgggagctggagctggtgaatgtgctgaaggtgcagctgctgggccacaggaagaggatcatcgccagcctggccgaccggccctatgaggagcccccccagaagcccccacgcttcagccagctgcgctgccaggacctgctgagccagaccagcagccccctgagccagaatgacagctgcaccggccgctctgctgacctgctgctgcccccaggggacaccggcagaagaagacatgacagcctgcatgaccctgctgcccccagcagagctgagcgcttccgcatccaggaggagcaccgggaggccaagctgaccctgcggccccccagcctggccgccccctatgcccctgtgcagagctggcagcaccagcctgagaagctgatctttgagagctgtggctatgaggccaactacctgggctccatgctgatcaaggacctgcggggcacagagagcacccaggatgcctgtgccaagatgaggaagagcacagagcacatgaagaagatccccaccatcatcctgagcatcacctacaagggcgtgaagttcattgatgccagcaacaagaatgtgattgctgagcacgagatccggaacatcagctgtgccgcccaggaccctgaggacctgtgcacctttgcctacatcaccaaggacctgcagaccagccaccactactgccacgtgttcagcacagtggatgtgaacctgacctatgagatcatcctgaccctgggccaggcctttgaggtggcctaccagctggccctgcaggcccagaagagccgggccaccggggccagcgctgctgagatgattgagaccaagagcagcaagcctgtgcccaagccccgggtgggcgtgaggaagagcgccctggagcccccagacatggaccaggatgcccagagccacgcctctgtgtcctgggtggtggaccccaagccagacagcaagaggagcctgagcaccaactag

SEQ ID NO: 19553 - DNA, 3099 bp, synthetic construct
  source 1..3099: mol_type = other DNA; note = Synthetic coding sequence
atggaggccgctgctgctgtggtggccgctgaggccgaggtggagaatgaagatggagacagcagctgtggagatgtgtgcttcatggacaagggcctgcagagcatcagcgagctgagcctggacagcaccctgcatgctgtgaacctgcactgcaacaacatcagcaagattgaggccatcgaccacatctggaacctgcagcacctggacctgagcagcaaccagatcagccgcatcgagggcctgaacaccctgaccaagctgtgcaccctgaacctgagctgcaacctgatcaccaaggtggagggcctggaggagctgatcaacctgacccggctgaatgtgtcctacaaccacattgatgacctgagcggcctcatccccctgcacggcatcaagcacaagctgcgctacatcgacctgcacagcaacagaattgacagcatccaccacctgctgcagtgcatggtgggcctgcacttcctgaccaacctgatcctggagaaggatggagatgacaaccctgtgtgccgcctgcccggctacagagctgtgatcctgcagaccctgccccagctgcgcatcctggactgcaagaacatctttggagagcctgtgaacctgacagagatcaacagcagccagctgcagtgcctggagggcctgctggacaacctggtgtccagtgacagccccctgaacatcagtgaagatgagatcatcgacaggatgcctgtgatcacagcccccattgatgagctggtgcccctggagcagtttgccagcacccccagtgatgctgtgctgaccagcttcatgtctgtgtgccagagcagcgagcctgagaagaacaaccatgaaaatgacctgcagaatgagatcaagctgcagaagctggatgaccagatcctgcagctgctgaatgagaccagcaacagcattgacaacgtgctggagaaggacccccggcccaagagggacacagacatcaccagcgagagtgactatggcaacaggaaggagtgcaacaggaaggtgcccaggaggagcaagatcccctatgatgccaagaccatccagaccatcaagcaccacaacaagaactacaacagctttgtgtcctgcaacaggaagatgaagccaccctacctgaaggagctgtatgtgagcagcagcctggccaactgccccatgctgcaggagagcgagaagcccaagacagagatcatcaaggtggaccagagccacagcgaggacaacacctaccagagcctggtggagcagctggaccaggagcgggagaagcgctggagggctgagcaggccgagaacaagctgatggactacattgatgagctgcacaagcacgccaatgagaaggaggacatccacagcctggccctgctgaccacagaccggctgaaggagatcatcttccgggagaggaacagcaagggccagctggaggtgatggtgcacaagctgcagaatgagatcaagaagctgactgtggagctgatgaaggccaaggaccagcaggaggaccacctgaagcacctgcggaccctggagaagaccctggagaagatggagcggcagaagaggcagcagcaggccgcccagatccgcctcatccaggaggtggagctgaaggccagcgctgctgaccgggagatctacctgctgcggaccagcctgcaccgggagcgggagcaggcccagcagctgcaccagctgctggccctgaaggagcaggagcacaggaaggagctggagacccgggagttcttcacagatgctgacttccaggatgccctggccaaggagatcgccaaggaggagaagaagcatgagcagatgatcaaggagtaccaggagaagattgatgtgctgagccagcagtacatggacctggagaatgagttcagaattgccctgactgtggaggcccggcgcttccaggatgtgaaggatggctttgaaaatgtggccacagagctggccaagagcaagcacgccctgatctgggcccagaggaaagaaaatgaaagcagcagcctcatcaaggacctgacctgcatggtgaaggagcagaagaccaagctggccgaggtgtccaagctgaagcaggagacagctgccaacctgcagaaccagatcaacaccctggagatcctgattgaagatgacaagcagaagagcatccagatcgagctgctgaagcatgagaaggtgcagctgatcagcgagctggccgccaaggagagcctcatcttcggcctgaggacagagaggaaggtgtggggccacgagctggcccagcagggcagcagcctggcccagaacagaggcaagctggaggcccagatcgagagcctgagcagagaaaatgaatgtctgaggaagaccaatgaaagtgacagtgatgccctgcgcatcaagtgcaagatcattgatgaccagacagagaccatcaggaagctgaaggactgcctgcaggagaaggatgagcacatcaagaggctgcaggagaagatcacagaaattgagaagtgcacccaggagcagctggatgagaagagcagccagctggatgaggtgctggagaagctggagcggcacaatgaaaggaaggagaagctgaagcagcagctgaagggcaaggaggtggagctggaggagatcaggaaggcctacagcaccctgaacaggaagtggcatgacaagggggagctgctgtgccacctggagacccaggtgaaggaggtgaaggagaagtttgagaacaaggagaagaagctgaaggccgagcgggacaagagcattgagctgcagaagaatgccatggagaagctgcacagcatggatgatgccttcaagaggcaggtggatgccatcgtggaggcccaccaggccgagatcgcccagctggccaatgagaagcagaagtgcatcgacagcgccaacctgaaggtgcaccagatcgagaaggagatgagggagctgctggaggagacctgcaagaacaagaagaccatggaggccaagatcaagcagctggcctttgccctgaatgagatccagcaggacatgtag

SEQ ID NO: 19554 - DNA, 219 bp, synthetic construct
  source 1..219: mol_type = other DNA; note = Synthetic coding sequence
atgagctaccagcagcagcagtgcaagcagccctgccagcccccacctgtgtgccccacccccaagtgcccagagccctgccccccacccaagtgcccagagccctgccccagccccaagtgcccccagccctgccccccccagcagtgccagcagaagtacccacctgtgacccccagccccccctgccagcccaagtgcccccccaagagcaagtag

SEQ ID NO: 19555 - DNA, 888 bp, synthetic construct; identical to SEQ ID NO: 19226
  source 1..888: mol_type = other DNA; note = Synthetic coding sequence

SEQ ID NO: 19556 - DNA, 1491 bp, synthetic construct; identical to SEQ ID NO: 19263
  source 1..1491: mol_type = other DNA; note = Synthetic coding sequence

SEQ ID NO: 19557 - DNA, 1575 bp, synthetic construct
  source 1..1575: mol_type = other DNA; note = Synthetic coding sequence
atgagcagctgtgtgagcagccagcccagcagcaacagagctgccccccaggatgagctgggcggccggggcagcagcagcatccacctgggcatggagagcttcatcgtggtgacagaatgtgagcccggctgtgctgtggacctgggcctggcccgggaccggcccctggaggctgatggccaggaggtgcccctggacaccagcggcagccaggcccggccccacctgagcggcaggaagctgagcctgcaggagaggagccagggcggcctggccgccggcggcagcctggacatgaatggccgctgcatctgccccagcctgccctacagccctgtgagcagcccccagagcagcccccggctgccccggcggcccaccgtggagagccaccacgtgtccatcaccggcatgcaggactgtgtgcagctgaaccagtacaccctgaaggatgagatcggcaagggcagctatggagtggtgaagctggcctacaatgaaaatgacaacacctactatgccatgaaggtgctgagcaagaagaagctgatccggcaggccggcttcccccggcggcccccaccccggggcaccaggcctgcccctgggggctgcatccagccccggggccccatcgagcaggtgtaccaggagatcgccatcctgaagaagctggaccaccccaacgtggtgaagctggtggaggtgctggatgaccccaatgaagaccacctgtacatggtgtttgagctggtgaaccagggccctgtgatggaggtgcccaccctgaagcccctgtctgaggaccaggcccgcttctacttccaggacctgatcaagggcatcgagtacctgcactaccagaagatcatccaccgggacatcaagcccagcaacctgctggtgggagaagatggccacatcaagattgctgactttggagtgtccaatgagttcaagggcagtgatgccctgctgagcaacacagtgggcaccccagccttcatggcccctgagagcctgtctgagaccaggaagatcttcagcggcaaggccctggatgtgtgggccatgggcgtgaccctgtactgctttgtgtttggccagtgccccttcatggatgagcgcatcatgtgcctgcacagcaagatcaagagccaggccctggagttcccagaccagcctgacattgctgaggacctgaaggacctgatcaccaggatgctggacaagaaccctgagagccgcatcgtggtgcctgagatcaagctgcacccctgggtgaccaggcatggagctgagcccctgcccagtgaagatgagaactgcaccctggtggaggtgacagaggaggaggtggagaacagcgtgaagcacatccccagcctggccaccgtcatcctggtgaagaccatgatcaggaagaggagctttggaaacccctttgagggcagcagaagagaggagaggagcctgagcgcccctggcaacctgctgaccaagcagggcagcgaggacaacctgcagggcacagaccccccacctgtgggggaggaggaggtgctgctgtag

SEQ ID NO: 19558 - DNA, 1902 bp, synthetic construct
  source 1..1902: mol_type = other DNA; note = Synthetic coding sequence
atgaaggccatcaagaagagcctgacagaggaggagtacctgtacctggacttcagccaccagacagagggctgcatcttccccctgcacacctctgtgaccctcttcctgctgagctactgtgactgcaagatcttcaagatctgcctggtggtgaccaaggaggtgtcccgggacagcagcctgctgagagatgacctgatccaggatgtggagatccagatcatcagccggcaggagctgccccccatcgtgcagaactgctgcctgcctgctgtggtggagaggagtgacaacttctgcagagctggcctggccgtggtgctgcggcacatcatccagaagagctatgaagctgaccccctgaagaaggagctgctggagctgctgggcttcaagaagacctgcctgaaggcctgtgccgaggtgtcccagtggacccggctgtgtgagctgaccatccccctggccatcgagaacttcctgcgggagagcagtgaccagccccccaccatccctgtggagatcctgcagctggagaagaagctgtctgagcctgtgcgggtgcacaatgatgacaagctgcggcggcagaagctgaagcagcagaaggcagatggagtgggcccccccctgaccaagggcaaggccaagagcaaggtgcacacccaggagaccagcgagggcctggacagcagcagcaagagcctggagctgaaggtggccttcagcaagctgactgtgcaggaggagcccgccaccaccaaccgggagcccagccacatcaggaaggccaaggccagtgacctgccccccctggagcacgtgtttgctgagggcctgtacttcaccctggccgacatcgtgctgctgccctgcatccaccacttcctggtgatcatcagcaggaagttcagcgagaagctggtggagttccccctgctggcctcctggtaccagaggatccaggaggtgcctggggtgaagacagctgccagcaaatgtggcatccagttcctgcacctgcccaagctgctgaccaccagcacagagcagcaccccaacctgtgtgaggtgcctggggtggaggagcagagcgaccccctcttcatcggcggcccccggcccaccatggccaagctgatggagaagggcatcgaggtgatgttcagcccccacccctgccccacctggaccctggactggaatgtgctgcctgctgctgtgagccccaaggagggcaagatgagcagtgaccgggccctgaggaagcagcagcagctgaacaacctggtgtatgtggtgaccaaccaggccaagccaggggacagaattgtggacttctgcagcggcggcggccacgtgggcatcgtgctggcccacatgctgcccagctgccaggtgaccctgattgagaacaaggagctgagcctcatccgggccaagaagagaagtgatgagctgggcctgagcaacatctggttcatccaggccaacatggagtacttcaccggcatgttcaacattggagtggccctgcacgcctgtggggtggccacagacatggtgattgagcactgcatcaagacccgggccagctttgtgacctgcccctgctgctacggcttcatccagaacaccagcaagttcaacttccccaagtctgagcagttcaagaagaccctgagctacaaggagcacatgatcctgtgccgctttgctgaccagacagctgtgcagctgcccccccagaggaggctcatcggcaagcagtgcatgtgcctggtggacctggaccgggcccgggctgctgaggagtgtggctacagcgtgcaggtgatctccatggagcctgagagctgcagccccaagaacaacatgattgtgggcgtgcccatctag

SEQ ID NO: 19559 - DNA, 519 bp, synthetic construct
  source 1..519: mol_type = other DNA; note = Synthetic coding sequence
atgagcagcggcaactaccagcagagcgaggccctgagcaagcccaccttcagcgaggagcaggccagcgccctggtggagagcgtgtttggcctgaaggtgtccaaggtgcggcccctgcccagctatgatgaccagaacttccacgtgtatgtgtccaagaccaaggatggccccacagaatatgtgctgaagatcagcaacaccaaggccagcaagaacccagacctgattgaggtgcagaaccacatcatcatgttcctgaaggctgctggcttccccacagcctctgtgtgccacaccaagggggacaacacagccagcctggtgtctgtggacagcggcagcgagatcaagagctacctggtgcggctgctgacctacctgcccggccggcccatcgccgagctgcctgtgagcccccagctgctgtatgaaattggcaagctggccgccaagctggacaagaccctgcaggagggcaagccccgggtgacccccctgctggccaagaactag

SEQ ID NO: 19560 - DNA, 2937 bp, synthetic construct
  source 1..2937: mol_type = other DNA; note = Synthetic coding sequence
atgggctggaagcccagcgaggcccggggccagagccagagcttccaggccagcggcctgcagcccaggagcctgaaggccgcccggcgggccaccggccgcccagacaggagccgggccgcccggcccaccatggaccccagcgcccacaggagccgggccgccccacccaacatggaccctgacccccaggccggcgtgcaggtgggcatgagggtggtgcggggcgtggactggaagtggggccagcaggatggaggagagggcggcgtgggcaccgtggtggagctgggccgccacggcagccccagcaccccagacagaacagtggtggtgcagtgggaccagggcaccaggaccaactaccgggccggctaccagggcgcccatgacctgctgctgtatgacaatgcccagatcggcgtgcgccaccccaacatcatctgtgactgctgcaagaagcacggcctgcggggcatgcgctggaagtgccgggtgtgcctggactatgacctgtgcacccagtgctacatgcacaacaagcatgagctggcccacgcctttgacagatatgaaacagcccacagcaggcctgtgaccctgagcccccggcagggcctgccccgcatccccctgcggggcatcttccagggcgccaaggtggtgcggggccctgactgggagtggggcagccaggatggaggagagggcaagccaggccgggtggtggacatccggggctgggatgtggagaccggccgctctgtggcctctgtgacctgggcagatggcaccaccaacgtgtacagagtgggccacaagggcaaggtggacctgaagtgtgtgggggaggccgccggcggcttctactacaaggaccacctgccccggctgggcaagccagctgagctgcagaggagagtgtctgctgacagccagcccttccagcacggggacaaggtgaagtgcctgctggacacagatgtgctgcgggagatgcaggagggccatggaggctggaaccccaggatggccgagttcatcggccagacaggaacagtgcaccgcatcacagacagaggagatgtgcgggtgcagttcaaccacgagacccgctggaccttccaccctggggccctgaccaaggccctgggccgggtgggcaaggtggtgaaggtgtttggagatggcaacctgcgggtggccgtggccggccagcgctggaccttcagccccagctgcctggtggcctacagacctgaggaggatgccaacctggatgtggccgagcgggcccgggagaacaagagcagcctgtctgtggccctggacaagctgcgggcccagaagagtgaccctgagcaccctggccgcctggtggtggaggtggccctgggcaatgctgcccgggccctggacctgctgcggcggcggcctgagcaggtggacaccaagaaccagggccgcacagccctgcaggtggccgcctacctgggccaggtggagctgatccggctgctgctgcaggcccgggccggcgtggacctgcctgatgatgagggcaacacagccctgcactacgccgccctgggcaaccagcctgaggccaccagggtgctgctgtctgctggctgcagagcagatgccatcaacagcacccagagcacagccctgcacgtggccgtgcagaggggcttcctggaggtggtgcgggccctgtgtgagcggggctgtgatgtgaacctgcctgatgcccacagcgacacccccctgcacagcgccatctctgctggcactggagccagcggcatcgtggaggtgctgacagaggtgcccaacattgatgtgacagccaccaacagccagggcttcaccctgctgcaccacgccagcctgaagggccacgccctggccgtgaggaagatcctggcccgggcccggcagctggtggatgccaagaaggaggatggcttcaccgccctgcacctggccgccctgaacaaccaccgggaggtggcccagatcctgatccgggagggccgctgtgatgtgaatgtgaggaacaggaagctgcagagccccctgcacctggccgtgcagcaggcccacgtgggcctggtgcccctgctggtggatgctggctgcagcgtgaatgcagaagatgaggagggggacacagccctgcacgtggccctgcagaggcaccagctgctgcccctggtggctgatggagctggaggagaccccggccccctgcagctgctgagccggctgcaggccagcggcctgcccggcagcgctgagctgactgtgggcgctgctgtggcctgcttcctggccctggagggcgcagatgtgtcctacaccaaccaccggggccgcagccccctggacctggccgctgagggccgggtgctgaaggccctgcagggctgtgcccagcgcttccgggagcggcaggccggcggcggggccgcccctggcccccggcagaccctgggcacccccaacacagtgaccaacctgcacgtgggcgccgcccctggccctgaggccgctgagtgcctggtgtgcagcgagctggccctgctggtgctcttcagcccctgccagcacaggacagtgtgtgaggagtgtgcccggaggatgaagaagtgcatccgctgccaggtggtggtgtccaagaagctgcggccagatggcagcgaggtggccagcgctgccccagcccctggccccccccggcagctggtggaggagctgcagagccgctaccggcagatggaggagcgcatcacctgccccatctgcatcgacagccacatccggctggtgttccagtgtggccacggggcctgtgccccctgtggcagcgccctgagcgcctgccccatctgccggcagcccatccgggaccgcatccagatctttgtgtag

SEQ ID NO: 19561 - DNA, 1074 bp, synthetic construct
  source 1..1074: mol_type = other DNA; note = Synthetic coding sequence
atgggcggcgctgtgtctgctggagaagataatgatgacctgattgacaacctgaaggaggcccagtacatcagaacagagcgggtggagcaggccttccgggccatcgacagaggagactactacctggagggctacagagacaatgcctacaaggacctggcctggaagcacggcaacatccacctgagcgccccctgcatctacagcgaggtgatggaggccctgaagctgcagcccggcctgtccttcctgaacctgggcagcggcaccggctacctgagcaccatggtgggcctcatcctgggccccttcggcatcaaccacggcatcgagctgcacagtgatgtggtggagtatgccaaggagaagctggagagcttcatcaagaacagcgacagctttgacaagtttgagttctgtgagcccgcctttgtggtgggcaactgcctgcagatcgccagtgacagccaccagtatgaccgcatctactgtggggccggcgtgcagaaggaccacgagaactacatgaagatcctgctgaaggtgggcggcatcctggtgatgcccatcgaggaccagctgacccagatcatgaggacaggccagaacacctgggagagcaagaacatcctggccgtgtcctttgcccccctggtgcagcccagcaagaatgacaatggcaagccagacagcgtgggcctgcccccctgtgctgtgaggaacctgcaggacctggcccgcatctacatccggaggaccctgaggaacttcatcaatgatgagatgcaggccaagggcatcccccagagggccccacccaagaggaagaggaagagggtgaagcagaggatcaacacctacgtgtttgtgggcaaccagctgatcccccagcccctggacagcgaggaggatgagaagatggaggaggacaacaaggaggaggaggagaaggaccacaatgaggccatgaagccagaggagcccccccagaacctgctgcgggagaagatcatgaagctgcccctgcctgagagcctgaaggcctacctgacctacttccgggacaagtag

SEQ ID NO: 19562 - DNA, 633 bp, synthetic construct
  source 1..633: mol_type = other DNA; note = Synthetic coding sequence
atgagctgccccaactactgcagcggcaacagcaacagcggcagcctgcggaccagccgccacatccccctgaccagcattgacctgtgccccacctctgtgtcctgtggagatgtgctgtacctgcccaccagcagccaggaccacacctgggtgacagacaactgccaggagacctgtggggagcccaccagctgccagcctgtgcactgtgaaacaggcaacctggagaccagctgtggcagcagcacagcctactacgtgccccggccctgccagggcagcagcttcctgcctgccagcttcttcagcagcagctgcctgcctgtgtcctgccggccccagagatatgtgagcagcggctgccggcccctgcggcccctgctgaacagctaccagcccatcggggactgtgtgcccaatgcctaccggccccagttctgcctgagcaagagctgccagccccagaacctgctgaccagcggctgccagcccagcagctgcctggcctaccggccccagagcctgcacgtggtgagcagcagcctgcggcccctgggccccctcttcagcggctgccagcccctgacccacgtgttcagcacctgccggcccagctgcagcggcctgtag

SEQ ID NO: 19563 - DNA, 606 bp, synthetic construct
  source 1..606: mol_type = other DNA; note = Synthetic coding sequence
atggccagcggagatgacagccccatctttgaagatgatgagagccccccctacagcctggagaagatgacagacctggtggccgtgtgggatgtggccctgagtgatggagtgcacaagattgaatttgaacatggcaccaccagcggcaagagggtggtgtatgtggatggcaaggaggagatcaggaaggagtggatgttcaagctggtgggcaaggagaccttctacgtgggcgccgccaagaccaaggccaccatcaacattgatgccatcagcggctttgcctatgagtacaccctggagatcaacgggaagagcctgaagaagtacatggaggacaggagcaagaccaccaacacctgggtgctgcacatggatggagagaacttcagaattgtgctggagaaggatgccatggatgtgtggtgcaatggcaagaagctggagacagctggggagtttgtggatgatggaacagagacccacttcagcatcggcaaccacgactgctacatcaaggctgtgagcagcggcaagaggaaggagggcatcatccacaccctcatcgtggacaaccgggagatccctgagatcgccagctag

SEQ ID NO: 19564 - DNA, 3390 bp, synthetic construct
  source 1..3390: mol_type = other DNA; note = Synthetic coding sequence
atgcctgccaccaggaagcccatgagatatggccacacagagggccacacagaggtgtgctttgatgacagcggcagcttcatcgtgacctgtggcagtgatggagatgtgcgcatctgggaggacctggatgatgatgaccccaagttcatcaacgtgggggagaaggcctacagctgtgccctgaagagcggcaagctggtgacagctgtgagcaacaacaccatccaggtgcacaccttccctgagggcgtgcctgatggcatcctgacccgcttcaccaccaatgccaaccacgtggtgttcaatggagatggcaccaagattgctgctggcagcagtgacttcctggtgaagatcgtggatgtgatggacagcagccagcagaagaccttccggggccatgatgcccctgtgctgagcctgagctttgaccccaaggacatcttcctggccagcgccagctgtgatggctctgtgcgggtgtggcagatcagtgaccagacctgtgccatctcctggcccctgctgcagaagtgcaatgatgtgatcaatgccaagagcatctgccgcctggcctggcagcccaagagcggcaagctgctggccatccctgtggagaagtctgtgaagctgtaccgccgggagagctggagccaccagtttgacctgagtgacaacttcatcagccagaccctgaacatcgtgacctggagcccctgtggccagtacctggccgccggcagcatcaatggcctcatcatcgtgtggaatgtggagaccaaggactgcatggagcgggtgaagcatgagaagggctacgccatctgtggcctggcctggcaccccacctgtggccgcatctcctacacagatgctgagggcaacctgggcctgctggagaatgtgtgtgaccccagcggcaagaccagcagcagcaaggtgagcagccgggtggagaaggactacaatgacctgtttgatggagatgacatgagcaatgctggggacttcctgaatgacaatgctgtggagatccccagcttcagcaagggcatcatcaatgatgatgaagatgatgaggacctgatgatggccagcggccggccccggcagaggagccacatcctggaggatgatgaaaattctgtggacatctccatgctgaagacaggcagcagcctgctgaaggaggaggaggaggatggccaggagggcagcatccacaacctgcccctggtgaccagccagaggcccttctatgatggccccatgcccaccccccggcagaagcccttccagagcggcagcacccccctgcacctgacccaccgcttcatggtgtggaacagcatcggcatcatccgctgctacaatgatgagcaggacaatgccattgatgtggagttccatgacaccagcatccaccacgccacccacctgagcaacaccctgaactacaccatcgctgacctgagccatgaggccatcctgctggcctgtgagagcacagatgagctggccagcaagctgcactgcctgcacttcagctcctgggacagcagcaaggagtggatcatcgacctgccccagaatgaagatattgaggccatctgcctgggccagggctgggccgctgctgccaccagcgccctgctgctgcggctcttcaccatcggcggcgtgcagaaggaggtgttcagcctggccggccctgtggtgtccatggccggccatggagagcagctgttcatcgtgtaccaccggggcactggatttgatggagaccagtgcctgggcgtgcagctgctggagctgggcaagaagaagaagcagatcctgcatggagaccccctgcccctgaccaggaagagctacctggcctggattggcttctctgctgagggcaccccctgctacgtggacagcgagggcatcgtgaggatgctgaacagaggcctgggcaacacctggacccccatctgcaacacccgggagcactgcaagggcaagagtgaccactactgggtggtgggcatccacgagaacccccagcagctgcgctgcatcccctgcaagggcagccgcttcccccccaccctgcccaggcctgctgtggccatcctgtccttcaagctgccctactgccagatcgccacagagaagggccagatggaggagcagttctggaggagcgtcatcttccacaaccacctggactacctggccaagaatggctatgaatatgaggagagcaccaagaaccaggccaccaaggagcagcaggagctgctgatgaagatgctggccctgagctgcaagctggagcgggagttccgctgtgtggagctggccgacctgatgacccagaatgctgtgaacctggccatcaagtatgccagccgcagcaggaagctgatcctggcccagaagctgtctgagctggccgtggagaaggctgctgagctgacagccacccaggtggaggaggaggaggaggaggaggacttcaggaagaagctgaatgccggctacagcaacacagccacagagtggagccagccccgcttcaggaaccaggtggaggaggatgctgaggacagcggggaggctgatgatgaggagaagccagagatccacaagccaggccagaacagcttcagcaagagcaccaacagcagtgatgtgtctgccaagagcggggctgtgaccttcagcagccagggccgggtgaaccccttcaaggtgtctgccagcagcaaggagcccgccatgtccatgaacagcgcccggagcaccaacatcctggacaacatgggcaagagcagcaagaagagcacagccctgagcaggaccaccaacaatgagaagagccccatcatcaagcccctcatccccaagcccaagcccaagcaggccagcgctgccagctacttccagaagaggaacagccagaccaacaagacagaggaggtgaaggaggagaacctgaagaatgtgctgtctgagaccccagccatctgccccccccagaacacagagaaccagaggcccaagacaggcttccagatgtggctggaggagaacagaagcaacatcctgagtgacaacccagacttcagtgatgaggccgacatcatcaaggagggcatgatccgcttccgggtgctgagcacagaggagaggaaggtgtgggccaacaaggccaagggggagacagccagcgagggcacagaggccaagaagaggaagagggtggtggatgaaagtgatgaaacagagaaccaggaggagaaggccaaggagaacctgaacctgagcaagaagcagaagcccctggacttcagcaccaaccagaagctgagcgcctttgccttcaagcaggagtag

SEQ ID NO: 19565 - DNA, 1476 bp, synthetic construct
  source 1..1476: mol_type = other DNA; note = Synthetic coding sequence
tctggcagcagccacagcttccctggcagcctggaggtgacagccctgatgaccacctggagcagcctgcagggcagccacgtgtccaagagggccctggcctatgccctggtggtgaccaactgccaggagcgcatccagcactggaagaaggtggacaatgactacaatgccctgcgggagcggctgagcaccctgcctgacaagctgagctacaacatcatggtgcccttcggcccctttgccttcatgcctgggaagctggtgcacaccaatgaggtgacagtgctgctgggggacaactggtttgccaagtgcagcgccaagcaggccgtgggcctggtggagcacaggaaggagcacgtgaggaagaccattgatgacctgaagaaggtgatgaagaactttgagagccgggtggagttcacagaggacctgcagaagatgtctgatgctgctggggacatcgtggacatccgggaggagatcaagtgtgactttgagttcaaggccaagcacagaattgcccacaagccccacagcaagcccaagaccagtgacatctttgaagctgacatcgccaatgatgtgaagagcaaggacctgctggccgacaaggagctgtgggcccggctggaggagctggagcggcaggaggagctgctgggggagctggacagcaagccagacacagtgattgccaatggagaggacaccaccagcagcgaggaggagaaggaggacaggaacaccaacgtgaatgccatgcaccaggtgacagacagccacaccccctgccacaaggatgtggccagcagcgagcccttcagcggccaggtgaacagccagctgaactgcagcgtgaatggcagcagcagctaccacagtgatgatgatgatgatgatgatgatgatgatgatgatgacaacattgatgatgatgatggagacaatgaccacgaggccctgggcgtgggggacaacagcatccccaccatctacttcagccacacagtggagcccaagagggtgcgcatcaacacaggcaagaacaccaccctgaagttcagcgagaagaaggaggaggccaagaggaagaggaagaacagcactggaagtggccacagcgcccaggagctgcccaccatccgcaccccagctgacatctaccgggcctttgtggatgtggtgaatggagaatatgtgcccaggaagagcatcctgaagagccgcagccgggagaacagcgtgtgcagcgacaccagcgagagcagcgctgctgagtttgatgaccggcggggcgtgctgcggagcatcagctgtgaggaggccacctgcagcgacaccagcgagagcatcctggaggaggagccccaggagaaccagaagaagctgctgcccctgtctgtgaccccagaggtgctgcggctggtgggctacagcaggaacctggcccccctgaatgtcatcctgtag

SEQ ID NO: 19566 - DNA, 981 bp, synthetic construct
  source 1..981: mol_type = other DNA; note = Synthetic coding sequence
atgctgctgagcaagtttggcagcctggcccacctgtgtggccctggaggagtggaccacctgcctgtgaagatcctgcagcctgccaaggctgacaaggagagctttgagaaggcctaccaggtgggcgctgtgctgggcagcggcggctttggaacagtgtatgccggcagcagaattgctgatggcctgcctgtggccgtgaagcacgtggtgaaggagcgggtgacagagtggggcagcctgggcggggccaccgtgcccctggaggtggtgctgctgaggaaggtgggcgccgccggcggggcccggggcgtcatccggctgctggactggtttgagaggccagatggcttcctgctggtgctggagaggcctgagcccgcccaggacctgtttgacttcatcacagagcggggggccctggatgagcccctggcccggcgcttctttgcccaggtgctggccgctgtgcgccactgccacagctgtggggtggtgcaccgggacatcaaggatgagaacctgctggtggacctgcggagcggggagctgaagctgattgactttggcagcggggccctgctgaaggacacagtgtacacagactttgatggcaccagggtgtacagccccccagagtggatccgctaccaccgctaccacggccgcagcgccaccgtgtggagcctgggcgtgctgctgtatgacatggtgtgtggggacatcccctttgagcaggatgaggagatcctgcggggccgcctgctcttcagaagaagagtgtccccagagtgccagcagctgatccgctggtgcctgagcctgcggcccagcgagcggcccagcctggaccagattgctgcccacccctggatgctgggcgcagatggaggagtgcctgagagctgtgacctgcggctgtgcaccctggaccctgatgatgtggccagcaccaccagcagcagcgagagcctgtag

SEQ ID NO: 19567 - DNA, 2880 bp, synthetic construct
  source 1..2880: mol_type = other DNA; note = Synthetic coding sequence
atggccgccagcacaggctacgtgcggctgtggggcgccgcccgctgctgggtgctgcggcggcccatgctggccgctgctgggggccgggtgcccacagctgctggggcctggctgctgcggggccagaggacctgtgatgccagccccccctgggccctgtggggccggggccctgccatcggcggccagtggaggggcttctgggaggccagcagcagaggaggaggagccttctctggaggagaagatgccagcgagggcggcgctgaggagggcgctgggggcgccggcggcagcgctggagctggggagggccctgtgatcacagccctgacccccatgaccatcccagatgtgttcccccacctgcccctgattgccatcaccagaaatcctgtgttcccccgcttcatcaagatcatcgaggtgaagaacaagaagctggtggagctgctgcggaggaaggtgcggctggcccagccctacgtgggcgtcttcctgaagagagatgacagcaatgaaagtgatgtggtggagagcctggatgagatctaccacacaggcacctttgcccagatccacgagatgcaggacctgggggacaagctgaggatgattgtgatgggccaccggcgggtgcacatcagccggcagctggaggtggagcctgaggagcctgaggccgagaacaagcacaagcccaggaggaagagcaagaggggcaagaaggaggctgaagatgagctgagcgcccggcaccctgctgagctggccatggagcccaccccagagctgcctgctgaggtgctgatggtggaggtggagaatgtggtgcatgaggacttccaggtgacagaggaggtgaaggccctgacagctgagatcgtgaagaccatccgggacatcatcgccctgaaccccctgtaccgggagagcgtgctgcagatgatgcaggccggccagagggtggtggacaaccccatctacctgagtgacatgggcgccgccctgactggagctgagagccatgagctgcaggatgtgctggaggagaccaacatccccaagaggctgtacaaggccctgagcctgctgaagaaggagtttgagctgagcaagctgcagcagaggctgggccgggaggtggaggagaagatcaagcagacccacaggaagtacctgctgcaggagcagctgaagatcatcaagaaggagctgggcctggagaaggatgacaaggatgccatcgaggagaagttccgggagcggctgaaggagctggtggtgcccaagcacgtgatggatgtggtggatgaggagctgagcaagctgggcctgctggacaaccacagcagcgagttcaacgtgaccaggaactacctggactggctgaccagcatcccctggggcaagtacagcaatgaaaacctggacctggcccgggcccaggccgtgctggaggaggaccactacggcatggaggatgtgaagaagaggatcctggagttcatcgctgtgtcccagctgcggggcagcacccagggcaagatcctgtgcttctacggccccccaggagtgggcaagaccagcatcgcccggagcatcgcccgggccctgaaccgggagtacttccgcttctctgtgggcggcatgacagatgtggccgagatcaagggccacaggaggacctacgtgggcgccatgcctgggaagatcatccagtgcctgaagaagaccaagacagagaaccccctcatcctgattgatgaggtggacaagattggccggggctaccagggcgaccccagcagcgccctgctggagctgctggaccctgagcagaatgccaacttcctggaccactacctggatgtgcctgtggacctgagcaaggtgctcttcatctgcacagccaacgtgacagacaccatccctgagcccctgcgggacaggatggagatgatcaacgtgtctggctacgtggcccaggagaagctggccatcgccgagcgctacctggtgccccaggcccgggccctgtgtggcctggatgagagcaaggccaagctgagcagtgatgtgctgaccctgctgatcaagcagtactgccgggagagcggcgtgaggaacctgcagaagcaggtggagaaggtgctgaggaagagcgcctacaagatcgtgtctggagaggccgagagcgtggaggtgaccccagagaacctgcaggactttgtgggcaagcctgtgttcaccgtggagaggatgtatgatgtgaccccacctggggtggtgatgggcctggcctggacagccatgggcggcagcaccctgtttgtggagaccagcctgcggcggccccaggacaaggatgccaagggggacaaggatggcagcctggaggtgacaggccagctgggggaggtgatgaaggagagcgcccgcatcgcctacacctttgcccgggccttcctgatgcagcacgccccagccaatgactacctggtgaccagccacatccacctgcacgtgcctgagggcgccacccccaaggatggccccagcgctggctgcaccatcgtgacagccctgctgagcctggccatgggccggcctgtgcggcagaacctggccatgaccggggaggtgtccctgaccgggaagatcctgcctgtgggcggcatcaaggagaagaccatcgccgccaagagagctggggtgacctgcatcgtgctgcctgctgagaacaagaaggacttctatgacctggccgccttcatcacagagggcctggaggtgcactttgtggagcactaccgggagatctttgatattgccttcccagatgagcaggccgaggccctggccgtggagaggtag

SEQ ID NO: 19568 - DNA, 1203 bp, synthetic construct
  source 1..1203: mol_type = other DNA; note = Synthetic coding sequence
atgaacccagccagcgcccccccacccctgcccccacctggccagcaggtgattcatgtgacccaggacctggacacagacctggaggccctcttcaacagcgtgatgaaccccaagcccagctcctggaggaagaagatcctgcctgagagcttcttcaaggagccagacagcggcagccacagccggcagagcagcacagacagcagcggcggccaccctggcccccggctggccggcggggcccagcacgtgcgcagccacagcagccctgccagcctgcagctgggcaccggggccggggctgctggcagccctgcccagcagcacgcccacctgcggcagcagagctatgatgtgacagatgagctgcccctgcccccaggctgggagatgaccttcaccgccaccggccagcgctacttcctgaaccacatcgagaagatcaccacctggcaggaccccaggaaggccatgaaccagcccctgaaccacatgaacctgcaccctgctgtgagcagcacccctgtgccccagaggtccatggctgtgtcccagcccaacctggtgatgaaccaccagcaccagcagcagatggcccccagcaccctgagccagcagaaccaccccacccagaaccccccagctggcctgatgtccatgcccaatgccctgaccacccagcagcagcagcagcagaagctgcggctgcagaggatccagatggagcgggagcgcatccgcatgaggcaggaggagctgatgaggcaggaggccgccctgtgccggcagctgcccatggaggccgagaccctggcccctgtgcaggccgctgtgaacccccccaccatgaccccagacatgaggagcatcaccaacaacagcagtgaccccttcctgaatggaggcccctaccacagccgggagcagagcacagacagcggcctgggcctgggctgctacagcgtgcccaccaccccagaggacttcctgagcaatgtggatgagatggacacaggagaaaatgccggccagacccccatgaacatcaacccccagcagacccgcttcccagacttcctggactgcctgcccggcaccaacgtggacctgggcaccctggagagtgaagatctcatccccctcttcaatgatgtggagagcgccctgaacaagtctgagcccttcctgacctggctgtag

SEQ ID NO: 19569 - DNA, 2625 bp, synthetic construct
  source 1..2625: mol_type = other DNA; note = Synthetic coding sequence
atggaggtgctgcgggagaaggtggaggaggaggaggaggccgagcgggaggaggccgctgagtgggccgagtgggccaggatggagaagatgatgaggcctgtggaggtgaggaaggaggagatcaccctgaagcaggagaccctgcgggacctggagaagaagctgtctgagatccagatcaccgtgtctgctgagctgcctgccttcaccaaggacaccatcgacatcagcaagctgcccatctcctacaagaccaacacccccaaggaggagcacctgctgcaggtggccgacaacttcagccggcagtacagccacctgtgcccagacagagtgcccctcttcctgcaccccctgaatgaatgtgaggtgcccaagtttgtgtccaccaccctgcggcccaccctgatgccctacccagagctgtacaactgggacagctgtgcccagtttgtgtctgacttcctgaccatggtgcccctgcctgaccccctgaagccacccagccacctgtacagcagcaccaccgtgctgaagtaccagaagggcaactgctttgacttcagcaccctgctgtgcagcatgctgattggcagcggctatgatgcctactgtgtgaatggctacggcagcctggacctgtgccacatggacctgacccgggaggtgtgccccctgactgtgaagcccaaggagaccatcaagaaggaggagaaggtgctgcccaagaagtacaccatcaagccaccccgggacctgtgcagcagatttgagcaggagcaggaggtgaagaagcagcaggagatccgggcccaggagaagaagaggctgcgggaggaggaggagcggctgatggaggccgagaaggccaagccagatgccctgcacggcctgcgggtgcacagctgggtgctggtgctgagcggcaagcgggaggtgcctgagaacttcttcatcgaccccttcaccggccacagctacagcacccaggatgagcacttcctgggcatcgagagcctgtggaaccacaagaactactggatcaacatgcaggactgctggaactgctgcaaggacctgatctttgacctgggggaccctgtgcgctgggagtacatgctgctgggcacagacaagagccagctgagcctgacagaggaggatgattctggcatcaatgatgaagatgatgtggagaacctgggcaaggaggatgaggacaagagctttgacatgccccacagctgggtggagcagatcgagatcagccctgaggcctttgagacccgctgccccaacgggaagaaggtgatccagtacaagagggccaagctggagaagtgggccccctacctgaacagcaatggcctggtgtcccggctgaccacctatgaggacctgcagtgcaccaacatcctggagatcaaggagtggtaccagaaccgggaggacatgctggagctgaagcacatcaacaagaccacagacctgaagacagactacttcaagccaggccacccccaggccctgcgggtgcacagctacaagtccatgcagcctgagatggacagagtgattgagttctatgaaacagcccgggtggatggcctgatgaagcgggaggagacccccaggaccatgacagagtactaccagggccgcccagacttcctgagctacagacatgccagctttggcccccgggtgaagaagctgaccctgagcagcgctgagagcaacccccggcccatcgtgaagatcacagagcgcttcttcaggaacccagccaagccagctgaggaggatgtggccgagagggtcttcctggtggccgaggagcgcatccagctgcgctaccactgccgggaggaccacatcacagccagcaagcgggagttcctgcggaggacagaggtggacagcaaaggaaacaagatcatcatgaccccagacatgtgcatcagctttgaggtggagcccatggagcacaccaagaagctgctgtaccagtatgaggccatgatgcacctgaagcgggaggagaagctgagccgccaccaggtgtgggagagcgagctggaggtgctggagatcctgaagctgcgggaggaggaggaggccgcccacaccctgaccatcagcatctatgacaccaagagaaatgagaagagcaaggagtaccgggaggccatggagaggatgatgcatgaggagcacctgcggcaggtggagacccagctggactacctggcccccttcctggcccagctgcccccaggagagaagctgacctgctggcaggccgtgcggctgaaggatgaatgtctgagtgacttcaagcagaggctcatcaacaaggccaacctgatccaggccaggtttgagaaggagacccaggagctgcagaagaagcagcagtggtaccaggagaaccaggtgaccctgaccccagaagatgaagatctctacctgagctactgcagccaggccatgttccgcatccgcatcctggagcagaggctgaacagacacaaggagctggcccccctgaagtacctggccctggaggagaagctgtacaaggacccccggctgggggagctgcagaagatctttgcctag

SEQ ID NO: 19570 - DNA, 1851 bp, synthetic construct
  source 1..1851: mol_type = other DNA; note = Synthetic coding sequence
atggatgtgatgctggagaactactgccacctgatctctgtgggctgccacatgaccaagccagatgtgatcctgaagctggagcggggggaggagccctggaccagctttgctggccacacctgcctggaggagaactggaaggccgaggacttcctggtgaagttcaaggagcaccaggagaagtacagccgctctgtggtgtccatcaaccacaagaagctggtgaaggagaagagcaagatctatgagaagaccttcaccctgggcaagaaccctgtgaacagcaagaacctgcccccagaatatgacacccacggccgcatcctgaagaatgtgtctgagctgatcatcagcaacctgaacccagccaggaagaggctgtctgagtacaacggctacggcaagagcctgctgagcaccaagcaggagaccacccaccctgaggtgaagagccacaaccagagcgcccgggccttcagccacaatgaggtgctgatgcagtaccagaagacagagaccccagcccagagctttggctacaatgactgtgagaagagcttcctgcagaggggcggcctcatcacccacagccggccctacaagggggagaaccccagcgtgtacaacaagaagagaagagccaccaacatcgagaagaagcacacctgcaatgaatgtgggaagagcttctgcaggaagtctgtgctgatcctgcaccagggcatccacagcgaggagaagccctaccagtgccaccagtgtggaaatgccttccggaggaagagctacctgattgaccaccagaggacccacactggagagaagccctttgtgtgcaatgaatgtgggaagagcttccggctgaagacagccctgacagaccaccagaggacccacactggagagaagagctatgaatgtctgcagtgcagaaatgccttccggctgaagagccacctgatccgccaccagaggacccacactggagagaagccctatgaatgtaatgactgtgggaagagcttccggcagaagaccaccctgagcctgcaccagaggatccacactggagagaagccctacatctgcaaggaatgtgggaagagcttccaccagaaggccaacctgactgtgcaccagaggacccacactggagagaagccctacatctgcaatgaatgtgggaagagcttcagccagaagaccaccctggccctgcacgagaagacccacaatgaggagaagccctacatctgcagtgaatgtgggaagagcttccggcagaagaccaccctggtggcccaccagaggacccacactggagagaagagctatgaatgtccccactgcggcaaggccttcaggatgaagagctacctgattgaccaccacaggacccacactggagagaagccctatgaatgtaatgaatgtgggaagagcttcagccagaagaccaacctgaacctgcaccagaggatccacactggagagaagccctacgtgtgcaatgaatgtgggaagagcttccggcagaaggccaccctgactgtgcaccagaagatccacacaggccagaagagctatgaatgtccccagtgtgggaaggccttcagcaggaagagctacctgatccaccaccagaggacccacactggagagaagccctacaagtgcagtgaatgtgggaagtgcttccggcagaagaccaacctgattgtgcaccagaggacccacactggagagaagccctacgtgtgcaatgaatgtgggaagagcttctcctacaagaggaacctgattgtgcaccagaggacccacaagggagaaaatattgagatgcagtag

SEQ ID NO: 19571 - DNA, 441 bp, synthetic construct
  source 1..441: mol_type = other DNA; note = Synthetic coding sequence
atgtgccacaccagctgcagcagcggctgccagcctgcctgctgtgcccccagcccctgccagcctgcctgctgcgtgcccagcagctgccaggccagctgctgcgtgcctgtgggctgccagagctctgtgtgtgtgcctgtgtccttcaagccagctgtgtgcctgcctgtgtcctgccagagctctgtgtgtgtgcccatgtccttcaagtctgctgtgtgtgtgcctgtgtcctgccagagctctgtgtgtgtgcctgtgtcctgccggcccatcgtgtgtgccgcccccagctgccagagcagcctgtgtgtgcctgtgtcctgcaggcctgtggtgtatgctgcccccagctgccagagcagcggctgctgccagcccagctgcacctctgtgctgtgccggcccatctcctacagcatcagcagctgctgctag

SEQ ID NO: 19572 - DNA, 1257 bp, synthetic construct; identical to SEQ ID NO: 19266
  source 1..1257: mol_type = other DNA; note = Synthetic coding sequence

SEQ ID NO: 19573 - DNA, 3351 bp, synthetic construct
  source 1..3351: mol_type = other DNA; note = Synthetic coding sequence
atgtatggcagcgcccggtctgtgggcaaggtggagcccagcagccagagccctggccgcagcccccggctgcccaggagcccccggctgggccacaggaggaccaacagcactggaggcagcagcggcagctctgtgggcggcggcagcggcaagaccctgtccatggagaacatccagagcctgaatgctgcctatgccaccagcggccccatgtacctgagtgaccatgaaaatgtgggcagcgagacccccaagagcaccatgaccctgggccgcagcggcggccgcctgccctacggcgtgaggatgacagccatgggcagcagccccaacatcgccagcagcggcgtggccagtgacaccatcgcctttggagagcaccacctgccccctgtgtccatggccagcacagtgccccacagcctgcggcaggcccgggacaacaccatcatggacctgcagacccagctgaaggaggtgctgcgggagaatgacctgctgaggaaggatgtggaggtgaaggagagcaagctgagcagctccatgaacagcatcaagaccttctggagccctgagctgaagaaggagcgggccctgaggaaggatgaggccagcaagatcaccatctggaaggagcagtacagagtggtgcaggaggagaaccagcacatgcagatgaccatccaggccctgcaggatgagctgcgcatccagagggacctgaaccagctgttccagcaggacagcagcagcaggactggagagccctgtgtggccgagctgacagaggagaacttccagaggctgcacgccgagcacgagcggcaggccaaggagctgttcctgctgaggaagaccctggaggagatggagctgagaattgagacccagaagcagaccctgaatgccagagatgagagcatcaagaagctgctggagatgctgcagagcaagggcctgagcgccaaggccacagaggaggaccacgagaggacccggcggctggccgaggccgagatgcacgtgcaccacctggagagcctgctggagcagaaggagaaggagaacagcatgctgcgggaggagatgcacagaagatttgaaaatgccccagacagcgccaagaccaaggccctgcagaccgtcatcgagatgaaggacagcaagatcagctccatggagcggggcctgcgggacctggaggaggagatccagatgctgaagagcaatggagccctgagcacagaggagcgggaggaggagatgaagcagatggaggtgtaccgcagccacagcaagttcatgaagaacaaggtggagcagctgaaggaggagctgagcagcaaggaggcccagtgggaggagctgaagaagaaggccgccggcctgcaggccgagatcggccaggtgaagcaggagctgagcaggaaggacacagagctgctggccctgcagaccaagctggagaccctgaccaaccagttcagtgacagcaagcagcacatcgaggtgctgaaggagagcctgacagccaaggagcagagagctgccatcctgcagacagaggtggatgccctgcggctgcggctggaggagaaggagaccatgctgaacaagaagaccaagcagatccaggacatggccgaggagaagggcacccaggccggggagatccatgacctgaaggacatgctggatgtgaaggagaggaaggtgaatgtgctgcagaagaagattgagaacctgcaggagcagctgcgggacaaggagaagcagatgagcagcctgaaggagcgggtgaagagcctgcaggccgacaccaccaacacagacacagccctgaccaccctggaggaggccctggccgagaaggagaggaccatcgagcggctgaaggagcagagggacagagatgagcgggagaagcaggaggagattgacaactacaagaaggacctgaaggacctgaaggagaaggtgtccctgctgcagggcgacctgtctgagaaggaggccagcctgctggacctgaaggagcacgccagcagcctggccagcagcggcctgaagaaggacagccggctgaagaccctggagatcgccctggagcagaagaaggaggagtgcctgaagatggagagccagctgaagaaggcccatgaagctgccctggaggcccgggccagccctgagatgtctgaccgcatccagcacctggagcgggagatcacccgctacaaggatgagagcagcaaggcccaggccgaggtggaccggctgctggagatcctgaaggaggtggagaatgagaagaatgacaaggacaagaagattgctgagctggagcggcaggtgaaggaccagaacaagaaggtggccaacctgaagcacaaggagcaggtggagaagaagaagagcgcccagatgctggaggaggcccggcggcgggaggacaacctgaatgacagcagccagcagctgcaggacagcctgaggaagaaggatgacagaattgaggagctggaggaggccctgcgggagagcgtgcagatcacagctgagcgggagatggtgctggcccaggaggagagcgcccggaccaatgctgagaagcaggtggaggagctgctgatggccatggagaaggtgaagcaggagctggagagcatgaaggccaagctgagcagcacccagcagagcctggccgagaaggagacccacctgaccaacctgcgggcagagaggaggaagcacctggaggaggtgctggagatgaagcaggaggccctgctggccgccatcagcgagaaggatgccaacatcgccctgctggagctgagcagcagcaagaagaagacccaggaggaggtggccgccctgaagcgggagaaggaccggctggtgcagcagctgaagcagcagacccagaacaggatgaagctgatggctgacaactatgaagatgaccacttcaagagcagccacagcaaccagaccaaccacaagcccagcccagaccagatcatccagcccctgctggagctggaccagaacagaagcaagctgaagctgtacatcggccacctgaccaccctgtgccacgaccgggaccccctcatcctgcggggcctgaccccaccagccagctacaacctggatgatgaccaggccgcctgggagaatgagctgcagaagatgacccggggccagctgcaggatgagctggagaagggggagcgggacaatgctgagctgcaggagtttgccaatgccatcctgcagcagattgctgaccactgcccagacatcctggagcaggtggtgaatgccctggaggagagcagctag

SEQ ID NO: 19574 - DNA, 3075 bp, synthetic construct
  source 1..3075: mol_type = other DNA; note = Synthetic coding sequence
atgaacttcatcaaggacaacagccgggccctgatccagaggatgggcatgaccgtcatcaagcagatcacagatgacctgtttgtgtggaatgtgctgaaccgggaggaggtgaacatcatctgctgtgagaaggtggagcaggatgctgcccggggcatcatccacatgatcctgaagaagggcagcgagagctgcaacctcttcctgaagagcctgaaggagtggaactaccccctcttccaggacctgaatggccagagcctcttccaccagaccagcgagggggacctggatgacctggcccaggacctgaaggacctgtaccacacccccagcttcctgaacttctaccccctgggggaggacatcgacatcatcttcaacctgaagagcaccttcacagagcctgtgctgtggaggaaggaccagcaccaccaccgggtggagcagctgaccctgaatggcctgctgcaggccctgcagagcccctgcatcattgaaggagagagcggcaagggcaagagcaccctgctgcagagaattgccatgctgtggggcagcggcaagtgcaaggccctgaccaagttcaagtttgtgttcttcctgcggctgagccgggcccagggcggcctgtttgagaccctgtgtgaccagctgctggacatccctggcaccatcaggaagcagaccttcatggccatgctgctgaagctgcggcagagggtgctcttcctgctggatggctacaatgagttcaagccccagaactgcccagaaattgaggccctgatcaaggagaaccaccgcttcaagaacatggtgattgtgaccaccaccacagagtgcctgcggcacatccggcagtttggagccctgacagctgaggtgggggacatgacagaggacagcgcccaggccctgatccgggaggtgctgatcaaggagctggccgagggcctgctgctgcagatccagaagagccgctgcctgaggaacctgatgaagacccccctgtttgtggtgatcacctgtgccatccagatgggagagagcgagttccacagccacacccagaccaccctcttccacaccttctatgacctgctgatccagaagaacaagcacaagcacaagggcgtggccgccagtgacttcatccgcagcctggaccactgtggggacctggccctggagggcgtcttcagccacaagtttgattttgagctgcaggatgtgtcctctgtgaatgaagatgtgctgctgaccaccggcctgctgtgcaagtacacagcccagcgcttcaagcccaagtacaagttcttccacaagagcttccaggagtacacagctggaagaaggctgagcagcctgctgaccagccatgagcctgaggaggtgaccaagggaaatggctacctgcagaagatggtgtccatcagtgacatcaccagcacctacagcagcctgctgcgctacacctgtggcagctctgtggaggccaccagggctgtgatgaagcacctggccgctgtgtaccagcacggctgcctgctgggcctgagcatcgccaagaggcccctgtggaggcaggagagcctgcagagcgtgaagaacaccacagagcaggagatcctgaaggccatcaacatcaacagctttgtggagtgtggcatccacctgtaccaggagagcaccagcaagagcgccctgagccaggagtttgaggccttcttccagggcaagagcctgtacatcaacagcggcaacatcccagactacctgtttgacttctttgagcacctgcccaactgtgccagcgccctggacttcatcaagctggacttctatggaggagccatggcctcctgggagaaggccgcagaagatactggaggcatccacatggaggaggcccctgagacctacatccccagcagagctgtgtccctcttcttcaactggaagcaggagttccgcaccctggaggtgaccctgcgggacttcagcaagctgaacaagcaggacatccgctacctgggcaagatcttcagcagcgccaccagcctgcggctgcagatcaagagatgtgccggcgtggccggcagcctgagcctggtgctgagcacctgcaagaacatctacagcctgatggtggaggccagccccctgaccattgaagatgagcggcacatcacctctgtgaccaacctgaagaccctgagcatccatgacctgcagaaccagaggctgcccggcggcctgacagacagcctgggcaacctgaagaacctgaccaagctgatcatggacaacatcaagatgaatgaggaggatgccatcaagctggccgagggcctgaagaacctgaagaagatgtgcctcttccacctgacccacctgagtgacatcggggagggcatggactacatcgtgaagagcctgagcagcgagccctgtgacctggaggagatccagctggtgtcctgctgcctgagcgccaatgctgtgaagatcctggcccagaacctgcacaacctggtgaagctgagcatcctggacctgtctgagaactacctggagaaggatggaaatgaggccctgcacgagctgattgacaggatgaatgtgctggagcagctgacagccctgatgctgccctggggctgtgatgtgcagggcagcctgagcagcctgctgaagcacctggaggaggtgccccagctggtgaagctgggcctgaagaactggaggctgacagacacagagatccgcatcctgggcgccttcttcggcaagaaccccctgaagaacttccagcagctgaacctggccggcaacagagtgtccagtgatggctggctggccttcatgggcgtgtttgagaacctgaagcagctggtgttctttgacttcagcaccaaggagttcctgcctgaccctgccctggtgaggaagctgagccaggtgctgagcaagctgaccttcctgcaggaggcccggctggtgggctggcagtttgatgatgatgacctgagcgtcatcaccggggccttcaagctggtgacagcctag

SEQ ID NO: 19575 - DNA, 1065 bp, synthetic construct
  source 1..1065: mol_type = other DNA; note = Synthetic coding sequence
atggccgagagccccacagaggaggccgccacagctggggccggggctgctggccctggggccagctctgtggccggcgtggtgggcgtgtctggcagcggcggcggctttggaccacccttcctgcctgatgtgtgggccgctgctgctgctgctgggggcgccggcggccctggcagcggcctggcccccctgcccggcctgcccccatctgctgctgcccatggagctgccctgctgagccactgggaccccaccctgagcagtgactgggatggagagaggacagccccccagtgcctgctgcgcatcaagagggacatcatgagcatctacaaggagcccccacctggcatgtttgtggtgcctgacacagtggacatgaccaagatccacgccctgatcaccggcccctttgacaccccctatgaaggaggcttcttcctgtttgtgttccgctgccccccagactaccccatccaccccccccgggtgaagctgatgaccaccggcaacaacacagtgcgcttcaaccccaacttctacagaaatggcaaggtgtgcctgagcatcctgggcacctggacaggccctgcctggagccctgcccagagcatcagctctgtgctgatcagcatccagagcctgatgacagagaacccctaccacaatgagcccggctttgagcaggagcggcaccctggggacagcaagaactacaatgaatgcatcagacatgagaccatccgggtggccgtgtgtgacatgatggagggcaagtgcccctgcccagagcccctgcggggcgtgatggagaagagcttcctggagtactatgacttctatgaggtggcctgcaaggaccggctgcacctgcagggccagaccatgcaggacccctttggagagaagaggggccactttgactaccagagcctgctgatgaggctgggcctcatccggcagaaggtgctggagcggctgcacaatgaaaatgctgagatggacagcgacagcagcagcagcggcacagaaacagacctgcacggcagcctgcgggtgtag

SEQ ID NO: 19576 - DNA, 2487 bp, synthetic construct
  source 1..2487: mol_type = other DNA; note = Synthetic coding sequence
atggattctgaggccttccagagcgcccgggacttcctggacatgaacttccagagcctggccatgaagcacatggacctgaagcagatggagctggacacagctgctgccaaggtggatgagctgaccaagcagctggagagcctgtggagcgacagccctgcccctcctggcccccaggccggcccccccagcaggcctccccgctacagcagcagcagcatccctgagcccttcggcagccggggcagccccaggaaggccgccacagatggagctgacaccccatttggccgctctgagagcgcccccaccctgcacccctacagccccctgagccccaagggccggcccagcagccccaggacccccctgtacctgcagccagatgcctacggcagcctggaccgggccaccagcccccggccccgggcctttgatggagctggcagcagcctgggccgggcccccagccccaggcctggccctggccccctgcggcagcagggcccccccaccccatttgacttcctgggccgggccggcagcccccggggcagccccctggccgagggcccccaggccttcttccctgagcggggccccagcccccggcccccagccacagcctatgatgccccagccagcgccttcggcagcagcctgctgggcagcggcggcagcgcctttgccccacccctgcgggcccaggatgacctgaccctgcggcggcggccccccaaggcctggaatgaaagtgacctggatgtggcctatgagaagaagcccagccagacagccagctatgagcggctggatgtgtttgcccggcctgccagccccagcctgcagctgctgccctggagggagagcagcctggatggcctgggcggcaccgggaaggacaacctgaccagcgccaccctgcccaggaactacaaggtgagccccctggccagtgaccggcggagtgatgctggcagctaccgccgcagcctgggcagcgctggccccagcggcaccctgcccaggtcctggcagcctgtgagccgcatccccatgccacccagcagcccccagcccaggggggccccccggcagaggcccatccccctgtccatgatcttcaagctgcagaatgccttctgggagcacggggccagccgggccatgctgcccggcagccccctcttcacccgggcccccccacccaagctgcagccccagccccagccccagccccagccccagagccagccccagccccagctgcccccccagccccagacccagccccagacccccaccccagccccccagcacccccagcagacctggccccctgtgaatgaaggaccacccaagccacccacagagctggagcctgagcctgagattgagggcctgctgacccctgtgctggaggccggagatgtggatgagggccctgtggcccggcccctgagccccacccggctgcagcctgccctgcccccagaggcccagagcgtgcctgagctggaggaggtggcccgggtgctggccgagatcccccggcccctgaagagaagaggctccatggagcaggccccagctgtggccctgccccccacccacaagaagcagtaccagcagatcatcagccgcctcttccaccgccacggcggccctggccctgggggccctgagcctgagctgagccccatcacagagggcagcgaggcccgggccggccccccagccccagcccccccagcccccatccccccaccagcccccagccagagcagccccccagagcagccccagagcatggagatgaggtctgtgctgaggaaggccggcagccccaggaaggcccggcgggcccggctgaaccccctggtgctgctgctggatgctgccctgactggagagctggaggtggtgcagcaggccgtgaaggagatgaatgaccccagccagcccaatgaggagggcatcacagccctgcacaatgccatctgtggggccaactacagcatcgtggacttcctgatcacagctggggccaacgtgaacagcccagacagccacggctggacccccctgcactgtgccgccagctgcaatgacaccgtcatctgcatggccctggtgcagcacggggccgccatctttgccaccaccctgagtgatggagccacagcctttgagaagtgtgacccctaccgggagggctacgccgactgtgccacctacctggctgatgtggagcagagcatgggcctgatgaacagcggggctgtgtatgccctgtgggactacagcgctgagtttggagatgagctgtccttccgggagggggagagcgtgacagtgctgcggagagatggccctgaggagacagactggtggtgggccgccctgcacggccaggagggctacgtgcccaggaactacttcggcctcttcccccgggtgaagccccagaggagcaaggtgtag

SEQ ID NO: 19577 - DNA, 1131 bp, synthetic construct
  source 1..1131: mol_type = other DNA; note = Synthetic coding sequence
atggtggtggaggtggacagcatgcctgctgccagctctgtgaagaagcccttcggcctgcggagcaagatgggcaagtggtgctgccgctgcttcccctgctgccgggagagcggcaagagcaatgtgggcaccagcggggaccatgatgacagcgccatgaagaccctgcggagcaagatgggcaagtggtgccgccactgcttcccctgctgccggggcagcggcaagagcaatgtgggcgccagcggggaccatgatgattctgccatgaagaccctgaggaacaagatgggcaagtggtgctgccactgcttcccctgctgccggggcagcagcaagagcaaggtgggcgcctggggagactatgatgacagcgccttcatggagccccgctaccacgtgcggggggaggacctggacaagctgcaccgggccgcctggtggggcaaggtgcccaggaaggacctgattgtgatgctgcgggacacagatgtgaacaagcaggacaagcagaagaggacagccctgcacctggccagcgccaatggaaacagcgaggtggtgaagctgctgctggaccggcgctgccagctgaatgtgctggacaacaagaagaggacagccctgatcaaggctgtgcagtgccaggaggatgaatgtgccctgatgctgctggagcacggcacagaccccaacatcccagatgaatatggcaacaccaccctgcactacgccatctacaatgaagacaagctgatggccaaggccctgctgctgtatggagctgacatcgagagcaagaacaagcacggcctgacccccctgctgctgggcgtgcatgagcagaagcagcaggtggtgaagttcctgatcaagaagaaggccaacctgaatgccctggacagatatggccgcacagccctgatcctggccgtgtgctgcggcagcgccagcatcgtgtccctgctgctggagcagaacattgatgtgagcagccaggacctgagcggccagacagcccgggagtatgctgtgagcagccaccaccacgtgatctgccagctgctgagtgactacaaggagaagcagatgctgaagatcagcagcgagaacagcaaccctggatag

SEQ ID NO: 19578 - DNA, 765 bp, synthetic construct
  source 1..765: mol_type = other DNA; note = Synthetic coding sequence
atgcctgccagcttccccatgctgcgctgtgcccggagcccctgctggacagtgtgctggagcccctggtgccgggccctgcctgatggccgctgcagctgcctgagcagcccccccagccccctgggccccacccgggaccctgtggccaccttcctggagacctgccgggagcccggcagccagcctgctggccctgccagcctgcgggcagagtacctgcccccatctgtggccagcatcaaggtgtctgctgagctgctgcgggccgccctgaaggatggccacagcggcgtgcccctgtgctgtgccaccctgcagtggctgctggccgagaatgctgctgtggatgtggtgcgggcccgggccctgagcagcatccagggcgtggccccagatggagccaacgtgcacctgattgtgcgggaggtggccatgacagacctgtgcccagctggccccatccaggccgtggagatccaggtggagagcagcagcctggccgacatctgccgggcccaccacgctgtggtgggccgcatgcagaccatggtgacagagcaggccacccagggcagcagcgccccagacctgcgggtgcagtacctgcggcagatccacgccaaccacgagaccctgctgcgggaggtgcagaccctgcgggaccggctgtgcacagaagatgaggccagcagctgtgccacagcccagaggctgctgcaggtgtaccggcagctgcggcaccccagcctcatcctgctgtag

SEQ ID NO: 19579 - DNA, 2046 bp, synthetic construct
  source 1..2046: mol_type = other DNA; note = Synthetic coding sequence
atgtgtggcatctttgcctacctgaactaccacgtgcccaggacccggcgggagatcctggagaccctcatcaagggcctgcagaggctggagtaccggggctatgattctgctggggtgggctttgatggcggcaatgacaaggactgggaggccaatgcctgcaagatccagctgatcaagaagaagggcaaggtgaaggccctggatgaggaggtgcacaagcagcaggacatggacctggacattgaatttgatgtgcacctgggcatcgcccacacccgctgggccacccatggagagcccagccctgtgaacagccacccccagaggagtgacaagaacaatgagttcatcgtcatccacaacggcatcatcaccaactacaaggacctgaagaagttcctggagagcaagggctatgactttgaaagtgaaacagacacagagaccatcgccaagctggtgaagtacatgtatgacaaccgggagagccaggacaccagcttcaccaccctggtggagagggtcatccagcagctggagggcgcctttgccctggtgttcaagtctgtgcacttccctggccaggccgtgggcacccggcggggcagccccctgctgattggagtgcgctctgagcacaagctgagcacagaccacatccccatcctgtacagaacaggcaaggacaagaagggcagctgcaacctgagccgggtggacagcaccacctgcctcttccctgtggaggagaaggctgtggagtactactttgccagtgatgccagcgctgtgattgagcacaccaacagagtcatcttcctggaggatgatgatgtggccgctgtggtggatggccgcctgagcatccaccgcatcaagaggacagctggggaccaccctggccgggctgtgcagaccctgcagatggagctgcagcagatcatgaagggcaacttcagcagcttcatgcagaaggagatctttgagcagcctgagagcgtggtgaacaccatgaggggccgggtgaactttgatgactacacagtgaacctgggcggcctgaaggaccacatcaaggagatccagcgctgcagaagactcatcctgattgcctgtggcaccagctaccacgccggcgtggccacccggcaggtgctggaggagctgacagagctgcctgtgatggtggagctggccagtgacttcctggacaggaacacccctgtgttcagagatgatgtgtgcttcttcctgagccagagcggggagacagctgacaccctgatgggcctgcgctactgcaaggagcggggggccctgactgtgggcatcaccaacacagtgggcagcagcatcagccgggagacagactgtggggtgcacatcaatgccggccctgagattggagtggccagcaccaaggcctacaccagccagtttgtgtccctggtgatgtttgccctgatgatgtgtgatgaccgcatctccatgcaggagaggaggaaggagatcatgctgggcctgaagaggctgcctgacctgatcaaggaggtgctgtccatggatgatgagatccagaagctggccacagagctgtaccaccagaagtctgtgctgatcatgggccggggctaccactacgccacctgcctggagggcgccctgaagatcaaggagatcacctacatgcacagcgagggcatcctggccggggagctgaagcacggccccctggccctggtggacaagctgatgcctgtgatcatgatcatcatgagggaccacacctacgccaagtgccagaatgccctgcagcaggtggtggcccggcagggccggcctgtggtgatctgtgacaaggaggacacagagaccatcaagaacaccaagaggaccatcaaggtgccccacagcgtggactgcctgcagggcatcctgagcgtcatccccctgcagctgctggccttccacctggccgtgctgcggggctatgatgtggacttccccaggaacctggccaagtctgtgacagtggagtag

SEQ ID NO: 19580 - DNA, 498 bp, synthetic construct
  source 1..498: mol_type = other DNA; note = Synthetic coding sequence
atggaggacctgtttgagaccttccaggatgagatgggcttcagcaacatggaggatgatggccctgaggaggaggagcgggtggccgagccccaggccaacttcaacaccccccaggccctgcgctttgaggagctgctggccaacctgctgaatgagcagcaccagatcgccaaggagctgtttgagcagctgaagatgaagaagcccagcgccaagcagcagaaggaggtggagaaggtgaagccccagtgcaaggaggtgcaccagaccctcatcctggaccctgcccagaggaagaggctgcagcagcagatgcagcagcacgtgcagctgctgacccagatccacctgctggccacctgcaaccccaacctgaaccctgaggccagcagcacccgcatctgcctgtcctgggagcccctgctgaaggcccccagccccttcaccatcagcaccacccccagcttccggccctgcagcaaccctgtgacctag

SEQ ID NO: 19581 - DNA, 633 bp, synthetic construct
  source 1..633: mol_type = other DNA; note = Synthetic coding sequence
atggccgcctctgtggagcagcgggagggcaccatccaggtgcagggccaggccctcttcttccgggaggccctgcccggcagcggccaggcccgcttctctgtgctgctgctgcacggcatccgcttcagcagcgagacctggcagaacctgggcaccctgcaccggctggcccaggccggctacagagctgtggccatcgacctgcccggcctgggccacagcaaggaggccgccgccccagcccccatcggggagctggcccctggcagcttcctggccgctgtggtggatgccctggagctgggcccccctgtggtgatcagccccagcctgagcggcatgtacagcctgcccttcctgacagcccctggcagccagctgcccggctttgtgcctgtggcccccatctgcacagacaagatcaatgctgccaactatgcctctgtgaagaccccagccctgattgtgtatggagaccaggaccccatgggccagaccagctttgagcacctgaagcagctgcccaaccaccgggtgctgatcatgaagggggccggccacccctgctacctggacaagccagaggagtggcacacaggcctgctggacttcctgcagggcctgcagtag

SEQ ID NO: 19582 - DNA, 1248 bp, synthetic construct
  source 1..1248: mol_type = other DNA; note = Synthetic coding sequence
atgagagctgctgacagcggctcctgggagcgggtgcggcagctggccgcccagggcgagcccgcccccagctgtggggccggggccggccctgcccggcccccaggccctgctgcctgtgagcagtgtgtggatgctgctggccctggggaccggcccagggctggggtgccccgggtgcgggcagatggagactgcagccagcctgtgctgctgcgggaggaggtgtcccggctgcaggaggaggtgcacctgctgcggcagatgaaggagatgctggccaaggacctggaggagagccagggcggcaagagcagcgaggtgctgagcgccacagagctgcgggtgcagctggcccagaaggagcaggagctggcccgggccaaggaggccctgcaggccatgaaggctgacaggaagaggctgaagggggagaagacagacctggtgtcccagatgcagcagctgtatgccaccctggagagccgggaggagcagctgcgggacttcatccggaactatgagcagcacaggaaggagagtgaagatgctgtgaaggccctggccaaggagaaggacctgctggagcgggagaagtgggagctgcggcggcaggccaaggaggccacagaccacgccacagccctgcggagccagctggacctgaaggacaacaggatgaaggagctggaggccgagctggccatggccaagcagagcctggccaccctgaccaaggatgtgcccaagaggcacagcctggccatgcctggagagaccgtgctgaatggaaaccaggagtgggtggtgcaggccgacctgcccctgacagctgccatccggcagagccagcagaccctgtaccacagccaccccccccaccctgctgaccggcaggccgtgcgggtgagcccctgccacagccggcagcccagcgtcatcagtgatgccagcgctgctgagggggacaggagcagcacccccagcgacatcaacagccccaggcacaggacccacagcctgtgcaatggagacagccctggccctgtgcagaagaacctgcacaaccccatcgtgcagagcctggaggacctggaggaccagaagaggaagaagaagaaggagaagatgggcttcggcagcatcagccgggtgtttgcccggggcaagcagaggaagagcctggaccccggcctgtttgatggaacagccccagactactacattgaagaagatgctgactggtag

SEQ ID NO: 19583 - DNA, 693 bp, synthetic construct
  source 1..693: mol_type = other DNA; note = Synthetic coding sequence
atggaggccgctgagacagaggccgaggccgccgccctggaggtgctggccgaggtggccggcatcctggagcctgtgggcctgcaggaggaggccgagctgcctgccaagatcctggtggagtttgtggtggacagccagaagaaggacaagctgctgtgcagccagctgcaggtggccgacttcctgcagaacatcctggcccaggaggacacagccaagggcctggaccccctggccagcgaggacaccagccggcagaaggccatcgccgccaaggagcagtggaaggagctgaaggccacctaccgggagcacgtggaggccatcaagattggcctgaccaaggccctgacccagatggaggaggcccagaggaagaggacccagctgcgggaggcctttgagcagctgcaggccaagaagcagatggccatggagaagagaagagctgtgcagaaccagtggcagctgcagcaggagaagcacctgcagcacctggccgaggtgtctgctgagggcaagctgctcttccctgaggccgaggccgaggccgagaacctgcctgatgacaagccccagcagcccacccggccccaggagcagagcactggagacaccatgggccgggaccccggggtgtccttcaaggctgtgggcctgcagcctgctggagatgtgaacctgccctag

SEQ ID NO: 19584 - DNA, 2547 bp, synthetic construct
  source 1..2547: mol_type = other DNA; note = Synthetic coding sequence
atgcaggccgaggccgctgactggttcagctccatgcccttccagaagcacgtgtactaccccctggccagcggccctgagggcccagatgtggccgtggccgctgctgctgctggggccgcctccatggcctgtgcccctccttctgctgccagcggccccctgcccttcttccagttccggccccggctggagagcgtggactggaggcggctgagcgccattgatgtggacaaggtggccggggctgtggatgtgctgaccctgcaggagaacatcatgaacatcaccttctgcaagctggaggatgagaagtgcccccactgccagagcggcgtggaccctgtgctgctgaagctgatccggctggcccagttcaccatcgagtacctgctgcacagccaggagttcctgaccagccagctgcacaccctggaggagcggctgcggctgagccactgtgatggagagcagagcaagaagctgctgaccaagcaggccggggagatcaagaccctgaaggaggagtgcaagaggaggaagaagatgatcagcacccagcagctgatgattgaggccaaggccaactactaccagtgccacttctgtgacaaggccttcatgaaccaggccttcctgcagagccacatccagaggaggcacacagaggagaacagccactttgagtaccagaagaatgcccagatcgagaagctgcggagtgaaattgtggtgctgaaggaggagctgcagctgaccaggtctgagctggaggccgcccaccacgccagcgctgtgcgcttcagcaaggagtatgagatgcagaagaccaaggaggaggacttcctgaagctgtttgaccgctggaaggaggaggagaaggagaagctggtggatgagatggagaaggtgaaggagatgttcatgaaggagttcaaggagctgaccagcaagaacagcgccctggagtaccagctgtctgagatccagaagagcaacatgcagatcaagagcaacatcggcaccctgaaggatgcccacgagttcaaggaggacaggagcccctacccccaggacttccacaacgtgatgcagctgctggacagccaggagagcaagtggacagcccgggtgcaggccatccaccaggagcacaagaaggagaagggccgcctgctgagccacatcgagaagctgcggacctccatgattgatgacctgaatgccagcaatgtgttctacaagaagagaattgaggagctgggccagaggctgcaggagcagaatgaactcatcatcacccagaggcagcagatcaaggacttcacctgcaaccccctgaacagcatcagcgagcccaaggtgaatgccccagccctgcacaccctggagaccaagagcagcctgcccatggtgcatgagcaggccttcagcagccacatcctggagcccatcgaggagctgtctgaggaggagaagggccgggagaatgagcagaagctgaacaacaacaagatgcacctgaggaaggccctgaagagcaacagcagcctgaccaagggcctgcggaccatggtggagcagaacctgatggagaagctggagaccctgggcatcaatgctgacatccggggcatcagcagtgaccagctgcaccgggtgctgaagtctgtggagagcgagcggcacaagcaggagcgggagatccccaacttccaccagatccgggagttcctggagcaccaggtgtcctgcaagattgaggagaaggccctgctgagcagtgaccagtgcagcgtgtcccagatggacaccctgagcactggagaggtgcccaagatgatccagctgcccagcaagaaccggcagctgatccggcagaaggctgtgtccacagacaggacctctgtgcccaagatcaagaagaatgtgatggaggaccccttccccaggaagagcagcaccatcaccaccccacccttcagcagcgaggaggagcaggaggatgatgacctgatccgggcctatgccagccctggccccctgcctgtgcccccaccccagaacaagggcagctttgggaagaacacagtgaagagtgatgctgatggaacagagggcagcgagattgaggacacagatgacagccccaagccagctggggtggccgtgaagacccccacagagaaggtggagaagatgttcccccacaggaagaatgtgaacaagcctgtgggcggcaccaacgtgcctgagatgttcatcaagaaggaggagctgcaggagctgaagtgtgctgatgtggaggatgaggactgggacatcagcagcctggaggaggagatcagcctgggcaagaagagcggcaaggagcagaaggagcccccaccagccaagaatgagccccactttgcccacgtgctgaatgcctggggcgccttcaaccccaagggccccaagggggagggcctgcaggagaatgaaagcagcaccctgaagagcagcctggtgacagtgacagactggagcgacaccagtgatgtgtag

SEQ ID NO: 19585 - DNA, 1185 bp, synthetic construct
  source 1..1185: mol_type = other DNA; note = Synthetic coding sequence
atggtggtggaggtggacagcatgcctgctgccagctctgtgaagaagcccttcggcctgcggagcaagatgggcaagtggtgctgccgctgcttcccctgctgccgggagagcggcaagagcaatgtgggcaccagcggggaccatgatgacagcgccatgaagaccctgcggagcaagatgggcaagtggtgccgccactgcttcccctgctgccggggcagcggcaagagcaatgtgggcgccagcggggaccatgatgattctgccatgaagaccctgaggaacaagatgggcaagtggtgctgccactgcttcccctgctgccggggcagcagcaagagcaaggtgggcgcctggggagactatgatgacagcgccttcatggagccccgctaccacgtgcggggggaggacctggacaagctgcaccgggccgcctggtggggcaaggtgcccaggaaggacctgattgtgatgctgcgggacacagatgtgaacaagcaggacaagcagaagaggacagccctgcacctggccagcgccaatggaaacagcgaggtggtgaagctgctgctggaccggcgctgccagctgaatgtgctggacaacaagaagaggacagccctgatcaaggtgtgcagcagccagctgtaccagcatgaagctgtgcagtgccaggaggatgaatgtgccctgatgctgctggagcacggcacagaccccaacatcccagatgaatatggcaacaccaccctgcactacgccatctacaatgaagacaagctgatggccaaggccctgctgctgtatggagctgacatcgagagcaagaacaagcacggcctgacccccctgctgctgggcgtgcatgagcagaagcagcaggtggtgaagttcctgatcaagaagaaggccaacctgaatgccctggacagatatggccgcacagccctgatcctggccgtgtgctgcggcagcgccagcatcgtgtccctgctgctggagcagaacattgatgtgagcagccaggacctgagcggccagacagcccgggagtatgctgtgagcagccaccaccacgtgatctgccagctgctgagtgactacaaggagaagcagatgctgaagatcagcagcgagaacagcaacccagaaaatgtgtccaggaccaggaacaagtag

SEQ ID NO: 19586 - DNA, 1308 bp, synthetic construct
  source 1..1308: mol_type = other DNA; note = Synthetic coding sequence
atggcccccttcggcaggaacctgctgaagaccaggcacaagaacagaagccccaccaaggacatggacagcgaggagaaggagatcgtggtgtgggtgtgccaggaggagaagctggtgtgtggcctgaccaagaggaccaccagcgcagatgtgatccaggccctgctggaggagcacgaggccaccttcggggagaagcgcttcctgctgggcaagcccagcgactactgcatcatcgagaagtggaggggcagcgagcgggtgctgccccccctgacccgcatcctgaagctgtggaaggcctggggagatgagcagcccaacatgcagtttgtgctggtgaaggcagatgccttcctgcctgtgcccctgtggaggacagctgaggccaagctggtgcagaacacagagaagctgtgggagctgagccctgccaactacatgaagaccctgcccccagacaagcagaagagaattgtgaggaagaccttcaggaagctggccaagatcaagcaggacacagtgtcccatgaccgggacaacatggagaccctggtgcacctgatcatcagccaggaccacaccatccaccagcaggtgaagaggatgaaggagctggacctggagattgaaaaatgtgaggccaagttccacctggacagagtggagaatgatggagagaactacgtgcaggatgcctacctgatgcccagcttcagcgaggtggagcagaacctggacctgcagtatgaggagaaccagaccctggaggacctgtctgagagtgatggcatcgagcagctggaggagcggctgaagtactaccgcatcctgattgacaagctgtctgctgagattgagaaggaggtgaagtctgtgtgcatcgacatcaatgaagatgctgagggggaggccgccagcgagctggagagcagcaacctggagagcgtgaagtgtgacctggagaagtccatgaaggccggcctgaagatccacagccacctgagcggcatccagaaggagatcaagtacagcgacagcctgctgcagatgaaggccaaggagtatgagctgctggccaaggagttcaacagcctgcacatcagcaacaaggatggctgccagctgaaggaaaatagagccaaggagagcgaggtgcccagcagcaatggagagatcccccccttcacccagagggtcttcagcaactacaccaatgacacagacagcgacaccggcatcagcagcaaccacagccaggacagcgagaccaccgtgggagatgtggtgctgctgagcacctag

SEQ ID NO: 19587 - DNA, 1644 bp, synthetic construct
  source 1..1644: mol_type = other DNA; note = Synthetic coding sequence
atggccggcaccaagaacaagacccgggcccaggccaagacagagaagaaggccgccatccaggccaaggccggggctgagcgggaggccactggagtggtgcggcctgtggccaagacccgggccaaggccaaggccaagacaggcagcaagacagatgctgtggccgagatgaaggctgtgtccaagaacaaggtggtggccgagaccaaggagggcgccctgtctgagcccaagaccctgggcaaggccatgggagacttcacccccaaggctggaaatgaaagcaccagcagcacctgcaagaatgaagctggaacagatgcctggttctgggccggggaggaggccaccatcaacagctggttctggaatggagaggaggccggcaacagcttcagcaccaagaatgacaagccagagatcggggcccaggtgtgtgccgaggagctggagcctgctgctggagctgactgcaagcccaggtctggagctgaggaggaggaggaggagaatgtcatcggcaactggttctgggagggagatgacaccagctttgaccccaaccccaagcctgtgagccgcatcgtgaagccccagcctgtgtatgagatcaatgagaagaaccggcccaaggactggagcgaggtgaccatctggcccaatgccccagctgtgaccccagctgtgctgggcttccgcagccaggcccccagcgaggccagccccccatcctacatcgtgctggccagcgctgaggagaatgcctgcagcctgcctgtggccacagcctgccggcccagcaggaacaccaggagctgcagccagcccatccctgagtgccgctttgacagcgacccctgcatccagaccattgatgagatccggcggcagatccgcatccgggaggtgaatggcatcaagccctttgcctgcccctgcaagatggagtgctacatggacagcgaggagtttgagaagctggtgtccctgctgaagagcaccacagaccccctcatccacaagatcgcccgcatcgccatgggcgtgcacaacgtgcacccctttgcccaggagttcatcaatgaggtgggcgtggtgaccctcatcgagagcctgctgtccttccccagccctgagatgaggaagaagacagtcatcaccctgaaccccccatctggagatgagcggcagaggaagattgagctgcacgtgaagcacatgtgcaaggagaccatgtccttccccctgaacagccctggccagcagagcggcctgaagatcctgggccagctgaccacagactttgtgcaccactacatcgtggccaactacttcagcgagctgttccacctgctgagcagcggcaactgcaagaccaggaacctggtgctgaagctgctgctgaacatgtctgagaaccccacagctgcccgggacatgatcaacatgaaggccctggccgccctgaagctgatcttcaaccagaaggaggccaaggccaacctggtgtctggagtggccatcttcatcaacatcaaggagcacatcaggaagggcagcatcgtggtggtggaccacctgagctacaacaccctgatggccatcttccgggaggtgaaggagatcatcgagaccatgtag

SEQ ID NO: 19588 - DNA, 1362 bp, synthetic construct
  source 1..1362: mol_type = other DNA; note = Synthetic coding sequence
atggccaggaaggtggtgtccaggaagaggaaggccccagccagccctggggccggcagtgatgcccagggcccccagtttggctgggaccacagcctgcacaagaggaagaggctgccccctgtgaagaggagcctggtgtactacctgaagaaccgggaggtgcggctgcagaatgagaccagctacagccgggtgctgcacggctatgctgcccagcagctgcccagcctgctgaaggagcgggagttccacctgggcaccctgaacaaggtgtttgccagccagtggctgaaccaccggcaggtggtgtgtggcaccaagtgcaacaccctgtttgtggtggatgtgcagaccagccagatcaccaagatccccatcctgaaggaccgggagcctggaggagtgacccagcagggctgcggcatccacgccatcgagctgaaccccagcaggaccctgctggccactggaggagacaaccccaacagcctggccatctaccgcctgcccaccctggaccctgtgtgtgtgggagatgatggccacaaggactggatcttcagcatcgcctggatcagtgacaccatggctgtgtctggcagcagagatggctccatgggcctgtgggaggtgacagatgatgtgctgaccaagagtgatgcccggcacaacgtgtcccgggtgcctgtgtatgcccacatcacccacaaggccctgaaggacatccccaaggaggacaccaacccagacaactgcaaggtgcgggccctggccttcaacaacaagaacaaggagctgggcgctgtgtccctggatggctacttccacctgtggaaggccgagaacaccctgagcaagctgctgagcaccaagctgccctactgccgggagaatgtgtgcctggcctacggcagcgagtggagcgtgtatgctgtgggcagccaggcccacgtgtccttcctggacccccggcagcccagctacaacgtgaagtctgtgtgcagccgggagcggggcagcggcatccgctctgtgtccttctatgagcacatcatcaccgtgggcaccggccagggcagcctgctcttctatgacatccgggcccagcgcttcctggaggagcggctgagcgcctgctacggcagcaagccccggctggccggggagaacctgaagctgaccaccgggaagggctggctgaaccatgatgagacctggaggaactacttcagtgacatcgacttcttccccaatgctgtgtacacccactgctatgacagcagcggcaccaagctgtttgtggccggcggccccctgcccagcggcctgcacggcaactatgccggcctgtggagctag

SEQ ID NO: 19589 - DNA, 2439 bp, synthetic construct
  source 1..2439: mol_type = other DNA; note = Synthetic coding sequence
atggaggccttccaggagctgaggaagcccagcgcccggctggagtgtgaccactgcagcttccggggcacagattatgaaaatgtgcagatccacatgggcaccatccaccctgagttctgtgatgagatggatgctgggggcctgggcaagatgatcttctaccagaagagcgccaagctgttccactgccacaagtgcttcttcaccagcaagatgtacagcaatgtgtactaccacatcaccagcaagcacgccagcccagacaagtggaatgacaagcccaagaaccagctgaacaaggagacagatcctgtgaagagcccccccctgcctgagcaccagaagatcccctgcaacagcgctgagcccaagagcatcccagccctgtccatggagacccagaagctgggctctgtgctgagccctgagagccccaagcccacccccctgacccccctggagccccagaagccaggctctgtggtgtccccagagctgcagacccccctgcccagccctgagcccagcaagccagcctctgtgagcagccctgagccccccaagtctgtgcctgtgtgtgagagccagaagctggcccctgtgcccagccctgagccccagaagccagcccctgtgtccccagagagcgtgaaggccaccctgagcaaccccaagccccagaagcagagccacttccctgagaccctgggccccccatctgccagcagccctgagagccctgtgctggccgccagccctgagccctggggccccagccctgctgccagccctgagagcaggaagagcgcccggaccaccagccctgagcccaggaagcccagccccagcgagagccctgagccctggaagcccttccctgctgtgtccccagagcccaggaggcctgccccagctgtgtccccaggctcctggaagccaggccccccaggcagcccccggccctggaagagcaaccccagcgccagcagcggcccctggaagccagccaagccagcccccagcgtgtccccaggcccctggaagcccatccccagcgtgtccccaggcccctggaagcccacccccagcgtgtcctctgcctcctggaagagcagctctgtgagccccagctcctggaagagccccccagccagccctgagagctggaagagcggccccccagagctgaggaagacagcccccaccctgagccctgagcactggaaggctgtgccccctgtgtccccagagctgaggaagccaggcccccccctgagccctgagatccgcagccctgctggcagccctgagctgaggaagcccagcggcagcccagacctgtggaagctgagcccagaccagaggaagaccagccctgccagcctggacttccctgagagccagaagagcagccggggcggcagcccagacctgtggaagagcagcttcttcatcgagccccagaagcctgtgtttcctgagaccaggaagccaggccccagcggccccagcgagagccccaaggccgccagtgacatctggaagcctgtgctgagcattgacacagagcccaggaagccagccctcttccctgagcccgccaagacagcccccccagccagccctgaggccaggaagagggccctcttccctgagcccaggaagcacgccctcttccctgagctgcccaagagcgccctcttcagcgagagccagaaggctgtggagctgggagatgagctgcagattgatgccattgatgaccagaagtgtgacatcctggtgcaggaggagctgctggccagccccaagaagctgctggaggacaccctcttccccagcagcaagaagctgaagaaggacaaccaggagagcagtgatgctgagctgagcagcagcgagtacatcaagacagacctggatgccatggacatcaagggccaggagagcagcagtgaccaggagcaggtggatgtggagagcattgacttcagcaaggagaacaagatggacatgaccagccctgagcagagcagaaatgtgctgcagttcacagaggagaaggaggccttcatcagcgaggaggagatcgccaagtacatgaagaggggcaagggcaagtactactgcaagatctgctgctgccgggccatgaagaagggagctgtgctgcaccacctggtgaacaagcacaacgtgcacagcccctacaagtgcaccatctgtgggaaggccttcctgctggagagcctgctgaagaaccacgtggccgcccacggccagagcctgctgaagtgcccccgctgcaactttgagagcaacttcccccggggcttcaagaagcacctgacccactgccagagccgccacaatgaggaggccaacaagaagctgatggaggccctggagccccccctggaggagcagcagatctag

SEQ ID NO: 19590 - DNA, 1974 bp, synthetic construct
  source 1..1974: mol_type = other DNA; note = Synthetic coding sequence
atggatgagcaggaggccctgaacagcatcatgaatgacctggtggccctgcagatgaacagaagacacaggatgcctggctatgagaccatgaagaacaaggacaccggccacagcaaccggcagaagaagcacaacagcagcagcagcgccctgctgaacagccccaccgtgaccaccagcagctgtgccggggccagcgagaagaagaagttcctgagtgatgtgcgcatcaagtttgagcacaatggagagcggcgcatcatcgccttcagcaggcctgtgaagtatgaagatgtggagcacaaggtgaccaccgtgtttggccagcccctggacctgcactacatgaacaatgagctgagcatcctgctgaagaaccaggatgacctggacaaggccatcgacatcctggacaggagcagctccatgaagagcctgcgcatcctgctgctgagccaggacaggaaccacaacagcagcagcccccacagcggcgtgtcccggcaggtgcgcatcaaggccagccagagcgctggggacatcaacaccatctaccagcccccagagcccaggagccgccacctgtctgtgagcagccagaaccctggccgcagcagccccccacctggctacgtgcctgagcggcagcagcacatcgcccggcagggcagctacaccagcatcaacagcgagggggagttcatccctgagaccagcgagcagtgcatgctggaccccctgagcagcgctgagaacagcctgagcggcagctgccagagcctggacagatctgctgacagccccagcttcaggaagagcaggatgagccgggcccagagcttcccagacaaccggcaggagtacagcgaccgggagacccagctgtatgacaagggcgtgaagggcggcacctacccccggcgctaccacgtgtctgtgcaccacaaggactacagtgatggaagaaggaccttcccccgcatccgccgccaccagggcaacctcttcaccctggtgcccagcagccgcagcctgagcaccaatggagagaacatgggcctggccgtgcagtacctggacccccggggccgcctgcggtctgctgacagtgaaaatgccctgtctgtgcaggagagaaatgtgcccaccaagagccccagcgcccccatcaactggaggcggggcaagctgctgggccagggcgccttcggccgggtgtacctgtgctatgatgtggacaccggccgggagctggccagcaagcaggtgcagtttgatcctgacagccctgagaccagcaaggaggtgtctgccctggagtgtgagatccagctgctgaagaacctgcagcacgagagaattgtgcagtactacggctgcctgcgggacagagctgagaagaccctgaccatcttcatggagtacatgcctgggggctctgtgaaggaccagctgaaggcctatggagccctgacagaatctgtgaccaggaagtacacccggcagatcctggagggcatgagctacctgcacagcaacatgattgtgcaccgggacatcaagggggccaacatcctgcgggacagcgctggaaatgtgaagctgggggactttggagccagcaagaggctgcagaccatctgcatgtctggaacaggcatgaggtctgtgacaggcaccccctactggatgagccctgaggtgatctctggagagggctacggcaggaaggcagatgtgtggagcctgggctgcaccgtggtggagatgctgacagagaagccaccctgggccgagtatgaggccatggccgccatcttcaagatcgccacccagcccaccaacccccagctgcccagccacatcagcgagcacggccgggacttcctgcggcgcatctttgtggaggcccggcagaggccttctgctgaggagctgctgacccaccactttgcccagctgatgtactag

SEQ ID NO: 19591 - DNA, 2547 bp, synthetic construct; identical to SEQ ID NO: 19584
  source 1..2547: mol_type = other DNA; note = Synthetic coding sequence

SEQ ID NO: 19592 - DNA, 4074 bp, synthetic construct
  source 1..4074: mol_type = other DNA; note = Synthetic coding sequence
atggctgacacagacctcttcatggagtgtgaggaggaggagctggagccctggcagaagatcagtgatgtgattgaggacagcgtggtggaggactacaacagcgtggacaagaccaccacagctggcaaccccctggtgcagcagggcggccagcccctcatcctgacccagaacccagcccctggcctgggcaccatggtgacccagcctgtgctgcggcctgtgcaggtgatgcagaatgccaaccacgtgaccagcagccctgtggccagccagcccatcttcatcaccacccagggcttccctgtgagaaatgtgcggcctgtgcagaatgccatgaaccaggtgggcatcgtgctgaatgtgcagcagggccagacagtgcggcccatcaccctggtgcctgcccctggcacccagtttgtgaagcccaccgtgggcgtgccccaggtgttcagccagatgacccctgtgcggcccggcagcaccatgcctgtgcggcccaccaccaacaccttcaccaccgtcatcccagccaccctgaccatccgcagcacagtgccccagagccagagccagcagaccaagagcacccccagcaccagcaccacccccacagccacccagcccaccagcctgggccagctggccgtgcagagccctggccagagcaaccagaccaccaaccccaagctggcccccagcttccccagccccccagctgtgtccatcgccagctttgtgacagtgaagaggcctggggtgactggagagaacagcaatgaggtggccaagctggtgaacaccctgaacaccatccccagcctgggccagagccctggccctgtggtggtgagcaacaacagcagcgcccacggcagccagaggaccagcggccctgagagctccatgaaggtgaccagcagcatccctgtgtttgacctgcaggacggcggcaggaagatctgcccccgctgcaatgcccagttccgggtgacagaggccctgcggggccacatgtgctactgctgcccagagatggtggagtaccagaagaagggcaagagcctggacagcgagcccagcgtgcccagcgctgccaagccacccagccctgagaagacagcccctgtggccagcacccccagcagcacccccatcccagccctgagcccccccaccaaggtgcctgagcccaatgaaaatgtgggagatgctgtgcagaccaagctgatcatgctggtggatgacttctactacggcagagatggcggcaaggtggcccagctgaccaacttccccaaggtggccaccagcttccgctgcccccactgcaccaagaggctgaagaacaacatccgcttcatgaaccacatgaagcaccacgtggagctggaccagcagaatggagaggtggatggccacaccatctgccagcactgctaccggcagttcagcacccccttccagctgcagtgccacctggagaatgtgcacagcccctatgagagcaccaccaagtgcaagatctgtgagtgggcctttgagagcgagcccctcttcctgcagcacatgaaggacacccacaagccaggagagatgccctacgtgtgccaggtgtgccagtaccgcagcagcctgtacagcgaggtggatgtgcacttcaggatgattcatgaggacaccaggcacctgctgtgcccctactgcctgaaggtgttcaagaatggaaatgccttccagcagcactacatgaggcaccagaagagaaatgtgtaccactgcaacaagtgccgcctgcagttcctgtttgccaaggacaagattgagcacaagctgcagcaccacaagaccttcaggaagcccaagcagctggagggcctgaagccaggcaccaaggtgaccatccgggccagccggggccagcccaggacagtgcctgtgagcagcaatgacaccccaccttctgccctgcaggaggccgcccccctgaccagctccatggaccccctgcctgtgttcctgtacccacctgtgcagaggagcatccagaagagagctgtgaggaagatgtctgtgatgggccggcagacctgcctggagtgcagctttgagatcccagacttccccaaccacttccccacctacgtgcactgcagcctgtgccgctacagcacctgctgcagccgggcctatgccaaccacatgatcaacaaccacgtgcccaggaagagccccaagtacctggccctcttcaagaacagcgtgtctggcatcaagctggcctgcaccagctgcacctttgtgacctctgtgggagatgccatggccaagcacctggtgttcaaccccagccacaggagcagcagcatcctgccccggggcctgacctggatcgcccacagcagacatggccagacccgggacagagtgcatgacagaaatgtgaagaacatgtacccacctccttccttccccaccaacaaggccgccaccgtgaagtctgctggggccaccccagctgagcctgaggagctgctgacccccctggccccagccctgcccagccctgccagcacagccaccccaccacccacccccacccacccccaggccctggccctgccccccctggccacagaaggagcagaatgtctgaatgtggatgaccaggatgagggcagccctgtgacccaggagcctgagctggccagcggcggcggcggcagcggaggagtgggcaagaaggagcagctgtctgtgaagaagctgcgggtggtgctgtttgccctgtgctgcaacacagagcaggccgctgagcacttcaggaacccccagaggcgcatccgccgctggctgcggcgcttccaggccagccagggcgagaacctggagggcaagtacctgagctttgaggccgaggagaagctggccgagtgggtgctgacccagcgggagcagcagctgcctgtgaatgaggagaccctcttccagaaggccaccaagattggccgcagcctggagggcggcttcaagatctcctatgagtgggccgtgcgcttcatgctgcggcaccacctgacccctcatgccaggagagctgtggcccacaccctgcccaaggatgtggccgagaatgccggcctcttcatcgactttgtgcagaggcagatccacaaccaggacctgcccctgtccatgattgtggccattgatgagatcagcctcttcctggacacagaggtgctgagcagtgatgacagaaaagaaaatgccctgcagacagtgggcactggagagccctggtgtgatgtggtgctggccatcctggctgatggcaccgtgctgcccaccctggtgttctaccggggccagatggaccagcctgccaacatgccagacagcatcctgctggaggccaaggagagcggctacagtgatgatgagatcatggagctgtggagcaccagggtgtggcagaagcacacagcctgccagaggagcaagggcatgctggtgatggactgccacaggacccacctgtctgaggaggtgctggccatgctgagcgccagcagcaccctgcctgctgtggtgcctgctggctgcagcagcaagatccagcccctggatgtgtgcatcaagaggacagtgaagaacttcctgcacaagaagtggaaggagcaggcccgggagatggctgacacagcctgtgacagtgatgtgctgctgcagctggtgctggtgtggctgggggaggtgctgggcgtgattggagactgcccagagctggtgcagaggagcttcctggtggcctctgtgctgcccggcccagatggcaacatcaacagccccaccagaaatgctgacatgcaggaggagctgattgccagcctggaggagcagctgaagctgtctggagagcacagcgagagcagcaccccccggcccaggagcagccctgaggagaccatcgagcctgagagcctgcaccagctgtttgaaggagagagcgagacagagagcttctacggctttgaggaggccgacctggacctgatggagatctag

SEQ ID NO: 19593 - DNA, 2904 bp, synthetic construct
  source 1..2904: mol_type = other DNA; note = Synthetic coding sequence
atgggccctggccagcctgccagcacctgtgtgcacctggcccccaggacccagctggatggccgcagtgaccccaaggtgctgcagacccagaaccagctgcagttcaacagaaatgtgcccacccacagcagcaacctggccatccgctacagctgcccccacgccatcagaattgagaagctgaagcacagctacaatgaaagctaccactgcaaggatgctgactgccgggtgggccctgacctgggcagctctgtgtccttcagcgtcatcagccaggagcggctgtcctatgctgtgcacctggccaggagagatgtgaagaggcggcagtttgagaagcacatcaaggagcaccacctgcggagccagccccagagcagccagaagtgtggccacaccaagtacaagatcccagaccaccgggtggagaggaaggagagcaagagccaggccgcctgccagtgcagccaccagcccagcaaggtggagatcagcagcagcggggccaaggtgtacctgtacagcagccaccctggccagagcgacctgactgtgcccaacagcccccccacccatgaccccggcctgcagccccacccccgcatcggggaccacaagaacatcagcgagcagaagagcctgctggaggtgcagaggctgcagaaggagctgagcagctgcatccacaagattgaggaggtgaccaagaaggaccggctggaggaggccctggaccctgatgaggagcggcgcatccgcatccggcggcaggagcaggccgcccggagcgccaggatgctgtatgtgctgcagcagcaggtgaaggagatccaggaggagctggacaagctgagcccccacaagatcaagcacaccaagaagtcctgggccatgagcaagctggccgccgcccacagaggagccatccgggccctgcagatgtttgtgacccagttcacagacagaggagagcaccccctgcctgcccgctgcaaggagctgggcagcctcatccggcagctgagcctgtgcagcgtgaagctggatgctgaccccagcgtgcctgatgtggtgattgacatcctgcagcagatcgaggccctggagagcctgctggagaagaagctgagccccaagaaggtgaagaagtgcttcagcgagatccgcagccgcttccccatcggcagccagaaggccctggagcgctggcccagcaccagccccaagggggagcggcggcccctgacagccaaggacaccttcccccaggagaccagccggcccagcgtggccaagcagctgctggccgacaagtaccagcctgacacagagctgcctgagacccagaggctgcagagcgagctggatgtgctggatgctgacatcgtgctggaggagggccccttcatcctggaccagagcgccagcttcaaggatgaggtgctggccgtggccaagaccaaggccggcaagaagaagcctgtgacagaaaatgtgcccttcaggaagaaggacaccctggccccagcccggcagcagggcctgaggaaggccgagcggggccggcagagccagccccacagcaagagccgggtgcagcagaccaccgtgagcagccggctgaagatgaaccggcagcctgtgaaggacaggaaggccccctggatcccccccaaccccaccagccccccagccagccccaagtgtgccgcctggctgaaggtgaagaccagccccagagatgccaccaaggagcccctgcagcaggaggacccccaggaggagagccacctgactggagctgtggagcacgaggccgcccggctggcctggctggatgctgagaccagcaagaggctgaaggagctggaggagctgaaggccaaggagattgacagcatgcagaagcagaggctggactggctggatgctgagaccagcaggaggaccaaggagctgaatgagctgaaggccgaggagatgtaccgcctgcagcagctgtctgtgtctgccacccacctggccgacaaggtggaggaggccgtgctggaccggctgaagcccctgctggtgaaggcccagagggtgaacagcaccacagaggccaacatccacctgaaggatggcagctctgtgaacacagccaaggcccagcctgcccaggaggtggccgctgtggactttgagagcaacaacatccggcagctggatgacttcctggaggactgtgccagcgagctgtgggccgtgacccacgccaagatcctgggcagcgagaccctggccaccgtggaggacagcaaggacagcccagacctggagatcatgatgaggaggatggaggagatggagaagtaccaggagagcgtgcggcagcgctacaacaagatcgcctatgctgacccccggctgtggatgcaggaggagaacaatgaccagaagatcagcgccatcagcgagaagcccctgagcccccaccccatccgcatcaccaagacagtggacaggaaggaccctgctgtgaacatcatgctggagcggccctgcaatggaaacagcctggatgaatctgtgggcacagaggagggcagcgagaagcgggaggcccccctgctgagcctggccgaggacagccagcagaaggagggccgggcccccctgtttgtgcccccaggcatgcagcacagcattggagactactgcagcagatttgagcagtacctgcgcatcatcagccatgaagctgtgggcagcttcaacccctggctgattgctgagagcttcagcgaggagctggtggatgaggccctgggcgctgtggccgctgagctgcaggacatgtgtgaagattatgcagaggccgtgttcaccagcgagttcctggaggccgccacctag

SEQ ID NO: 19594 - DNA, 6840 bp, synthetic construct
  source 1..6840: mol_type = other DNA; note = Synthetic coding sequence
atgtaccgcagcagcgcccggagctctgtgagcagccaccggcccaaggatgatggcggcggcggccccaggagcggccgcagcagcggcagcagcagcggccctgcccggcgcagcagccccccacctccacccagcggcagcagcagcaggaccccagcccggcggcccaggagccccagcggccaccggggccggcgggccagccccagccccccccggggccggcgggtgagccccagccccccccgggcccggcggggcagccccagccccccccggggccggcggctcttccccccaggccctgctggcttccggggcagcagcagaggagagagcagagctgactatgccagagatggccgcggggaccaccctggggacagcggcagcagaagaagaagccctggcctgtgcagcgacagcctggagaagagcctgcgcatcaccgtgggcaatgaccacttctgtgtgtccaccccagagcggcggcggctgagtgaccggctgggcagccctgtggacaacctggaggacatggacagagatgacctgacagatgacagcgtcttcaccaggagcagccagtgcagccggggcctggagcgctacatcagccaggaggagggccccctgagccccttcctgggccagctggatgaggactaccgcaccaaggagaccttcctgcacagaagtgactacagcccccacatcagctgccatgatgagctgctgcggggcacagagaggaaccgggagaagctgaagggctacagcatccgctctgaggagaggagccgggaggccaagaggcccaggtatgatgacacagtgaagatcaacagcatgggcggggaccaccccagcttcaccagcggcaccaggaactaccggcagaggagaagaagccccagcccccgcttcctggaccctgagttccgggagctggacctggcccggaggaagcgggaggaggaggaggagaggagccgcagcctgagccaggagctggtgggcgtggatggcggcggcaccggctgcagcatccctggcctgtctggagtgctgacagccagcgagcccggctacagcctgcacaggcctgaggaggtgtctgtgatgcccaagaagagcatcctgaagaagagaattgaggtggacatcatggagcccagcatgcagctggagagcttcagcagcagcaccagcagcagccaggaccaccccctgtacagcggccaccccagcctgcccctgagcggggccatcgccgcctttgccagcgagattgaaaataaaggcaccatggtggagacagccctgaaggagccccagggcaacctgtaccagtggggccccctgcccggcatccccaaggacaacagccccctgcgggagaagtttggcagcttcctgtgccacaaggacaacctggacctgaaggccgagggccctgagcggcacacagacttcctgctgccccatgagcgggccagccaggacggcagcggcttcagccgcatcctgtccatgctggccgacagcaccagcacccaggagaagagaagaagaagcttcccagacattgaagatgaggagaagttcctgtatggagatgaggaggaggacctgaaggccgagagcgtgcccaagcccctgggcagcagcgagagcgaggtgatgaggcagaaggccagcagcctgcccagcagcgccccagctgtgaagctggagagcctggaggagaccaacccagaatatgccaagatccatgacctgctgaagaccatcggcctggacattggagtggccgagatcagccagctggccgcccggacccaggagcggctgcacggcaagaagcccagcctgcggagcagcgctgaccggcgcagctctgtggaccgctacttctctgctgaccactgcagctctgtggaccaccgcttctctgctgaccgctgcagctctgtggaccactgcttctctgctgaccggcgcagcagtgacccccaccggctggagagccgggaggcccaccacagcaacacccacagccctgaggtgagccacccccacccccccagccctgtggacccctacctgctgaccaagaacagcccccccttcctgaagagtgaccaccctgtgggccacatcagcggccctgaggtggtgggcagcggcttccagagctctgtggccgtgcgctgcatgctgcccagcgcccccagcgcccccatccggctgccccacacagctgccctgagccagttccacatgccccgggccagccagtttgctgctgcccgcatcccccccaactaccagggccctgccatccccccagccagctttgatgcctaccgccactacatggcctatgctgccagccgctggcccatgtaccccaccagccagcccagcaaccaccctgtgcctgagccccaccgcatcatgcccatcaccaagcaggccaccaggagccggcccaacctgcgggtcatccccaccgtgaccccagacaagcccaagcagaaggagagcctgcggggcagcatcccagctgcccaggtgcctgtgcaggtgtccatccccagcctcatccgctacaaccctgagaagatcagtgatgagaagaacagagccagccagaagcagaaggtgattgaggagcgggagaagctgaagaatgaccgggaggcccggcagaagaagatgtactacctgaggacagagctggagcggctgcacaagcagcagggcgagatgctgaggaagaagagaagagagaaggatggccacaaggaccccctgctggtggaggtgtcccggctgcaggacaacatcatgaaggacattgctgagctgcggcaggaggccgaggaggccgagaagaagcagagcgagctggacaaggtggcccagatcctgggcatcaacatctttgacaagagccagaagagcctgagtgacagccgggagcccacagagaagccaggcaaggccgagaagagcaagagccctgagaaggtgagcagcttcagcaacagcagcagcaacaaggagagcaaggtgaacaatgagaagttccgcaccaagagccccaagccagctgagagcccccagagcgccaccaagcagctggaccagcccacagctgcctatgagtactatgatgctggcaaccactggtgcaaggactgcaacaccatctgtggcaccatgtttgacttcttcacccacatgcacaacaagaagcacacccagaccctggacccctacaaccggccctgggccagcaagacccagagcgaggccaagcaggatgccatcaagaggacagacaagatcaccgtgcctgccaagggcagcgagttcctggtgcccatcagcggcttctactgccagctgtgtgaggagttcctgggggaccccatcagcggggagcagcacgtgaagggccaccagcacaatgagaagtacaagaagtatgtggatgagaaccccctgtatgaggagaggaggaacctggaccggcaggccggcctggccgtggtgctggagacagagcggcggcggcagagcgagctgaagaggaagctgtctgagaagcccaaggaggagaagaaggagaagaaggccaaggctgtgaaggaggtgaaggaggatgacaaggtgtctgagaagctggaggaccagctgtctgagggcaggaacagccctgagaaggccgagaacaagaggaacacaggcatcaagctgcagctgaaggaggaggtgaagaaggagagccccaccagcagcagctttgggaagttctcctggaagaagccagagaaggaggaggagaagagcagcctggtgacccccagcatcagcaaggaggagatcctggagagcagcaaggacaaggaggatggcaagacagaggccggcaaggccaagcccatcaagatcaagctgagcggcaagacagtggtggcccacaccagcccctggatgcctgtggtgaccaccagcacccagaccaagatccggcccaacctgcccatccccagcacagtgctgaggaagagctgcagcgccaccatgagcaagccagcccccctgaacaccttcctgagcatcaagagcagcggcaccacagccaagcccctgcctgtggtgaaggagagcagcgctgacctgctgctgcccccagacatcatcagcaaggccttcggcggggaggaggtgatcctgaagggcagccctgaggagaaggtggtgctggccgagaagtctgagcccagccacctgcctgagcagatcctgcccccacctcctcctcctcctcctcctcctcctcctcctcctcctgtgatcccccaccctgctgcccccagcgctgcccaggccaatgccatcctggcccctgtgaagagcaaccctgtggtgtcccagaccctgagccctggctttgtgggccccaacatcctgaaccctgtgctgcctgtggccatcatggccagcgcccagcctgctgccatccccagtgatgaaacagcccctggggtgtctgagagtgaccgggaccagaccctcttctctgtgctggtgcggcccccaccacccctgagcagcgtcttcagcgagcaggccaagaagctggagaagaggaacagctgcctggccacagccaatgccaaggacctgtatgacatcttctacagcagcggcggcaagggggcccctgagaccaagggggcccctgagaccaagctgagcggcggccccctggccaacggggagaacagcaacctgagcaggaccaagagcagtgacaccagcagcaccagccccctgaacagcagcgccagccaggaggagctgcaccaggatgagggcctggtggccgcccccatcgtgagcaacagcgagaagcccatcgccaagaccctggtggccctgggcaagtggagcgtggtggagcacgtgggccccaagagcacaggcagcacctacggcttcctgcagcccctgacccggctgtgccagagccggccctatgagaccatcacccccaagacagacaccctggccatctggaccagcagcagcttccagagcgacaccagccgggacatcagccctgagaagtctgagctggacctgggggagcccggccccccaggagtggagcccccaccccagctgctggacatccagtgcaaggagagccagaagctggtggagatccacctgcgggagagcgtgaaccaggacaaggagagccaggagctgaggaagtctgaggactgccgggagagcgagattgagaccaacacagagctgaaggagcgggtgaaggagctgtctgagggcatcgtggatgagggcgtgtccaccagcatcggcccccacagcattgatgacagcaacctgaaccacggcaaccgctacatgtgggagggggaggtgaagcagcccaacctgctgatgattgacaaggaggccgagcagagcaacaagctgatgactggaagtgagacccccagcaaggtggtgatcaagctgagcccccaggcctgcagcttcaccaaggccaagctggacagcttcctgtctgaggcccggagcctgctgaacccccaggacacccctgtgaagatcagcgcccctgagctgctgctgcacagccctgcccggagcgccatgtgcctgaccggcagcccccaggagcagggcgtgtctgtggtgtctgaggagggcctggagaacagcgcccctgagagcgccagcaggaccagccgctaccgcagcctgaagctgaagcgggagaggagcaaggacttccaggtgaagaagatctatgagctggccgtgtgggatgagaacaagaagaggcctgagacctgggagagccctgagaagcccaagacagaggccctggagctgcaggatgtgcaccctgagctgactgtgaccatcgagagcaaggccctggaggactttgaggccacagacctgaaggtggaggagctgacagccctgggcaacctgggggacatgcctgtggacttctgcaccaccagggtgtccccagcccacaggagccccaccgtgctgtgccagaaggtgtgtgaggagaacagcgtgagccccatcggctgcaacagcagtgaccctgctgactttgagcccatccccagcttcagcggcttccccctggacagccccaagaccctggtgctggactttgaaacagaaggagagaggaacagccccaaccccaggtctgtgcgcatccccagccccaacatcctgaagacaggcctgacagaaaatgtggaccggggcctgggcggcctggagggcacccaccaggccctggacctgctggccggcggcatgatgcctgaggaggtgaaggagagcagccagctggacaagcaggagagcctgggcctggagctgaagaccatcaacagcgctggcctgggccccagcccctgcctgcctgacctggtggactttgtgaccaggaccagcggcgtgcagaaggacaagctgtgcagccccctgtctgagcccggggaccccagcaagtgcagcagcctggagctgggccccctgcagctggagatcagcaatgccagcaccacagaggtggccatcctgcaggtggatgatgattctggggaccccctgaacctggtgaaggcccctgtgagccgcagccccccccgggagcaggtgattgaggacaacatggtgccccagggcatgcctgagcaggagaccaccgtgggcgccatccaggaccacacagagagctctgtgcacaactag

SEQ ID NO: 19595 - DNA, 1932 bp, synthetic construct
  source 1..1932: mol_type = other DNA; note = Synthetic coding sequence
atgggccaggagagcagcaagcctgtgtggcccaaccccaccggcggctaccagagcaacacaggaagaagatatggaagaagacatgcctacgtgtccttccggccccccaccagccagcgggagcgcatcgccagccagaggaagaccaacagcgaggtgcccatgcacaggtctgcccccagccagaccaccaagaggagccgcagccccttcagcaccacccggcgctcctgggatgacagcgagagcagcggcaccaacctgaacatcgacaatgaagactacagccgctacccaccccgggagtaccgggccagcggcagccggcggggcatggcctacggccacatcgacagctatggagcagatgacagcgaggaggagggcgccggccctgtggagaggcctcctgtgcggggcaagacaggcaagttcaaggatgacaagctgtatgaccctgagaagggggcccggagcctggccggccccccaccccacttcagcagcttcagcagagatgtgcgggaggagcgggacaagctggaccctgtgcctgctgcccgctgcagcgccagcagagctgacttcctgccccagagctctgtggccagccagagcagcagcgagggcaagctggccaccaagggggacagcagcgagcgggagcggcgggagcagaacctgcctgcccggcccagccgggcccctgtgtccatctgtggcggcggggagaacaccagcaagtctgctgaggagcctgtggtgcggcccaagatccggaacctggccagccccaactgtgtgaagcccaagatcttctttgacacagatgatgatgatgacatgccccacagcaccagccgctggagggacacagccaatgacaatgaaggccacagtgatggcctggcccggcggggccgcggggagagcagcagcggctacccagagcccaagtacccagaggacaagcgggaggcccggagtgaccaggtgaagccagagaaggtgcccaggagaagaaggaccatggctgaccctgacttctggacccacagtgatgactactacaagtactgtgatgaagattctgacagcgacaaggagtggattgctgccctgcggaggaagtaccgcagccgggagcagaccctgagcagcagtggagagagctgggagaccctgcccgggaaggaggagcgggagcccccccaggccaaggtgtctgccagcacaggcaccagccctggccctggggccagcgccagcgctggagctggagctggggccagcgctggcagcaatggcagcaactacctggaggaggtgcgggagcccagcctgcaggaggagcaggccagcctggaggagggggagatcccctggctgcagtaccatgaaaatgacagcagcagcgagggggacaatgattctggccacgagctgatgcagcccggggtcttcatgctggatggcaacaacaacctggaggatgacagctctgtgtctgaggacctggaggtggactggagcctgtttgatggctttgctgatggcctgggcgtggccgaggccatctcctatgtggacccccagttcctgacctacatggccctggaggagcggctggcccaggccatggagacagccctggcccacctggagagcctggccgtggatgtggaggtggccaaccccccagccagcaaggagagcattgatgccctgcctgagatcctggtgacagaggaccacggggctgtgggccaggagatgtgctgccccatctgctgcagtgaatatgtgaagggggaggtggccacagagctgccctgccaccactacttccacaagccctgtgtgtccatctggctgcagaagagcggcacctgccctgtgtgccgctgcatgttccccccacccctgtag

SEQ ID NO: 19596 - DNA, 1113 bp, synthetic construct
  source 1..1113: mol_type = other DNA; note = Synthetic coding sequence
atgcccacagagaccctgcagacaggctccatggtgaagcctgtgtccccagctggcaccttcaccagcgctgtgcccctgcgcatcctgaacaagggccctgactacttccggcggcaggccgagcccaaccccaagaggctgtctgctgtggagcggctggaggccgacaaggccaagtatgtgaagagccaggaggtgatcaatgccaagcaggagcctgtgaagccagctgtgctggccaagccccctgtgtgcccagctgccaagagggccctgggcagccccaccctgaaggtgtttggaaaccacgccaagacagaaagtggagtgcagcgggagaacctgaagctggagatcctgaagaacatcatcaacagcagcgagggcagcagcagcggcagcggccacaagcacagcagcaggaactggccaccccacaggtctgaggccacagacctgcaccgccacagctttgctgagagcctgaaggtgtaccccacccagggcagaagaagcccccaggagggcggcagccacgtgggccgccgcctgctggagcagagcgctgagagcttcctgcacgtgagccacagcagcagtgacatcaggaaggtgacctctgtgaagcccctgaaggccatcccctgcagcagcagcgccccacccctgccccccaagcccaagattgctgccatcgcctccatgaagagccctgaggccgaccctgtggagcccgcctgtggggtgtcccggcggcccagcctgcagaggagcaagagtgacctgagtgaccgctacttccgggtggatgctgatgtggagcgcttcttcaactactgcggcctggaccctgaggagctggagaacctgggcatggagaactttgcccgggccaacagcgacatcatcagcctgaacttccgcagcgcctccatgatcagcagtgactgtgagcagagccaggacagcaacagcgacctgagaaatgatgattctgccaatgacagagtgccctacggcatcagcgccattgaaagaaatgcccgcatcatcaagtggctgtacagcatcaagcaggcccgggagagccagaaggtgagccacgtgtag

SEQ ID NO: 19597 - DNA, 3126 bp, synthetic construct
  source 1..3126: mol_type = other DNA; note = Synthetic coding sequence
atggctgctgctgctgctgctggagctgccagcggcctgcccggccctgtggcccagggcctgaaggaggccctggtggacaccctgaccggcatcctgagccctgtgcaggaggtgcgggctgctgctgaggagcagatcaaggtgctggaggtgacagaggagtttggagtgcacctggccgagctgactgtggacccccagggcgccctggccatccggcagctggccagcgtcatcctgaagcagtatgtggagacccactggtgtgcccagagcgagaagttccggcccccagagaccacagagcgggccaagatcgtcatccgggagctgctgcccaacggcctgcgggagagcatcagcaaggtgcgcagctctgtggcctatgctgtgtctgccatcgcccactgggactggccagaggcctggccccagctgttcaacctgctgatggagatgctggtgtctggggacctgaatgctgtgcacggggccatgagggtgctgacagagttcacccgggaggtgacagacacccagatgcccctggtggcccctgtgatcctgcctgagatgtacaagatcttcaccatggccgaggtgtatggcatccgcaccaggagcagagctgtggagatcttcaccacctgtgcccacatgatctgcaacatggaggagctggagaagggggccgccaaggtgctgatcttccctgtggtgcagcagttcacagaggcctttgtgcaggccctgcagatcccagatggccccaccagtgacagcggcttcaagatggaggtgctgaaggctgtgacagccctggtgaagaacttccccaagcacatggtgtcctccatgcagcagatcctgcccatcgtgtggaacaccctgacagaatctgctgccttctacgtgaggacagaggtgaactacacagaggaggtggaggaccctgtggacagtgatggagaggtgctgggctttgagaacctggtgttcagcatctttgaatttgtgcacgccctgctggagaacagcaagttcaagagcacagtgaagaaggccctgcctgagctgatctactacatcatcctgtacatgcagatcacagaggagcagatcaaggtgtggacagccaacccccagcagtttgtggaggatgaagatgatgacaccttctcctacacagtgagaattgctgcccaggacctgctgctggccgtggccacagacttccagaatgaatctgctgctgccctggccgccgccgccaccaggcacctgcaggaggccgagcagaccaagaacagcggcacagagcactggtggaagatccacgaggcctgcatgctggccctgggctctgtgaaggccatcatcacagacagcgtgaagaatggccgcatccactttgacatgcacggcttcctgaccaacgtcatcctggccgacctgaacctgtctgtgagccccttcctgctgggccgggccctgtgggccgccagccgcttcaccgtggccatgagccctgagctgatccagcagttcctgcaggccaccgtgtctggcctgcacgagacccagccccccagcgtgcgcatctctgctgtgcgggccatctggggctactgtgaccagctgaaggtgtctgagagcacccacgtgctgcagcccttcctgcccagcatcctggatggcctcatccacctggccgcccagttcagcagcgaggtgctgaacctggtgatggagaccctgtgcatcgtgtgcaccgtggaccctgagttcaccgcctccatggagagcaagatctgccccttcaccatcgccatcttcctgaagtacagcaatgaccctgtggtggccagcctggcccaggacatcttcaaggagctgagccagatcgaggcctgccagggccccatgcagatgaggctcatccccaccctggtgtccatcatgcaggccccagctgacaagatcccagctggcctgtgtgccacagccatcgacatcctgaccaccgtggtgaggaacaccaagccacccctgagccagctgctgatctgccaggccttccctgctgtggcccagtgcaccctgcacacagatgacaatgccaccatgcagaatggaggagaatgtctgcgggcctacgtgtctgtgaccctggagcaggtggcccagtggcatgatgagcagggccacaacggcctgtggtacgtgatgcaggtggtgtcccagctgctggaccccaggaccagcgagttcaccgctgcctttgtgggccgcctggtgtccaccctcatcagcaaggccggccgggagctgggggagaacctggaccagatcctgcgggccatcctgagcaagatgcagcaggccgagaccctgtctgtgatgcagagcctcatcatggtgtttgcccacctggtgcacacccagctggagcccctgctggagttcctgtgcagcctgcccggccccaccgggaagccagccctggagtttgtgatggccgagtggaccagccggcagcacctgttctacggccagtatgagggcaaggtgtcctctgtggccctgtgcaagctgctgcagcacggcatcaatgctgatgacaagaggctgcaggacatccgggtgaagggggaggagatctacagcatggatgagggcatccgcaccaggagcaagagcgccaagaaccctgagcgctggaccaacatccccctgctggtgaagatcctgaagctgatcatcaatgagctgagcaatgtgatggaggccaatgctgcccggcaggccaccccagctgagtggagccaggatgacagcaatgacatgtgggaggaccaggaggaggaggaggaggaggaggaggatggcctggccggccagctgctgagtgacatcctggccaccagcaaatatgaggaggactactatgaagatgatgaagaagatgatcctgatgccctgaaggaccccctgtaccagattgacctgcaggcctacctgacagacttcctgtgccagtttgcccagcagccctgctacatcatgttttctggccacctgaatgacaatgaaagaagagtgctgcagaccatcggcatctag

SEQ ID NO: 19598 - DNA, 156 bp, synthetic construct
  source 1..156: mol_type = other DNA; note = Synthetic coding sequence
atgagcagccacaagaccttccgcatcaagcgcttcctggccaagaagcagaagcagaaccggcccatcccccagtggatccgcatgaagacaggcaacaagatccgctacaacagcaagagaagacactggaggaggaccaagctgggcctgtag

SEQ ID NO: 19599 - DNA, 3627 bp, synthetic construct
  source 1..3627: mol_type = other DNA; note = Synthetic coding sequence
atggacagcctgcctgatgagttctttgtgcgccaccctgctgtggaggaccagaggaaggaggagacagagaacaagctggagaagagcagcggccagctgaacaagcaggagaatgacatccccacagacctggtgcctgtgaacctgctgctggaggtgaagaagctgctgaatgccatcaacaccctgcccaagggcgtggtgccccacatcaagaagttcctgcaggaggacttctccttccagaccatgcagcgggaggtggccgccaacagccagaatggagaggagatcgtgcctgccctgaccctgcgcttcctgatcacccagctggaggccgccctgaggaacatccaggccggcaactacacagcccaccagatcaacatcggctactacctgaccctgctcttcctgtatggagtggccctgacagagcggggcaagaaggaggactacacagaagctgagaacaagttcctggtgatgaagatgatgatccaggagaatgagatctgtgagaacttcatgagcctggtgtacttcggccggggcctgctgcgctgtgcccagaagcgctacaacggcggcctgctggagttccacaagagcctgcaggagattggagacaagaatgaccactggtttgatattgaccccacagaagatgaggacctgcccaccaccttcaaggacctgctgaacaacttcatcaagaccacagagagcaacatcatgaagcagaccatctgcagctacctggactgtgagaggagctgtgaggccgacatcctgaagaacaccagctacaagggcttcttccagctgatgtgcagcaagagctgctgcgtgtacttccacaagatctgctggaagaagttcaagaacctgaagtacccaggagaaaatgaccagagcttcagcggcaagaagtgcctgaaggagggctgcacaggagacatggtgaggatgctgcagtgtgatgtgcccggcatcgtgaagatcctgtttgaggtggtgaggaaggatgagtacatcaccatcgagaacctgggcgccagctacaggaagctgatcagcctgaagatcacagacacagacatccggcccaagatcagcctgaagttcaacaccaaggatgagatgcccatcttcaagctggactacaactacttctaccacctgctgcacatcatcatcatctctggaacagacatcgtgcggcagatctttgatgaggccatgcccccacccctgctgaagaaggagctgctgatccacaagaatgtgctggagagctactacaaccacctgtggaccaaccaccccctgggcggctcctggcacctgctgtacccacccaacaaggagctgccccagagcaagcagtttgacctgtgcctgctgctggccctgatcaagcacctgaatgtgtttcctgcccccaagaagggctggaacatggagccccccagcagtgacatcagcaagtctgctgacatcctgcggctgtgcaagtacagagacatcctgctgtctgagatcctgatgaatggcctgacagagagccagttcaacagcatctggaagaaggtgtctgacatcctgctgcggctgggcatgatgcaggaggacatcgacaaggtgaaggagaaccccatcgagaacatcagcctggactaccaccagctgtctgtgtacctgggcatccctgtgcctgagatcatccagaggatgctgagctgctaccagcagggcatcgccctgcagagcatcaccggcagccagagaattgaaattgaggagctgcagaatgaggaggaggagctgagcccccccctgatggagtacaacatcaacgtgaagagccaccctgagatccagtttgctgagatcaacaaggatggcaccagcatccccagcgagagcagcacagagagcctgaaggacctgcaggaggtgaagagcaagcagaggaagaagaagaagaccaagaacaagaagaacaaggacagcaaagaagaccaggtgccctacgtggtggagaaggaggagcagctgaggaaggagcaggccaacccccacagcgtgagccgcctcatcaaggatgatgccagtgatgtgcaggaggacagcgccatggaggacaagttctacagcctggatgagctgcacatcctggacatgattgagcagggcagcgctgggaaggtgaccacagattatggagaaacagagaaggagcggctggcccggcagaggcagctgtacaagctgcactaccagtgtgaggacttcaagaggcagctgaggacagtgaccttccgctggcaggagaaccagatgcagatcaagaagaaggacaagatcatcgccagcctgaaccagcaggtggccttcggcatcaacaaggtgtccaagctgcagaggcagatccacgccaaggacaatgagatcaagaacctgaaggagcagctgtccatgaagaggagccagtgggagatggagaagcacaacctggagagcaccatgaagacctacgtgtccaagctgaatgctgagaccagccgggccctgacagctgaggtgtacttcctgcagtgccggcgggactttggcctgctgcacctggagcagacagagaaggagtgcctgaaccagctggcccgggtgacccacatggccgccagcaacctggagagcctgcagctgaaggctgctgtggacagctggaatgccatcgtggctgatgtgaggaacaagatcgccttcctgcggacccagtacaatgagcagatcaacaaggtgaagcagggctttgccctgagcaccctgccccctgtgcagctgcccccacctccacccagccctgagatcctgatgcagcagttcctgggccggcccctggtgaaggagagcttcttccggcccatcctgactgtgccccagatgcctgctgtgtgccctggggtggtgtctgccaccggccagccccgggcccccctgatgactggaattgcctgggccctgcctgcccctgtgggagatgctgtgccccccagcgctggcctgcggagtgaccccagcatcatgaactgggagcgcatcacagaccggctgaagacagccttcccccagcagaccaggaaggagctgacagacttcctgaggaagctgaaggatgcctacggcaagagcctgtctgagctgacctttgatgagatcgtgtgcaagatcagccagttcatcgaccccaagaagagccagagccagggcaagtctgtgtccaatgtgaactgtgtgagccccagccacagccccagccagccagatgctgcccagccccccaagccagcctggaggcccctgaccagccagggccctgccacctgggagggcgccagcaacccagatgaggaggaggaggaggaggagccctgcgtcatctgccacgagaacctgagccctgagaacctgtctgtgctgccctgtgcccacaagttccacgcccagtgcatccggccctggctgatgcagcagggcacctgccccacctgccgcctgcacgtgctgctgcctgaggagttccctggccaccccagccggcagctgcccaagatctag

SEQ ID NO: 19600 - DNA, 996 bp, synthetic construct
  source 1..996: mol_type = other DNA; note = Synthetic coding sequence
atgagccggcagctgagccgggcccggcctgccaccgtgctgggcgccatggagatgggccgcaggatggatgcccccaccagcgctgctgtgacccgggccttcctggagcggggccacacagaaattgacacagcctttgtgtacagcgagggccagagcgagaccatcctgggcggcctgggcctgcggctgggcggcagtgactgccgggtgaagattgacaccaaggccatccccctgtttggaaacagcctgaagccagacagcctgcgcttccagctggagaccagcctgaagaggctgcagtgcccccgggtggacctcttctacctgcacatgccagaccacagcacccctgtggaggagaccctgcgggcctgccaccagctgcaccaggagggcaagtttgtggagctgggcctgagcaactatgctgcctgggaggtggccgagatctgcaccctgtgcaagagcaatggctggatcctgcccaccgtgtaccagggcatgtacaatgccatcacccggcaggtggagacagagctgttcccctgcctgcggcacttcggcctgcgcttctacgccttcaaccccctggccggcggcctgctgaccgggaagtacaagtatgaggacaagaatggcaagcagcctgtgggccgcttcttcggcaacacctgggccgagatgtacagaaaccgctactggaaggagcaccactttgagggcatcgccctggtggagaaggccctgcaggccgcctacggggccagcgcccccagcatgaccagcgccaccctgcgctggatgtaccaccacagccagctgcagggcgcccatggagatgctgtgatcctgggcatgagcagcctggagcagctggagcagaacctggccgctgctgaggagggccccctggagcctgctgtggtggatgccttcaaccaggcctggcacctggtgacccatgaatgtcccaactacttcagatag

SEQ ID NO: 19601 - DNA, 1131 bp, synthetic construct
  source 1..1131: mol_type = other DNA; note = Synthetic coding sequence
atgagccctgaggtggccctgaaccgcatcagccccatgctgagccccttcatcagctctgtggtgagaaatggcaaggtgggcctggatgccaccaactgcctgcgcatcacagacctgaagagcggctgcaccagcctgaccccaggccccaactgtgaccgcttcaagctgcacatcccctatgctggggagaccctgaagtgggacatcatcttcaatgcccagtacccagagctgcccccagacttcatctttggagaagatgctgagttcctgcctgaccccagcgccctgcagaacctggcctcctggaaccccagcaacccagaatgtctgctgctggtggtgaaggagctggtgcagcagtaccaccagttccagtgcagccggctgcgggagagcagccggctgatgtttgagtaccagaccctgctggaggagccccagtatggagagaacatggagatctatgccggcaagaagaacaactggacaggagagttcagcgcccgcttcctgctgaagctgcctgtggacttcagcaacatccccacctacctgctgaaggatgtgaatgaagaccccggggaggatgtggccctgctgtctgtgtcctttgaggacacagaggccacccaggtgtaccccaagctgtacctgagccccagaattgaacatgccctgggcggcagcagcgccctgcacatcccagccttccctgggggcggctgcctgattgattatgtgccccaggtgtgccacctgctgaccaacaaggtgcagtatgtgatccagggctaccacaagagaagagagtacatcgccgccttcctgagccacttcggcaccggggtggtggagtatgatgctgagggcttcaccaagctgaccctgctgctgatgtggaaggacttctgcttcctggtgcacatcgacctgcccctcttcttcccccgggaccagcccaccctgaccttccagagcgtgtaccacttcaccaacagcggccagctgtacagccaggcccagaagaactacccctacagcccccgctgggatggaaatgagatggccaagagggccaagcgggagagcaacagagatggagaggagagcagcagcgcctag

SEQ ID NO: 19602 - DNA, 1881 bp, synthetic construct
  source 1..1881: mol_type = other DNA; note = Synthetic coding sequence
atggatgagcaggaggccctgaacagcatcatgaatgacctggtggccctgcagatgaacagaagacacaggatgcctggctatgagaccatgaagaacaaggacaccggccacagcaaccggcagagtgatgtgcgcatcaagtttgagcacaacggggagcggcgcatcatcgccttcagcaggcctgtgaagtatgaagatgtggagcacaaggtgaccaccgtgtttggccagcccctggacctgcactacatgaacaatgagctgagcatcctgctgaagaaccaggatgacctggacaaggccatcgacatcctggacaggagcagctccatgaagagcctgcgcatcctgctgctgagccaggacaggaaccacaacagcagcagcccccacagcggcgtgtcccggcaggtgcgcatcaaggccagccagagcgctggggacatcaacaccatctaccagcccccagagcccaggagccgccacctgtctgtgagcagccagaaccctggccgcagcagccccccacctggctacgtgcctgagcggcagcagcacatcgcccggcagggcagctacaccagcatcaacagcgagggggagttcatccctgagaccagcgagcagtgcatgctggaccccctgagcagcgctgagaacagcctgagcggcagctgccagagcctggacagatctgctgacagccccagcttcaggaagagcaggatgagccgggcccagagcttcccagacaaccggcaggagtacagcgaccgggagacccagctgtatgacaagggcgtgaagggcggcacctacccccggcgctaccacgtgtctgtgcaccacaaggactacagtgatggccgccgcaccttcccccgcatcagaagacaccagggcaacctcttcaccctggtgcccagcagccgcagcctgagcaccaacggggagaacatgggcctggccgtgcagtacctggacccccggggccgcctgcggtctgctgacagtgaaaatgccctgtctgtgcaggagagaaatgtgcccaccaagagccccagcgcccccatcaactggaggcggggcaagctgctgggccagggcgccttcggccgggtgtacctgtgctatgatgtggacaccggccgggagctggccagcaagcaggtgcagtttgatcctgacagccctgagaccagcaaggaggtgtctgccctggagtgtgagatccagctgctgaagaacctgcagcacgagcgcatcgtgcagtactacggctgcctgcgggacagagctgagaagaccctgaccatcttcatggagtacatgcctgggggctctgtgaaggaccagctgaaggcctacggggccctgacagagagcgtgaccaggaagtacacccggcagatcctggagggcatgagctacctgcacagcaacatgattgtgcaccgggacatcaagggggccaacatcctgcgggacagcgctggaaatgtgaagctgggggactttggagccagcaagaggctgcagaccatctgcatgagcggcaccggcatgaggtctgtgacaggcaccccctactggatgagccctgaggtgatcagcggggagggctacggcaggaaggcagatgtgtggagcctgggctgcaccgtggtggagatgctgacagagaagccaccctgggccgagtatgaggccatggccgccatcttcaagatcgccacccagcccaccaacccccagctgcccagccacatcagcgagcacggccgggacttcctgcggcgcatctttgtggaggcccggcagaggcccagcgctgaggagctgctgacccaccactttgcccagctgatgtactag

SEQ ID NO: 19603 - DNA, 1701 bp, synthetic construct; identical to SEQ ID NO: 19423
  source 1..1701: mol_type = other DNA; note = Synthetic coding sequence

SEQ ID NO: 19604 - DNA, 456 bp, synthetic construct
  source 1..456: mol_type = other DNA; note = Synthetic coding sequence
atggagggctgtgtgagcaacctgatggtgtgcaacctggcctacagcggcaagctggaggagctgaaggagagcatcctggccgacaagagcctggccaccaggacagaccaggacagcaggacagccctgcactgggcctgcagcgctggccacacagaaattgtggagttcctgctgcagctgggcgtgcctgtgaatgacaaggatgatgctggctggagccccctgcacatcgccgccagcgctggaagagatgagatcgtgaaggccctgctgggcaaaggagcccaggtgaatgctgtgaaccagaatggctgcacccccctgcactatgctgccagcaagaacagacatgaaattgctgtgatgctgctggagggcggggccaacccagatgccaaggaccactatgaggccacagccatgcacagagctgctgccaaggacacctag

SEQ ID NO: 19605 - DNA, 2220 bp, synthetic construct; identical to SEQ ID NO: 19521
  source 1..2220: mol_type = other DNA; note = Synthetic coding sequence

SEQ ID NO: 19606 - DNA, 1692 bp, synthetic construct
  source 1..1692: mol_type = other DNA; note = Synthetic coding sequence
atgagccggcccagcagccgggccatctacctgcacaggaaggagtacagccagaacctgaccagcgagcccaccctgctgcagcaccgggtggagcacctgatgacctgcaagcagggcagccagagggtgcagggcccagaagatgccctgcagaagctgtttgagatggatgcccagggccgggtgtggagccaggacctgatcctgcaggtgagagatggctggctgcagctgctggacatcgagaccaaggaggagctggacagctaccgcctggacagcatccaggccatgaatgtggccctgaacacctgcagctacaacagcatcctgagcatcaccgtgcaggagcccggcctgcccggcaccagcaccctgctcttccagtgccaggaggtgggcgctgagcggctgaagaccagcctgcagaaggccctggaggaggagctggagcagaggccccggctgggcggcctgcagcccggccaggaccgctggaggggccctgccatggagcggcccctgcccatggagcaggcccgctacctggagcccggcatccccccagagcagccccaccagaggaccctggagcacagcctgccccccagcccccggcccctgcccaggcacaccagcgcccgggagcccagcgccttcaccctgcccccaccaagaagaagcagcagcccagaagatcctgagagagatgaggaggtgctgaaccacgtgctgcgggacatcgagctgttcatgggcaagctggagaaggcccaggccaagaccagcaggaagaagaagtttgggaagaagaacaaggaccagggcggcctgacccaggcccagtacatcgactgcttccagaagatcaagcacagcttcaacctgctgggccgcctggccacctggctgaaggagaccagcgcccctgagctggtgcacatcctcttcaagagcctgaacttcatcctggcccgctgcccagaggccggcctggccgcccaggtgatcagccccctgctgacccccaaggccatcaacctgctgcagagctgcctgagccccccagagagcaacctgtggatgggcctgggccctgcctggaccaccagcagagctgactggacaggagatgagcccctgccctaccagcccaccttcagtgatgactggcagctgcctgagcccagcagccaggcccccctgggctaccaggaccctgtgtccctgcggcccagcagccccaagccagcccagcctgccctgaagatgcaggtgctgtatgaatttgaggccaggaacccccgggagctgactgtggtgcagggcgagaagctggaggtgctggaccacagcaagcgctggtggctggtgaagaatgaagctggccgcagcggctacatccccagcaacatcctggagcccctgcagcccggcaccccaggcacccagggccagagccccagccgggtgcccatgctgcggctgagcagcaggcctgaggaggtgacagactggctgcaggccgagaacttcagcacagccaccgtgaggaccctgggcagcctgaccggcagccagctgctgcgcatccggcctggagagctgcagatgctgtgcccccaggaggccccccgcatcctgagccggctggaggccgtgcggaggatgctgggcatcagcccctag

SEQ ID NO: 19607 - DNA, 525 bp, synthetic construct
  source 1..525: mol_type = other DNA; note = Synthetic coding sequence
atgacctgctgccagaccagcttctgtggctaccccagcttcagcatcagcggcacctgtggcagcagctgctgccagcccagctgctgtgagaccagctgctgccagcccaggagctgccagaccagcttctgtggcttccccagcttcagcaccagcggcacctgcagcagcagctgctgccagcccagctgctgtgagaccagctgctgccagcccagctgctgtgagaccagctgctgccagcccagctgctgccagatcagcagctgtggcaccggctgcggcattggaggcggcatctcctatggccaggagggcagcagtggagctgtgtccacccgcatccgctggtgcaggccagacagccgggtggagggcacctacctgcccccctgctgcgtggtgtcctgcaccccacccagctgctgccagctgcaccacgcccaggccagctgctgccggcccagctactgcggccagagctgctgcaggcctgtgtgctgctgtgagcccacctgctag

SEQ ID NO: 19608 - DNA, 1173 bp, synthetic construct
  source 1..1173: mol_type = other DNA; note = Synthetic coding sequence
atgagaggagaccggggccggggccggggcggccgcttcggcagcagaggaggccctgggggcggcttccggccctttgtgccccacatcccctttgacttctacctgtgtgagatggccttcccccgggtgaagccagccccagatgagaccagcttcagcgaggccctgctgaagaggaaccaggacctggcccccaacagcgctgagcaggccagcatcctgagcctggtgaccaagatcaacaacgtgattgacaacctgattgtggcccctggcacctttgaggtgcagatcgaggaggtgcggcaggtgggcagctacaagaagggcaccatgaccaccggccacaacgtggccgacctggtggtgatcctgaagatcctgcccaccctggaggccgtggccgccctgggcaacaaggtggtggagagcctgcgggcccaggaccccagcgaggtgctgaccatgctgaccaatgagaccggctttgagatcagcagcagtgatgccaccgtgaagatcctgatcaccaccgtgccccccaacctgaggaagctggaccctgagctgcacctggacatcaaggtgctgcagagcgccctggccgccatcagacatgcccgctggtttgaagaaaatgccagccagagcacagtgaaggtgctgatccggctgctgaaggacctgcgcatccgcttccctggctttgagcccctgaccccctggatcctggacctgctgggccactatgctgtgatgaacaaccccacccggcagcccctggccctgaatgtggcctaccgccgctgcctgcagatcctggccgccggcctcttcctgcccggctctgtgggcatcacagacccctgtgagagcggcaacttccgggtgcacacagtgatgaccctggagcagcaggacatggtgtgctacacagcccagaccctggtgcgcatcctgagccatggaggcttcaggaagatcctgggccaggagggagatgccagctacctggccagcgagatcagcacctgggatggagtcatcgtgacccccagcgagaaggcctatgagaagcccccagagaagaaggagggggaggaggaggaggagaacacagaggagcccccccagggcgaggaggaggagagcatggagacccaggagtag

SEQ ID NO: 19609 - DNA, 3606 bp, synthetic construct
  source 1..3606: mol_type = other DNA; note = Synthetic coding sequence
atgcccagaggagaggcccctggccctggaagaagaggagccaaggatgaggccctgggggaggagagcggggagcgctggagccctgagttccacctgcagaggaagctggccgacagcagccacagcgagcagcaggacaggaacagagtgtctgaggagctgatcatggtggtgcaggagatgaagaagtacttccccagcgagaggaggaacaagcccagcaccctggatgccctgaactatgccctgcgctgtgtgcacagcgtgcaggccaacagcgagttcttccagatcctgagccagaatggagccccccaggctgatgtgtccatgtacagcctggaggagctggccaccatcgccagcgagcacaccagcaagaacacagacacctttgtggccgtgttctccttcctgagcggccgcctggtgcacatcagcgagcaggccgccctgatcctgaacaggaagaaggatgtgctggccagcagccactttgtggacctgctggccccccaggacatgagggtcttctacgcccacacagcccgggcccagctgcccttctggaacaactggacccagagagctgcccgctatgaatgtgcccctgtgaagcccttcttctgccgcatcagaggaggagaggacaggaagcaggagaagtgccacagccccttccgcatcatcccctacctgatccacgtgcaccacccagcccagcctgagctggagagcgagccctgctgcctgactgtggtggagaagatccacagcggctatgaggccccccgcatccctgtgaacaagaggatcttcaccaccacccacaccccaggctgtgtgttcctggaggtggatgagaaggctgtgcccctgctgggctacctgccccaggacctgattggcaccagcatcctgagctacctgcaccctgaggacaggagcctgatggtggccatccaccagaaggtgctgaagtatgccggccaccccccatttgagcacagccccatccgcttctgcacccagaatggagactacatcatcctggacagctcctggagcagctttgtgaacccctggagcaggaagatctccttcatcatcggccgccacaaggtgaggaccagccccctgaatgaagatgtgtttgccaccaagatcaagaagatgaatgacaatgacaaggacatcacagagctgcaggagcagatctacaagctgctgctgcagcctgtgcacgtgtctgtgagcagcggctacggcagcctgggcagcagcggcagccaggagcagctggtgtccatcgccagcagcagcgaggccagcggccaccgggtggaggagaccaaggccgagcagatgaccctgcagcaggtgtatgcctctgtgaacaagatcaagaacctgggccagcagctgtacatcgagagcatgaccaagagcagcttcaagcctgtgacaggcaccaggacagagcccaatggaggaggagagtgcaagaccttcaccagcttccaccagaccctgaagaacaacagcgtgtacacagagccctgtgaggacctgagaaatgatgagcacagccccagctaccagcagatcaactgcatcgacagcgtcatccgctacctgaagagctacaacatcccagccctgaagaggaagtgcatcagctgcaccaacaccaccagcagcagcagcgaggaggacaagcagaaccacaaggcagatgatgtgcaggccctgcaggccggcctgcagatcccagccatccccaagtctgagatgcccaccaacggccgcagcattgacaccggcggcggggccccccagatcctgagcacagccatgctgagcctgggcagcggcatcagccagtgtggctacagcagcaccatcgtgcacgtgcccccacctgagacagccagagatgccaccctcttctgtgagccctggaccctgaacatgcagcctgcccccctgaccagcgaggagttcaagcacgtgggcctgacagctgctgtgctgagcgcccacacccagaaggaggagcagaactacgtggacaagttccgggagaagatcctgagcagcccctacagcagctacctgcagcaggagagccgcagcaaggccaagtacagctacttccagggcgacagcaccagcaagcagaccaggtctgctggctgcaggaagggcaagcacaagaggaagaagctgcctgagcccccagacagcagcagcagcaacacaggcagcggcccccggcggggggcccaccagaatgcccagccctgctgccccagcgctgccagcagcccccacaccagcagccccaccttccccccagctgccatggtgcccagccaggccccctacctggtgcctgccttccccctgcctgctgccaccagccctggccgggagtatgctgcccctggaacagcccctgagggcctgcacggcctgcccctgtctgagggcctgcagccctacccagccttccccttcccctacctggacaccttcatgacagtgttcctgcctgacccccctgtgtgccccctgctgagccccagcttcctgccctgccccttcctgggcgccacagccagcagcgccatcagccccagcatgagcagcgccatgagccccaccctggaccccccacccagcgtgaccagccagaggcgggaggaggagaagtgggaggcccagagcgagggccaccccttcatcaccagccgcagcagcagccccctgcagctgaacctgctgcaggaggagatgccccggcccagcgagagcccagaccagatgagaagaaacacctgcccccagacagagtactgtgtgactggaaacaacggcagcgagagcagccctgccaccactggagccctgagcacaggcagccccccccgggagaaccccagccaccccacagccagcgccctgagcacaggcagcccccccatgaagaaccccagccaccccacagccagcgccctgagcacaggcagcccccccatgaagaaccccagccaccccacagccagcaccctgtccatgggcctgccccccagcaggacccccagccaccccacagccaccgtgctgagcacaggcagccccccatctgagagccccagcaggactggatctgctgccagcggcagcagtgacagcagcatctacctgaccagctctgtgtacagcagcaagatcagccagaatggccagcagagccaggatgtgcagaagaaggagaccttccccaacgtggccgaggagcccatctggaggatgatccggcagaccccagagcgcatcctgatgacctaccaggtgcctgagcgggtgaaggaggtggtgctgaaggaggacctggagaagctggagagcatgaggcagcagcagccccagttcagccacggccagaaggaggagctggccaaggtgtacaactggatccagagccagacagtgacccaggagattgacatccaggcctgtgtgacctgtgaaaatgaagacagcgcagatggagctgccaccagctgtggccaggtgctggtggaggacagctgctag

SEQ ID NO: 19610 - DNA, 1296 bp, synthetic construct
  source 1..1296: mol_type = other DNA; note = Synthetic coding sequence
atgtctgaccagatcaagttcatcatggacagcctgaacaaggagcccttcaggaagaactacaacctgatcacctttgacagcctggagcccatgcagctgctgcaggtgctgagtgatgtgctggccgagattgaccccaagcagctggtggacatccgggaggagatgcctgagcagacagccaagaggatgctgagcctgctgggcatcctgaagtacaagcccagcggaaatgccacagacatgagcaccttccggcagggcctggtgattggcagcaagcctgtgatctaccctgtgctgcactggctgctgcagaggaccaatgagctgaagaagagggcctacctggcccgcttcctgatcaagctggaggtgcccagcgagttcctgcaggatgagaccgtggccgacaccaacaagcagtatgaggagctgatggaggccttcaagaccctgcacaaggagtatgagcagctgaagatcagcggcttcagcacagctgagatcaggaaggacatcagcgccatggaggaggagaaggaccagctgatcaagagggtggagcacctgaagaagagggtggagacagcccagaaccaccagtggatgctgaagatcgcccggcagctgcgggtggagaaggagcgggaggagtacctggcccagcagaagcaggagcagaagaaccagctgttccacgctgtgcagaggctgcagagggtgcagaaccagctgaagtccatgaggcaggccgctgctgatgccaagccagagagcctgatgaagaggctggaggaggagatcaagttcaacctgtacatggtgacagagaagttccccaaggagctggagaacaagaagaaggagctgcacttcctgcagaaggtggtgtctgagcccgccatgggccacagcgacctgctggagctggagagcaagatcaatgagatcaacacagagatcaaccagctgattgagaagaagatgatgagaaatgagcccatcgagggcaagctgagcctgtaccggcagcaggccagcatcatcagcaggaagaaggaggccaaggccgaggagctgcaggaggccaaggagaagctggccagcctggagcgggaggcctctgtgaagaggaaccagacccgggagtttgatggaacagaggtgctgaagggagatgagcggcaggacctgaccctgagcccccggctggagtgtggcggcgtcatcatggcctactgcagcctgaagctgctgggcagcagtgacccccccaccagcgccagctag

SEQ ID NO: 19611 - DNA, 1119 bp, synthetic construct
  source 1..1119: mol_type = other DNA; note = Synthetic coding sequence
atggccagcagcgccagcgcccggaccccagctgggaagagggtcatcaaccaggaggagctgcggcggctgatgaaggagaagcagaggctgagcaccagcaggaagagaattgagagcccctttgccaagtacaaccggctgggccagctgagctgtgccctgtgcaacacccctgtgaagtctgagctgctgtggcagacccacgtgctgggcaagcagcaccgggagaaggtggccgagctgaagggggccaaggaggccagccagggcagcagcgccagcagcgccccccacagcgtgaagaggaaggccccagatgctgatgaccaggatgtgaagagggccaaggccaccctggtgccccaggtgcagcccagcaccagcgcctggaccaccaactttgacaagattggcaaggagttcatccgggccacccccagcaagcccagcggcctgagcctgctgcctgactatgaagatgaggaggaggaggaggaggaggaggagggagatggagagaggaagagaggagatgccagcaagcccctgagtgatgcccagggcaaggagcacagcgtgagcagcagccgggaggtgaccagctctgtgctgcccaatgacttcttcagcaccaacccccccaaggcccccatcatcccccacagcggcagcattgagaaggccgagatccacgagaaggtggtggagcggcgggagaacacagctgaggccctgcctgagggcttctttgatgatcctgaggtggatgcccgggtgaggaaggtggatgcccccaaggaccagatggacaaggagtgggatgagttccagaaggccatgaggcaggtgaacaccatcagcgaggccatcgtggccgaggaggatgaggagggccgcctggaccggcagattggagaaattgatgagcagatcgagtgctaccgccgggtggagaagctgaggaaccggcaggatgagatcaagaacaagctgaaggagatcctgaccatcaaggagctgcagaagaaggaggaggagaatgctgacagtgatgatgaaggagagctgcaggacctgctgagccaggactggagggtgaagggggccctgctgtag

SEQ ID NO: 19612 - DNA, 1782 bp, synthetic construct
  source 1..1782: mol_type = other DNA; note = Synthetic coding sequence
atgagccggcccagcagccgggccatctacctgcacaggaaggagtacagccagaacctgaccagcgagcccaccctgctgcagcaccgggtggagcacctgatgacctgcaagcagggcagccagagggtgcagggcccagaagatgccctgcagaagctgtttgagatggatgcccagggccgggtgtggagccaggacctgatcctgcaggtgagagatggctggctgcagctgctggacatcgagaccaaggaggagctggacagctaccgcctggacagcatccaggccatgaatgtggccctgaacacctgcagctacaacagcatcctgagcatcaccgtgcaggagcccggcctgcccggcaccagcaccctgctcttccagtgccaggaggtgggcgctgagcggctgaagaccagcctgcagaaggccctggaggaggagctggagcagaggccccggctgggcggcctgcagcccggccaggaccgctggaggggccctgccatggagcggcccctgcccatggagcaggcccgctacctggagcccggcatccccccagagcagccccaccagaggaccctggagcacagcctgccccccagcccccggcccctgcccaggcacaccagcgcccgggagcccagcgccttcaccctgcccccaccaagaagaagcagcagcccagaagatcctgagagagatgaggaggtgctgaaccacgtgctgcgggacatcgagctgttcatgggcaagctggagaaggcccaggccaagaccagcaggaagaagaagtttgggaagaagaacaaggaccagggcggcctgacccaggcccagtacatcgactgcttccagaagatcaagcacagcttcaacctgctgggccgcctggccacctggctgaaggagaccagcgcccctgagctggtgcacatcctcttcaagagcctgaacttcatcctggcccgctgcccagaggccggcctggccgcccaggtgatcagccccctgctgacccccaaggccatcaacctgctgcagagctgcctgagccccccagagagcaacctgtggatgggcctgggccctgcctggaccaccagcagagctgactggacaggagatgagcccctgccctaccagcccaccttcagtgatgactggcagctgcctgagcccagcagccaggcccccctgggctaccaggaccctgtgtccctgcggcggggcagccaccggctgggcagcaccagccacttcccccaggagaagacccacaaccacgacccccagcccggggaccccaacagccggcccagcagccccaagccagcccagcctgccctgaagatgcaggtgctgtatgaatttgaggccaggaacccccgggagctgactgtggtgcagggcgagaagctggaggtgctggaccacagcaagcgctggtggctggtgaagaatgaagctggccgcagcggctacatccccagcaacatcctggagcccctgcagcccggcaccccaggcacccagggccagagccccagccgggtgcccatgctgcggctgagcagcaggcctgaggaggtgacagactggctgcaggccgagaacttcagcacagccaccgtgaggaccctgggcagcctgaccggcagccagctgctgcgcatccggcctggagagctgcagatgctgtgcccccaggaggccccccgcatcctgagccggctggaggccgtgcggaggatgctgggcatcagcccctag

SEQ ID NO: 19613 - DNA, 1050 bp, synthetic construct
  source 1..1050: mol_type = other DNA; note = Synthetic coding sequence
atgaagctgaccagcgagaagctgcccaagaaccccttctacgcctctgtgtcccagtatgctgccaagaaccagaagttcttccagtggaagaaggagaagacagaaagtgactacacccacgccaacctggtggacaaggccctgcagctgctgaaggagcgcatcctgaagggggacaccctggcctacttcctgcggggccagctgtactttgaggagggctggtatgaggaggccctggagcagtttgaggagatcaaggagaaggaccaccaggccacctaccagctgggcgtgatgtactatgatggcctgggcaccaccctggatgctgagaagggcgtggactacatgaagaagatcctggacagcccctgccccaaggcccggcacctgaagtttgctgctgcctacaacctgggccgggcctactatgagggcaaaggagtgaagaggagcaatgaggaggccgagcggctgtggctgattgctgctgacaatggaaaccccaaggcctctgtgaaggcccagagcatgctgggcctgtactacagcaccaaggagcccaaggagctggagaaggccttctactggcacagcgaggcctgtggaaatggaaacctggagagccagggcgccctgggcctgatgtacctgtatggccagggcatccggcaggacacagaagctgccctgcagtgcctgcgggaggccgctgagagaggaaatgtgtatgcccagggcaacctggtggagtactactacaagatgaagttcttcaccaagtgtgtggccttcagcaagagaattgctgactatgatgaggtgcatgacatccccatgattgcccaggtgacagactgcctgcctgagttcatcggccggggcatggccatggccagcttctaccacgcccgctgcctgcagctgggcctgggcatcaccagagatgagaccacagccaagcactactacagcaaggcctgccgcctgaacccagccctggctgatgagctgcacagcctgctgatccggcagaggatctag

SEQ ID NO: 19614 - DNA, 1236 bp, synthetic construct
  source 1..1236: mol_type = other DNA; note = Synthetic coding sequence
atgggcctgaagaagatgaagggcctgtcctatgatgaggcctttgccatggccaatgaccccctggagggcttccacgaggtgaacctggccagccccaccagcccagacctgctgggcgtgtatgagagcggcacccaggagcagaccaccagccccagcgtcatctaccggccccaccccagcgccctgagctctgtgcccatccaggccaatgccctggatgtgtctgagctgcccacccagcctgtgtacagcagcccccggcggctgaactgtgccgagatcagcagcatctccttccacgtgacagatcctgccccctgcagcaccagcggcgtgacagctggcctgaccaagctgaccaccaggaaggacaactacaatgctgagcgggagttcctgcagggcgccaccatcacagaggcctgtgatggcagtgatgacatcttcggcctgagcacagacagcctgagccggctgcggagccccagcgtgctggaggtgcgggagaagggctatgaaaggctgaaggaggagctggccaaggcccagcgggagctgaagctgaaggatgaggagtgtgagcggctgagcaaggtgcgggaccagctgggccaggagctggaggagctgacagccagcctgtttgaggaggcccacaagatggtgcgggaggccaacatcaagcaggccacagctgagaagcagctgaaggaggcccagggcaagattgatgtgctgcaggccgaggtggccgccctgaagaccctggtgctgagcagcagccccaccagccccacccaggagcccctgcccggcggcaagacccccttcaagaagggccacaccaggaacaagagcaccagcagcgccatgagcggcagccaccaggacctgagcgtcatccagcccatcgtgaaggactgcaaggaggccgacctgagcctgtacaatgagttccggctgtggaaggatgagcccaccatggacaggacctgccccttcctggacaagatctaccaggaggacatcttcccctgcctgaccttcagcaagtctgagctggccagcgctgtgctggaggccgtggagaacaacaccctgagcattgagcctgtgggcctgcagcccatccgctttgtgaaggccagcgctgtggagtgtggcggccccaagagcctgctgtatgtgaccttcctgcacacctttgacaccttcagccgggacagctag

SEQ ID NO: 19615 - DNA, 2148 bp, synthetic construct
  source 1..2148: mol_type = other DNA; note = Synthetic coding sequence
atgtttggaaggaagaggtctgtgtcctttggaggcttcggctggattgacaagaccatgctggccagcctgaaggtgaagaagcaggagctggccaacagcagtgatgccaccctgcctgaccggcccctgagcccccccctgacagccccacccaccatgaagagcagcgagttctttgagatgctggagaagatgcaggatgactacatcccctaccccagcattgatgaggtggtggagaagggcggcccctacccccaggtgatcctgccccagtttggaggctactggattgaggaccctgaaaatgtgggcacccccaccagcctgggcagcagcatctgtgaggaggaggaggaggacaacctgagccccaacaccttcggctacaagctggagtgcaagggggaggcccgggcctacagaagacacttcctgggcaaggaccacctgaacttctactgcaccggcagcagcctgggcaacctgatcctgtctgtgaagtgtgaggaggccgagggcatcgagtacctgcgggtcatcctgcggagcaagctgaagacagtgcatgagcgcatccccctggccggcctgagcaagctgcccagcgtgccccagatcgccaaggccttctgtgatgatgctgtgggcctgcgcttcaaccctgtgctgtaccccaaggccagccagatgattgtgtcctatgatgaacatgaggtgaacaacaccttcaagtttggagtcatctaccagaaggcccggcagaccctggaggaggagctgtttggaaataatgaggagagccctgccttcaaggagttcctggacctgctgggggacaccatcaccctgcaggacttcaagggcttccggggcggcctggatgtgacccacggccagacaggagtggagagcgtgtacaccaccttccgggaccgggagatcatgtttcatgtgtccaccaagctgcccttcacagatggagatgcccagcagctgcagaggaagaggcacatcggaaatgacatcgtggccatcatcttccaggaggagaacaccccatttgtgcctgacatgattgccagcaacttcctgcacgcctacatcgtggtgcaggtggagaccccaggcacagagacccccagctacaaggtgtctgtgacagcccgggaggatgtgcccacctttggaccacccctgcccagcccccctgtgttccagaagggccctgagttccgggagttcctgctgaccaagctgaccaatgcagaaaatgcctgctgcaagagtgacaagtttgccaagctggaggacaggaccagggctgccctgctggacaacctgcatgatgagctgcacgcccacacccaggccatgctgggcctgggccctgaggaggacaagtttgaaaatggaggccatggaggcttcctggagagcttcaagagggccatccgggtgcgcagccacagcatggagaccatggtgggcggccagaagaagagccacagcggcggcatccctggcagcctgagcggcggcatcagccacaacagcatggaggtgaccaagaccaccttcagcccccctgtggtggccgccaccgtgaagaaccagagccgcagccccatcaagagaagaagtggcctcttcccccggctgcacactggaagtgagggccagggcgacagccgggcccgctgtgacagcaccagcagcacccccaagaccccagatggcggccacagcagccaggagatcaagtctgagaccagcagcaaccccagcagccctgagatctgccccaacaaggagaagcccttcatgaagctgaaggaaaatggccgggccatcagccgcagcagcagcagcaccagctctgtgagcagcacagctggggagggggaggccatggaggagggggacagcggcggcagccagcccagcaccaccagccccttcaagcaggaggtgtttgtgtacagccccagccccagcagcgagagccccagcctgggcgccgccgccacccccatcatcatgagccgcagccccacagatgccaagagcaggaacagccccaggagcaacctgaagttccgctttgacaagctgagccacgccagcagtggagctggccactag

SEQ ID NO: 19616 - DNA, 2271 bp, synthetic construct
  source 1..2271: mol_type = other DNA; note = Synthetic coding sequence
atggaggaggagctgaagtgccctgtgtgtggcagcctcttccgggagcccatcatcctgccctgcagccacaacgtgtgcctgccctgtgcccggaccatcgctgtgcagaccccagatggagagcagcacctgccccagcccctgctgctgagccggggcagcggcctgcaggccggggctgctgctgctgccagcctggagcatgatgctgctgctggccctgcctgtggcggggccggcggcagcgctgctgggggcctgggcggcggggccggcggcggcggggaccatgctgacaagctgagcctgtacagcgagacagacagcggctacggcagctacacccccagcctgaagagccccaatggagtgcgggtgctgcccatggtgcctgcccctcctggcagcagcgctgctgctgcccggggagctgcctgcagcagcctgagcagcagcagcagcagcatcacctgcccccagtgccacaggtctgccagcctggaccaccggggcctgcggggcttccagaggaaccggctgctggaggccatcgtgcagcgctaccagcagggcagaggagctgtgcccggcaccagcgctgctgctgctgtggccatctgccagctgtgtgacaggaccccacctgagcctgctgccaccctgtgtgagcagtgtgatgtgctgtactgcagcgcctgccagctgaagtgccaccccagccggggcccctttgccaagcaccggctggtgcagcccccacctcctcctcctcctcctgctgaggccgccagcggccccaccggcacagcccagggcgcccccagcggcggcggcggctgcaagagccctgggggcgctggggccggggccaccggcggcagcacagccaggaagttccccacctgcccagagcacgagatggagaactacagcatgtactgtgtgtcctgcaggacccctgtgtgctacctgtgcctggaggagggcagacatgccaagcatgaggtgaagcccctgggcgccatgtggaagcagcacaaggcccagctgagccaggccctgaatggagtgtctgacaaggccaaggaggccaaggagttcctggtgcagctgaagaacatcctgcagcagatccaggagaatggcctggactatgaggcctgcctggtggcccagtgtgatgccctggtggatgccctgacccggcagaaggccaagctgctgaccaaggtgaccaaggagcgggagcacaagctgaagatggtgtgggaccagatcaaccactgcaccctgaagctgcggcagagcacaggcctgatggagtactgcctggaggtgatcaaggaaaatgaccccagcggcttcctgcagatcagtgatgccctgatcaagagggtgcaggtgtcccaggagcagtgggtgaagggggccctggagcccaaggtgtctgctgagtttgacctgaccctggacagcgagcccctgctgcaggccatccaccagctggacttcatccagatgaagtgccgggtgccccctgtgcccctgctgcagctggagaagtgctgcaccaggaacaacagcgtgaccctggcctggaggatgccacccttcacccacagccctgtggatggctacatcctggagctggatgatggagctgggggccagttccgggaggtgtatgtgggcaaggagaccctgtgcaccattgatggcctgcacttcaacagcacctacaatgcccgggtgaaggccttcaacagcagtggagtgggcccctacagcaagacagtggtgctgcagaccagtgatgtggcctggttcacctttgaccccaacagcggccaccgggacatcatcctgagcaatgacaaccagacagccacctgcagcagctatgatgacagagtggtgctgggcacagctgccttcagcaagggcgtgcactactgggagctgcacgtggacagatatgacaaccacccagaccctgccttcggcgtggcccgggcctctgtggtgaaggacatgatgctgggcaaggatgacaaggcctgggccatgtatgtggacaacaacagatcctggttcatgcactgcaacagccacaccaacagaacagaaggaggagtgtgcaagggggccaccgtgggcgtgctgctggacctgaacaagcacaccctgaccttcttcatcaatggccagcagcagggccccacagccttcagccatgaggtgcagcccagcgtgaccagcctcttctag

SEQ ID NO: 19617 - DNA, 2352 bp, synthetic construct
  source 1..2352: mol_type = other DNA; note = Synthetic coding sequence
atggaggaggagctgaagtgccctgtgtgtggcagcctcttccgggagcccatcatcctgccctgcagccacaacgtgtgcctgccctgtgcccggaccatcgctgtgcagaccccagatggagagcagcacctgccccagcccctgctgctgagccggggcagcggcctgcaggccggggctgctgctgctgccagcctggagcatgatgctgctgctggccctgcctgtggcggggccggcggcagcgctgctgggggcctgggcggcggggccggcggcggcggggaccatgctgacaagctgagcctgtacagcgagacagacagcggctacggcagctacacccccagcctgaagagccccaatggagtgcgggtgctgcccatggtgcctgcccctcctggcagcagcgctgctgctgcccggggagctgcctgcagcagcctgagcagcagcagcagcagcatcacctgcccccagtgccacaggtctgccagcctggaccaccggggcctgcggggcttccagaggaaccggctgctggaggccatcgtgcagcgctaccagcagggcagaggagctgtgcccggcaccagcgctgctgctgctgtggccatctgccagctgtgtgacaggaccccacctgagcctgctgccaccctgtgtgagcagtgtgatgtgctgtactgcagcgcctgccagctgaagtgccaccccagccggggcccctttgccaagcaccggctggtgcagcccccacctcctcctcctcctcctgctgaggccgccagcggccccaccggcacagcccagggcgcccccagcggcggcggcggctgcaagagccctgggggcgctggggccggggccaccggcggcagcacagccaggaagttccccacctgcccagagcacgagatggagaactacagcatgtactgtgtgtcctgcaggacccctgtgtgctacctgtgcctggaggagggcagacatgccaagcatgaggtgaagcccctgggcgccatgtggaagcagcacaaggcccagctgagccaggccctgaatggagtgtctgacaaggccaaggaggccaaggagttcctggtgcagctgaagaacatcctgcagcagatccaggagaatggcctggactatgaggcctgcctggtggcccagtgtgatgccctggtggatgccctgacccggcagaaggccaagctgctgaccaaggtgaccaaggagcgggagcacaagctgaagatggtgtgggaccagatcaaccactgcaccctgaagctgcggcagagcacaggcctgatggagtactgcctggaggtgatcaaggaaaatgaccccagcggcttcctgcagatcagtgatgccctgatcaagagggtgcaggtgtcccaggagcagtgggtgaagggggccctggagcccaaggtgtctgctgagtttgacctgaccctggacagcgagcccctgctgcaggccatccaccagctggacttcatccagatgaagtgccgggtgccccctgtgcccctgctgcagctggagaagtgctgcaccaggaacaacagcgtgaccctggcctggaggatgccacccttcacccacagccctgtggatggctacatcctggagctggatgatggagctgggggccagttccgggaggtgtatgtgggcaaggagaccctgtgcaccattgatggcctgcacttcaacagcacctacaatgcccgggtgaaggccttcaacagcagtggagtgggcccctacagcaagacagtggtgctgcagaccagtgatgtggcctggttcacctttgaccccaacagcggccaccgggacatcatcctgagcaatgacaaccagacagccacctgcagcagctatgatgacagagtggtgctgggcacagctgccttcagcaagggcgtgcactactgggagctgcacgtggacagatatgacaaccacccagaccctgccttcggcgtggcccgggcctctgtggtgaaggacatgatgctgggcaaggatgacaaggcctgggccatgtatgtggacaacaacagatcctggttcatgcactgcaacagccacaccaacagaacagaaggaggagtgtgcaagggggccaccgtgggcgtgctgctggacctgaacaagcacaccctgaccttcttcatcaatggccagcagcagggccccacagccttcagccacgtggatggagtcttcatgcctgccctgagcctgaacagaaatgtgcaggtgaccctgcacacaggcctggaggtgcccaccaacctgggccggcccaagctgagcggcaactag

SEQ ID NO: 19618 - DNA, 471 bp, synthetic construct
  source 1..471: mol_type = other DNA; note = Synthetic coding sequence
atggtgcctgtgttcaccagcagcgccctgcctgtgaaggatgtggaggacaagccagagcagcagaccaggacccgggagacagacaagagccccaccagcacagagccccggcagcagcccagcgccctgtttgcccggggcaacaggaaggctgtgaagagcccccagaggagcagcagcaagatcaaggagaacaagcacccctttgccctgtatggctggggcgagaagcagacagacaccggcagccagaagacccacaacgtgtgtgccagcgcccctgtgcatgagatccacgagagcgccctgcgggccaagaacagacggcaggtggagaagaggaagctggtggcccagaggcagagggcccacagcgtggatgtggagaagaacaggaagatgaaggccagcagcagcgagaacccctggatgacagagtacatgcgctgctacagcgcccgggcctag

SEQ ID NO: 19619 - DNA, 813 bp, synthetic construct; identical to SEQ ID NO: 18630
  source 1..813: mol_type = other DNA; note = Synthetic coding sequence

SEQ ID NO: 19620 - DNA, 1158 bp, synthetic construct
  source 1..1158: mol_type = other DNA; note = Synthetic coding sequence
atggccgccccagacctgagcaccaacctgcaggaggaggccacctgtgccatctgcctggactacttcacagatcctgtgatgacagactgtggccacaacttctgccgggagtgcatccgccgctgctggggccagcctgagggcccctatgcctgcccagaatgtcgggagctgagcccccagaggaacctgcggcccaaccggcccctggccaagatggccgagatggcccggcggctgcacccccccagccctgtgccccagggcgtgtgcccagcccaccgggagcccctggccgccttctgtggagatgagctgcggctgctgtgtgccgcctgtgagaggtctggagagcactgggcccaccgggtgcggcccctgcaggatgctgctgaggacctgaaggccaagctggagaagagcctggagcacctgaggaagcagatgcaggatgccctgctcttccaggcccaggctgatgagacctgtgtgctgtggcagaagatggtggagagccagaggcagaatgtgctgggggagtttgagcggctgcggcggctgctggccgaggaggagcagcagctgctgcagaggctggaggaggaggagctggaggtgctgccccggctgcgggagggcgccgcccacctgggccagcagagcgcccacctggccgagctgattgctgagctggagggccgctgccagctgcctgccctgggcctgctgcaggacatcaaggatgccctgcggcgggtgcaggatgtgaagctgcagcccccagaggtggtgcccatggagctgaggacagtgtgccgggtgcccggcctggtggagaccctgcggcgcttccggggccgctgtggcggcccccgctggggagatgacagcagaagaggccctgccaaggacctgggcagccagccccgggtgctgtgcccagccacagccagcagcaagctgactgtgtcctggtggtgggtggtgggcaagaccagcagcgcccacaccagtgacatcagctgtgtgggcatcttcacccccaacaacagcagcaccagcggaaatgagctgggcatccagggcttccacagcgccctgaacagaattgccagcgctgacaccactggagtgtccacagaccccacagactag

SEQ ID NO: 19621 - DNA, 1251 bp, synthetic construct
  source 1..1251: mol_type = other DNA; note = Synthetic coding sequence
atgcccctgtacaatgacagcttccacgagatcagccacaagggccgccgccacaccctggtgctgaagagcatccagagagcagatgctggcatcgtgcgggccagcagcctgaaggtgtccaccagcgcccggctggaggtgcgggtgaagcctgtggtgttcctgaaggccctggatgacctgtctgctgaggagcggggcaccctggccctgcagtgtgaggtgtctgaccctgaggcccacgtggtgtggaggaaggatggagtgcagctgggccccagcgacaagtatgacttcctgcacacagctggcacccggggcctggtggtgcatgatgtgtccccagaagatgctggcctgtacacctgccacgtgggcagcgaggagacccgggcccgggtgcgggtgcatgacctgcacgtgggcatcaccaagaggctgaagaccatggaggtgctggagggggagagctgcagctttgaatgtgtgctgagccatgaaagtgccagtgaccctgccatgtggacagtgggcggcaagacagtgggcagcagcagccgcttccaggccacccggcagggcaggaagtacatcctggtggtgcgggaggccgcccccagtgatgctggggaggtggtgttttctgtgcggggcctgaccagcaaggccagcctgattgtgcgggagaggcctgctgccatcatcaagcccctggaggaccagtgggtggcccctggagaagatgtggagctgcgctgtgagctgagcagagctggcacccctgtgcactggctgaaggacaggaaggccatcaggaagagccagaagtatgatgtggtgtgtgagggcaccatggccatgctggtgatccggggggccagcctgaaggatgctggggagtacacctgtgaggtggaggccagcaagagcacagccagcctgcacgtggaggagaaggccaactgcttcacagaggagctgaccaacctgcaggtggaggagaagggcacagctgtgttcacctgcaagacagagcaccctgctgccaccgtgacctggaggaagggcctgctggagctgcgggccagcggcaagcaccagcccagccaggagggcctgaccctgcggctgaccatcagcgccctggagaaggctgacagcgacacctacacctgtgacatcggccaggcccagagccgggcccagctgctggtgcagggcgaggccgccaagtgtgcccgggcctag

SEQ ID NO: 19622 - DNA, 2130 bp, synthetic construct
  source 1..2130: mol_type = other DNA; note = Synthetic coding sequence
atggagaagcaccggggcgtgctggagtgccaggtgtcccgggccagcgcccaggtgcgctggttcaagggcagccaggagctgcagcccggccccaagtatgagctggtgtctgatggcctgtacaggaagctgatcatcagtgatgtgcatgctgaagatgaggacacctacacctgtgatgctggagatgtgaagaccagcgcccagttctttgtggaggagcagagcatcaccatcgtgcggggcctgcaggatgtgacagtgatggagcccgccccagcctggtttgaatgtgagaccagcatccccagcgtgcggccccccaagtggctgctgggcaagacagtgctgcaggccggcggcaatgtgggcctggagcaggagggcaccgtgcaccggctgatgctgcggaggacctgcagcaccatgactggacctgtgcacttcaccgtgggcaagagccgcagcagcgcccggctggtggtgtctgacatccctgtggtgctgacccggcccctggagcccaagacaggccgggagctgcagagcgtggtgctgagctgtgacttccggcctgcccccaaggctgtgcagtggtacaaggatgacacccccctgagccccagcgagaagttcaagatgagcctggagggccagatggccgagctgcgcatcctgcggctgatgccagcagatgctggggtgtaccgctgccaggccggcagcgcccacagcagcacagaggtgacagtggaggcccgggaggtgacagtgacaggccccctgcaggatgctgaggccacagaggagggctgggccagcttcagctgtgagctgagccatgaagatgaggaggtggagtggagcctgaatggcatgcccctgtacaatgacagcttccacgagatcagccacaagggcagaagacacaccctggtgctgaagagcatccagagagcagatgctggcatcgtgcgggccagcagcctgaaggtgtccaccagcgcccggctggaggtgcgggtgaagcctgtggtgttcctgaaggccctggatgacctgtctgctgaggagcggggcaccctggccctgcagtgtgaggtgtctgaccctgaggcccacgtggtgtggaggaaggatggagtgcagctgggccccagcgacaagtatgacttcctgcacacagctggcacccggggcctggtggtgcatgatgtgtccccagaagatgctggcctgtacacctgccacgtgggcagcgaggagacccgggcccgggtgcgggtgcatgacctgcacgtgggcatcaccaagaggctgaagaccatggaggtgctggagggggagagctgcagctttgaatgtgtgctgagccatgagagcgccagtgaccctgccatgtggacagtgggcggcaagacagtgggcagcagcagccgcttccaggccacccggcagggcaggaagtacatcctggtggtgcgggaggccgcccccagtgatgctggggaggtggtgttttctgtgcggggcctgaccagcaaggccagcctcatcgtgcgggagaggcctgctgccatcatcaagcccctggaggaccagtgggtggcccctggagaagatgtggagctgcgctgtgagctgagccgggccggcacccctgtgcactggctgaaggacaggaaggccatcaggaagagccagaagtatgatgtggtgtgtgagggcaccatggccatgctggtgatccggggggccagcctgaaggatgctggggagtacacctgtgaggtggaggccagcaagagcacagccagcctgcacgtggaggagaaggccaactgcttcacagaggagctgaccaacctgcaggtggaggagaagggcacagctgtgttcacctgcaagacagagcaccctgctgccaccgtgacctggaggaagggcctgctggagctgcgggccagcggcaagcaccagcccagccaggagggcctgaccctgcggctgaccatcagcgccctggagaaggctgacagcgacacctacacctgtgacatcggccaggcccagagccgggcccagctgctggtgcagggcgaggccgccaagtgtgcccgggcctag

SEQ ID NO: 19623 - DNA, 16809 bp, synthetic construct
  source 1..16809: mol_type = other DNA; note = Synthetic coding sequence
atgctggtgatccggggggccagcctgaaggatgctggggagtacacctgtgaggtggaggccagcaagagcacagccagcctgcacgtggaggagaaggccaactgcttcacagaggagctgaccaacctgcaggtggaggagaagggcacagctgtgttcacctgcaagacagagcaccctgctgccaccgtgacctggaggaagggcctgctggagctgcgggccagcggcaagcaccagcccagccaggagggcctgaccctgcggctgaccatcagcgccctggagaaggctgacagcgacacctacacctgtgacatcggccaggcccagagccgggcccagctgctggtgcagggccggcgggtgcacatcatcgaggacctggaggatgtggatgtgcaggagggcagcagcgccaccttccgctgccgcatcagccctgccaactatgagcctgtgcactggttcctggacaagacccccctgcacgccaatgagctgaatgaaattgatgcccagcccggcggctaccacgtgctgaccctgcggcagctggccctgaaggacagcggcaccatctactttgaagctggggaccagagggccagcgctgccctgcgggtgacagagaagcccagcgtcttcagccgggagctgacagatgccaccatcacagaaggagaggacctgaccctggtgtgtgagaccagcacctgtgacatccctgtgtgctggaccaaggatggcaagaccctgcggggcagcgcccgctgccagctgagccatgagggccaccgggcccagctgctgatcaccggggccaccctgcaggacagcggccgctacaagtgtgaggccggcggggcctgcagcagcagcatcgtgcgggtgcacgcccggcctgtgcgcttccaggaggccctgaaggacctggaggtgctggagggcggggccgccaccctgcgctgtgtgctgagctctgtggccgcccctgtgaagtggtgctacggcaacaacgtgctgcggcctggggacaagtacagcctgcggcaggagggcgccatgctggagctggtggtgaggaacctgcggccccaggacagcggccgctacagctgcagctttggagaccagaccaccagcgccaccctgactgtgacagccctgcctgcccagttcatcggcaagctgaggaacaaggaggccacagaaggagccacagccaccctgcgctgtgagctgagcaaggccgcccctgtggagtggaggaagggcagcgagaccctgagagatggagaccgctactgcctgcggcaggatggagccatgtgtgagctgcagatccggggcctggccatggtggatgctgctgagtacagctgtgtgtgtggggaggagaggaccagcgccagcctgaccatccggcccatgcctgcccacttcatcggccgcctgcggcaccaggagagcattgaaggagccacagccaccctgcgctgtgagctgagcaaggccgcccctgtggagtggaggaagggccgggagagcctgagagatggagacagacacagcctgcggcaggatggagctgtgtgtgagctgcagatctgtggcctggccgtggctgatgctggggagtacagctgtgtgtgtggggaggagaggaccagcgccaccctgactgtgaaggccctgcctgccaagttcacagagggcctgagaaatgaggaggccgtggagggcgccacagccatgctgtggtgtgagctgagcaaggtggcccctgtggagtggaggaagggccctgagaacctgagagatggagaccgctacatcctgcggcaggagggcacccgctgtgagctgcagatctgtggcctggccatggctgatgctggggagtacctgtgtgtgtgtggccaggagaggaccagcgccaccctgaccatccgggccctgcctgcccgcttcattgaagatgtgaagaaccaggaggcccgggagggcgccacagctgtgctgcagtgtgagctgaacagcgctgcccctgtggagtggaggaagggcagcgagaccctgagagatggagaccgctacagcctgcggcaggacggcaccaagtgtgagctgcagatccggggcctggccatggctgacaccggggagtacagctgtgtgtgtggccaggagaggaccagcgccatgctgactgtgcgggccctgcccatcaagttcacagagggcctgagaaatgaggaggccacagaaggagccacagctgtgctgcgctgtgagctgagcaagatggcccctgtggagtggtggaagggccacgagaccctgagagatggagacagacacagcctgcggcaggatggagcccgctgtgagctgcagatccggggcctggtggccgaggatgctggggagtacctgtgcatgtgtgggaaggagaggaccagcgccatgctgactgtgcgggccatgcccagcaagttcatcgagggcctgagaaatgaggaggccacagaaggagacacagccaccctgtggtgtgagctgagcaaggccgcccctgtggagtggaggaagggccacgagaccctgagagatggagacagacacagcctgcggcaggacggcagccgctgtgagctgcagatccggggcctggccgtggtggatgctggggagtacagctgtgtgtgtggccaggagaggaccagcgccaccctgactgtgcgggccctgcctgcccgcttcattgaagatgtgaagaaccaggaggcccgggagggcgccacagctgtgctgcagtgtgagctgagcaaggccgcccctgtggagtggaggaagggcagcgagaccctgcggggcggggaccgctacagcctgcggcaggacggcacccgctgtgagctgcagatccacggcctgtctgtggccgacaccggggagtacagctgtgtgtgtggccaggagaggaccagcgccaccctgactgtgcgggccctgcctgcccgcttcacccaggacctgaagaccaaggaggccagcgagggcgccacagccaccctgcagtgtgagctgagcaaggtggcccctgtggagtggaagaagggccctgagaccctgagagatggcggccgctacagcctgaagcaggacggcacccgctgtgagctgcagatccatgacctgtctgtggctgatgctggggagtacagctgcatgtgtggccaggagaggaccagcgccaccctgactgtgcgggccctgcctgcccgcttcacagagggcctgagaaatgaggaggccatggagggcgccacagccaccctgcagtgtgagctgagcaaggccgcccctgtggagtggaggaagggcctggaggccctgagagatggagacaagtacagcctgcggcaggatggagctgtgtgtgagctgcagatccacggcctggccatggctgacaacggggtgtacagctgtgtgtgtggccaggagaggaccagcgccaccctgactgtgcgggccctgcctgcccgcttcatcgaggacatgaggaaccagaaggccacagaaggagccaccgtgaccctgcagtgcaagctgaggaaggccgcccctgtggagtggaggaagggccccaacaccctgaaggatggagaccgctacagcctgaagcaggacggcaccagctgtgagctgcagatccggggcctggtgattgctgatgctggggagtacagctgcatctgtgagcaggagaggaccagcgccaccctgactgtgcgggccctgcctgcccgcttcattgaagatgtgaggaaccacgaggccacagaaggagccacagctgtgctgcagtgtgagctgagcaaggccgcccctgtggagtggaggaagggcagcgagaccctgagagatggagaccgctacagcctgcggcaggacggcacccgctgtgagctgcagatccggggcctggccgtggaggacaccggggagtacctgtgtgtgtgtggccaggagaggaccagcgccaccctgactgtgcgggccctgcctgcccgcttcatcgacaacatgaccaaccaggaggcccgggagggcgccacagccaccctgcactgtgagctgagcaaggtggcccctgtggagtggaggaagggccctgagaccctgagagatggagacagacacagcctgcggcaggacggcacccgctgtgagctgcagatccggggcctgtctgtggctgatgctggggagtacagctgtgtgtgtggccaggagaggaccagcgccaccctgaccatccgggaggccacagagggcgccacagccatgctgcagtgtgagctgagcaaggtggcccctgtggagtggaggaaaggacctgagaccctgagagatggagaccgctacaacctgcggcaggacggcacccgctgtgagctgcagatccacggcctgtctgtggccgacacaggagagtacagctgtgtgtgtggccaggagaagaccagcgccaccctgactgtgaaggccccccagcccgtcttccgggagcccctgcagagcctgcaggccgaggagggcagcacagccaccctgcagtgtgagctgtctgagcccacagccaccgtggtgtggagcaagggcggcctgcagctgcaggccaacggccggcgggagccccggctgcagggctgcacagctgagctggtgctgcaggacctgcagcgggaggacaccggggagtacacctgcacctgtggcagccaggccaccagcgccaccctgactgtgacagctgcccctgtgcgcttcctgcgggagctgcagcaccaggaggtggatgaaggaggaacagcccacctgtgctgtgagctgagcagagctggggcctctgtggagtggaggaagggcagcctgcagctgttcccctgtgccaagtaccagatggtgcaggatggagctgctgctgagctgctggtgcggggcgtggagcaggaggatgctggggactacacctgtgacaccggccacacccagagcatggccagcctgtctgtgcgggtgccccggcccaagttcaagacccggctgcagagcctggagcaggagactggagacatcgcccggctgtgctgccagctgagtgatgctgagagcggggctgtggtgcagtggctgaaggagggcgtggagctgcatgctggccccaagtatgagatgaggagccagggcgccacccgggagctgctgatccaccagctggaggccaaggacaccggggagtatgcctgtgtgactggaggccagaagacagctgccagcctgcgggtgacagagcctgaggtgaccatcgtgcggggcctggtggatgctgaggtgacagcagatgaagatgtggagttcagctgtgaggtgtccagagctggggccaccggggtgcagtggtgcctgcagggcctgcccctgcagagcaatgaggtgacagaggtggccgtgagagatggccgcatccacaccctgcggctgaagggcgtgaccccagaagatgctggcaccgtgtccttccacctgggcaaccacgccagcagcgcccagctgactgtgcgggcccctgaggtgaccatcctggagcccctgcaggatgtgcagctgtctgagggccaggatgccagcttccagtgccgcctgagccgggccagcggccaggaggcccgctgggccctgggcggcgtgcccctgcaggccaatgagatgaatgacatcaccgtggagcagggcaccctgcacctgctgaccctgcacaaggtgaccctggaggatgctggcaccgtgtccttccacgtgggcacctgcagcagcgaggcccagctgaaggtgacagccaagaacacagtggtgcggggcctggagaatgtggaggccctggagggcggggaggccctgtttgagtgccagctgagccagcctgaggtggccgcccacacctggctgctggatgatgagcctgtgcacaccagtgaaaatgctgaggtggtgttctttgaaaatggcctgcggcacctgctgctgctgaagaacctgcggccccaggacagctgccgggtgaccttcctggccggggacatggtgaccagcgccttcctgactgtgcggggctggaggctggagatcctggagcccctgaagaatgctgctgtgcgggccggggcccaggcctgcttcacctgcaccctgtctgaggccgtgcctgtgggggaggcctcctggtacatcaatggagctgctgtgcagccagatgacagcgactggacagtgacagcagatggcagccaccacgccctgctgctgcggagcgcccagccccaccacgccggggaggtgacctttgcctgcagagatgctgtggccagcgcccggctgactgtgctgggcctgcctgaccccccagaagatgctgaggtggtggcccggagcagccacacagtgaccctgtcctgggccgcccccatgtctgatggcggcggcggcctgtgtggctacagagtggaggtgaaggagggcgccaccggccagtggaggctgtgccacgagctggtgcccggcccagaatgtgtggtggatggcctggcccctggagagacctaccgcttccgggtggccgctgtgggccctgtgggcgctggggagcctgtgcacctgccccagacagtgcggctggccgagccccccaagcctgtgcccccccagcccagcgcccctgagagccggcaggtggccgctggagaagatgtgtccctggagctggaggtggtggccgaggccggggaggtgatctggcacaagggcatggagcgcatccagcccggcggccgctttgaggtggtgtcccagggccggcagcagatgctggtgatcaagggcttcaccgctgaggaccagggcgagtaccactgcggcctggcccagggcagcatctgcccagctgctgccaccttccaggtggccctgagccctgcctctgtggatgaggccccccagcccagcctgcccccagaggccgcccaggagggggacctgcacctgctgtgggaggccctggccaggaagaggaggatgagccgggagcccaccctggacagcatcagcgagctgcctgaggaggatggccgcagccagaggctgccccaggaggccgaggaggtggccccagacctgtctgagggctacagcacagcagatgagctggccaggactggagatgctgacctgagccacaccagcagtgatgatgagagcagagctggcacccccagcctggtgacctacctgaagaaggccggccggcccggcaccagccccctggccagcaaggtgggcgccccagctgcccccagcgtgaagccccagcagcagcaggagcccctggccgctgtgcggccccccctgggggacctgagcaccaaggacctgggggaccccagcatggacaaggctgctgtgaagatccaggccgccttcaagggctacaaggtgaggaaggagatgaagcagcaggagggccccatgttcagccacaccttcggggacacagaggcccaggtgggagatgccctgcggctggagtgtgtggtggccagcaaggcagatgtgcgggcccgctggctgaaggatggagtggagctgacagatggccgccaccaccacatcgaccagctgggagatggcacctgcagcctgctgatcaccggcctggacagagcagatgctggctgctacacctgccaggtgagcaacaagtttggccaggtgacccacagcgcctgtgtggtggtgtctggcagcgagagcgaggccgagagcagcagtggaggagagctggatgatgccttccggcgggccgcccggcggctgcacaggctcttccgcaccaagagccctgctgaggtgtctgatgaggagctgttcctgtctgcagatgagggccctgctgagcctgaggagcctgctgactggcagacctacagagaagatgagcacttcatctgcatccgctttgaggccctgacagaggcccggcaggccgtgacccgcttccaggagatgtttgccaccctgggcatcggcgtggagatcaagctggtggagcagggcccccggcgggtggagatgtgcatcagcaaggagaccccagcccctgtggtgcccccagagcccctgcccagcctgctgaccagtgatgctgcccctgtgttcctgacagagctgcagaaccaggaggtgcaggacggctaccctgtgtcctttgactgtgtggtgacaggccagcccatgcccagcgtgcgctggttcaaggatggcaagctgctggaggaggatgaccactacatgatcaatgaagaccagcagggcggccaccagctgatcatcacagctgtggtgcctgctgacatgggcgtgtaccgctgcctggccgagaacagcatgggcgtgagcagcaccaaggccgagctgcgggtggacctgaccagcacagattatgacacagctgctgatgccacagagagcagcagctacttcagcgcccagggctacctgagcagccgggagcaggagggcacagagagcaccacagatgagggccagctgccccaggtggtggaggagctgcgggacctgcaggtggcccctggcacccggctggccaagttccagctgaaggtgaagggctacccagccccccggctgtactggttcaaggatggccagcccctgacagccagcgcccacatccgcatgacagacaagaagatcctgcacaccctggagatcatctctgtgacccgggaggacagcggccagtatgctgcctacatcagcaatgccatgggcgccgcctacagcagcgcccggctgctggtgcggggcccagatgagcctgaggagaagccagccagtgatgtgcatgagcagctggtgccccccaggatgctggagcgcttcacccccaagaaggtgaagaagggcagcagcatcaccttctctgtgaaggtggagggccggcctgtgcccaccgtgcactggctgcgggaggaggccgagcggggcgtgctgtggattggccctgacaccccaggctacacagtggccagcagcgcccagcagcacagcctggtgctgctggatgtgggccggcagcaccagggcacctacacctgcatcgccagcaatgctgctggccaggccctgtgcagcgccagcctgcacgtgtctggcctgcccaaggtggaggagcaggagaaggtgaaggaggccctgatcagcaccttcctgcagggcaccacccaggccatcagcgcccagggcctggagacagccagctttgctgacctgggcggccagaggaaggaggagcccctggccgccaaggaggccctgggccacctgagcctggccgaggtgggcacagaggagttcctgcagaagctgaccagccagatcacagagatggtgtctgccaagatcacccaggccaagctgcaggtgcctggaggagacagtgatgaggacagcaagaccccatctgccagccccaggcatggccgcagccggcccagcagcagcatccaggagagcagcagcgagagtgaagatggagatgcccggggggagatctttgacatctacgtggtgacagctgactacctgcccctgggcgctgagcaggatgccatcaccctgcgggagggccagtatgtggaggtgctggatgctgcccaccccctgcgctggctggtgaggaccaagcccaccaagagcagccccagccggcagggctgggtgtccccagcctacctggaccggcggctgaagctgagccctgagtggggcgctgctgaggcccctgagttccctggagaggccgtgtctgaagatgagtacaaggcccggctgagcagcgtcatccaggagctgctgagcagcgagcaggcctttgtggaggagctgcagttcctgcagagccaccacctgcagcacctggagcgctgcccccacgtgcccatcgctgtggccggccagaaggccgtcatcttcagaaatgtgcgggacatcggccgcttccacagcagcttcctgcaggagctgcagcagtgtgacacagatgatgatgtggccatgtgcttcatcaagaaccaggccgcctttgagcagtacctggagttcctggtgggccgggtgcaggccgagagcgtggtggtgtccacagccatccaggagttctacaagaagtatgcagaggaggccctgctggccggggaccccagccagcccccacctccacccctgcagcactacctggagcagcctgtggagcgggtgcagcgctaccaggccctgctgaaggagctgatccggaacaaggccaggaaccggcagaactgtgccctgctggagcaggcctatgctgtggtgtctgccctgccccagagagctgagaacaagctgcacgtgtccctgatggagaactacccaggcaccctgcaggccctgggggagcccatccggcagggccacttcatcgtgtgggagggcgcccctggggccaggatgccctggaagggccacaacagacatgtgttcctgttcaggaaccacctggtgatctgcaagccccggcgggacagcaggacagacacagtgtcctatgtgttcaggaacatgatgaagctgagcagcattgacctgaatgaccaggtggagggagatgaccgggcctttgaggtgtggcaggagcgggaggacagcgtgaggaagtacctgctgcaggccaggacagccatcatcaagagctcctgggtgaaggagatctgtggcatccagcagaggctggccctgcctgtgtggaggcccccagactttgaggaggagctggccgactgcacagctgagctgggggagaccgtgaagctggcctgccgggtgacaggcacccccaagcctgtgatctcctggtacaaggatggcaaggctgtgcaggtggacccccaccacatcctgattgaggaccctgatggcagctgtgccctgatcctggacagcctgactggagtggacagcggccagtacatgtgctttgctgccagcgctgctggcaactgcagcaccctgggcaagatcctggtgcaggtgcccccaagatttgtgaacaaggtgcgggccagcccctttgtggagggagaagatgcccagttcacctgcaccattgaaggagccccctacccccagatccgctggtacaaggatggagccctgctgaccaccggcaacaagttccagaccctgtctgagcccaggagcggcctgctggtgctggtgatccgggccgccagcaaagaagacctgggcctgtatgaatgtgagctggtgaaccggctgggcagcgcccgggccagcgctgagctgcgcatccagagccccatgctgcaggcccaggagcagtgccaccgggagcagctggtggccgctgtggaggacaccaccctggagagagctgaccaggaggtgacctctgtgctgaagaggctgctgggccccaaggcccctggccccagcactggagacctgaccggccctggcccctgccccaggggggccccagccctgcaggagaccggcagccagccccctgtgacaggcaccagcgaggccccagctgtgcccccccgggtgccccagcccctgctgcacgagggccctgagcaggagcctgaggccatcgcccgggcccaggagtggacagtgcccatccgcatggagggcgccgcctggccaggggccggcaccggggagctgctgtgggatgtgcacagccacgtggtgcgggagaccacccagaggacctacacctaccaggccatcgacacccacacagcccggccccccagcatgcaggtgaccattgaagatgtgcaggcccagacaggaggaacagcccagtttgaggccatcatcgagggggacccccagcccagcgtgacctggtacaaggacagcgtgcagctggtggacagcacccggctgagccagcagcaggagggcaccacctacagcctggtgctgcggcacgtggccagcaaggatgctggggtgtacacctgcctggcccagaacacaggaggccaggtgctgtgcaaggccgagctgctggtgctgggcggggacaatgaaccagattctgagaagcagagccacaggaggaagctgcacagcttctatgaggtgaaggaggagatcggccggggcgtgtttggatttgtgaagagggtgcagcacaagggcaacaagatcctgtgtgccgccaagttcatccccctgcggagcaggacccgggcccaggcctaccgggagcgggacatcctggccgccctgagccaccccctggtgacaggcctgctggaccagtttgagaccaggaagaccctcatcctgatcctggagctgtgcagcagcgaggagctgctggaccggctgtacaggaagggcgtggtgacagaggccgaggtgaaggtgtacatccagcagctggtggagggcctgcactacctgcacagccatggagtgctgcacctggacatcaagcccagcaacatcctgatggtgcacccagcccgggaggacatcaagatctgtgactttggatttgcccagaacatcaccccagctgagctgcagttcagccagtatggcagccctgagtttgtgtccccagagatcatccagcagaaccctgtgtctgaggccagtgacatctgggccatgggcgtcatctcctacctgagcctgacctgcagcagcccctttgctggggagagtgaccgggccaccctgctgaatgtgctggagggccgggtgtcctggagcagccccatggccgcccacctgtctgaagatgccaaggacttcatcaaggccaccctgcagagggccccccaggcccggcccagcgctgcccagtgcctgagccacccctggttcctgaagtccatgcctgctgaggaggcccacttcatcaacaccaagcagctgaagttcctgctggcccggagccgctggcagaggagcctgatgagctacaagagcatcctggtgatgaggagcatccctgagctgctgcggggccccccagacagccccagcctgggcgtggcccggcacctgtgccgggacaccggcggcagcagcagcagcagcagcagcagtgacaatgagctggccccctttgcccgggccaagagcctgccccccagccctgtgacccacagccccctgctgcacccccggggcttcctgcggcccagcgccagcctgcctgaggaggccgaggccagcgagaggagcacagaggccccagcccccccagccagccctgagggcgccggccccccagctgcccagggctgtgtgcccaggcacagcgtcatccgcagcctcttctaccaccaggccggggagagccctgagcacggggccctggcccctggcagccgccgccacccagcccggcggcggcacctgctgaagggcggctacatcgccggggccctgcccggcctgcgggagcccctgatggagcaccgggtgctggaggaggaggccgcccgggaggagcaggccaccctgctggccaaggcccccagctttgaaacagccctgcggctgcctgccagcggcacccacctggcccctggccacagccacagcctggagcatgacagccccagcaccccccggcccagcagcgaggcctgtggggaggcccagaggctgcccagcgcccccagcggcggggcccccatccgggacatgggccacccccagggcagcaagcagctgcccagcactggaggccaccctggaacagcccagcctgagcggcccagcccagacagcccctggggccagcctgcccccttctgccaccccaagcagggcagcgccccccaggagggctgcagcccccaccctgctgtggccccctgccccccaggcagcttccccccaggcagctgcaaggaggcccccctggtgcccagcagccccttcctgggccagccccaggcccccccagccccagccaaggccagcccccccctggacagcaagatgggccctggggacatcagcctgcccggccggcccaagccaggcccctgcagcagccctggcagcgccagccaggccagcagcagccaggtgagcagcctgcgggtgggcagcagccaggtgggcacagagcccggccccagcctggatgctgagggctggacccaggaggccgaggacctgagtgacagcacccccaccctgcagaggccccaggagcaggccaccatgaggaagttcagcctgggcggccggggcggctacgccggcgtggccggctacggcacctttgcctttggaggagatgctgggggcatgctgggccagggccccatgtgggccagaattgcctgggccgtgtcccagagcgaggaggaggagcaggaggaggcccgggcagagagccagagcgaggagcagcaggaggcccgggcagagagccccctgccccaggtgtctgcccggcctgtgcctgaggtgggccgggcccccaccaggagcagccctgagcccaccccctgggaggacatcggccaggtgtccctggtgcagatccgggacctgtctggagatgctgaggccgctgacaccatcagcctggacatcagcgaggtggaccctgcctacctgaacctgagtgacctgtatgacatcaagtacctgccctttgagttcatgatcttcaggaaggtgcccaagagcgcccagcctgagccccccagccccatggccgaggaggagctggccgagttccctgagcccacctggccctggccaggagagctgggcccccatgctggcctggagatcacagaggagagtgaagatgtggatgccctgctggccgaggccgctgtgggcaggaagaggaagtggagcagccccagccgcagcctcttccacttccctggccgccacctgcccctggatgagcctgctgagctgggcctgcgggagcgggtgaaggcctctgtggagcacatcagccgcatcctgaagggccggcctgagggcctggagaaggagggcccccccaggaagaagccaggcctggccagcttccggctgagcggcctgaagtcctgggaccgggcccccaccttcctgcgggagctgagtgatgaaacagtggtgctgggccagagcgtgaccctggcctgccaggtgtctgcccagcctgctgcccaggccacctggagcaaggatggagcccccctggagagcagcagccgggtgctgatcagcgccaccctgaagaacttccagctgctgaccatcctggtggtggtggccgaggacctgggcgtgtacacctgcagcgtgtccaatgccctgggcaccgtgaccaccaccggggtgctgaggaaggccgagcggcccagcagcagcccctgcccagacattggagaggtgtatgcagatggagtgctgctggtgtggaagcctgtggagagctatggccctgtgacctacatcgtgcagtgcagcctggagggcggctcctggaccaccctggccagtgacatctttgactgctgctacctgaccagcaagctgagcagaggaggcacctacaccttcagaacagcctgtgtgtccaaggccggcatgggcccctacagcagccccagcgagcaggtgctgctgggcggccccagccacctggccagcgaggaggagagccagggccgcagcgcccagcccctgcccagcaccaagacctttgccttccagacccagatccagaggggccgcttctctgtggtgcggcagtgctgggagaaggccagcggccgggccctggccgccaagatcatcccctaccaccccaaggacaagacagctgtgctgcgggagtatgaggccctgaagggcctgcggcacccccacctggcccagctgcatgctgcctacctgagccccaggcacctggtgctgatcctggagctgtgcagcggccctgagctgctgccctgcctggccgagcgggccagctacagcgagagcgaggtgaaggactacctgtggcagatgctgagcgccacccagtacctgcacaaccagcacatcctgcacctggacctgcggtctgagaacatgatcatcacagagtacaacctgctgaaggtggtggacctgggcaatgcccagagcctgagccaggagaaggtgctgcccagcgacaagttcaaggactacctggagaccatggcccctgagctgctggagggccagggcgctgtgccccagacagacatctgggccatcggcgtgacagccttcatcatgctgtctgctgagtaccctgtgtcctctgagggcgcccgggacctgcagaggggcctgaggaagggcctggtgcggctgagccgctgctacgccggcctgagcggcggcgctgtggccttcctgcggagcaccctgtgtgcccagccctggggccggccctgtgccagcagctgcctgcagtgcccctggctgacagaggagggccctgcctgcagcaggcctgcccctgtgaccttccccacagcccggctgcgggtgtttgtgaggaaccgggagaagaggcgggccctgctgtacaagaggcacaacctggcccaggtgaggtag

SEQ ID NO: 19624 - DNA, 11220 bp, synthetic construct
  source 1..11220: mol_type = other DNA; note = Synthetic coding sequence
atgctggtgatccggggggccagcctgaaggatgctggggagtacacctgtgaggtggaggccagcaagagcacagccagcctgcacgtggaggagaaggccaactgcttcacagaggagctgaccaacctgcaggtggaggagaagggcacagctgtgttcacctgcaagacagagcaccctgctgccaccgtgacctggaggaagggcctgctggagctgcgggccagcggcaagcaccagcccagccaggagggcctgaccctgcggctgaccatcagcgccctggagaaggctgacagcgacacctacacctgtgacatcggccaggcccagagccgggcccagctgctggtgcagggccggcgggtgcacatcatcgaggacctggaggatgtggatgtgcaggagggcagcagcgccaccttccgctgccgcatcagccctgccaactatgagcctgtgcactggttcctggacaagacccccctgcacgccaatgagctgaatgaaattgatgcccagcccggcggctaccacgtgctgaccctgcggcagctggccctgaaggacagcggcaccatctactttgaagctggggaccagagggccagcgctgccctgcgggtgacagagaagcccagcgtcttcagccgggagctgacagatgccaccatcacagaaggagaggacctgaccctggtgtgtgagaccagcacctgtgacatccctgtgtgctggaccaaggatggcaagaccctgcggggcagcgcccgctgccagctgagccatgagggccaccgggcccagctgctgatcaccggggccaccctgcaggacagcggccgctacaagtgtgaggccggcggggcctgcagcagcagcatcgtgcgggtgcacgcccggcctgtgcgcttccaggaggccctgaaggacctggaggtgctggagggcggggccgccaccctgcgctgtgtgctgagctctgtggccgcccctgtgaagtggtgctacggcaacaacgtgctgcggcctggggacaagtacagcctgcggcaggagggcgccatgctggagctggtggtgaggaacctgcggccccaggacagcggccgctacagctgcagctttggagaccagaccaccagcgccaccctgactgtgacagccctgcctgcccagttcatcggcaagctgaggaacaaggaggccacagaaggagccacagccaccctgcgctgtgagctgagcaaggccgcccctgtggagtggaggaagggcagcgagaccctgagagatggagaccgctactgcctgcggcaggatggagccatgtgtgagctgcagatccggggcctggccatggtggatgctgctgagtacagctgtgtgtgtggggaggagaggaccagcgccagcctgaccatccggcccatgcctgcccacttcatcggccgcctgcggcaccaggagagcattgaaggagccacagccaccctgcgctgtgagctgagcaaggccgcccctgtggagtggaggaagggccgggagagcctgagagatggagacagacacagcctgcggcaggatggagctgtgtgtgagctgcagatctgtggcctggccgtggctgatgctggggagtacagctgtgtgtgtggggaggagaggaccagcgccaccctgactgtgaaggccctgcctgccaagttcacagagggcctgagaaatgaggaggccgtggagggcgccacagccatgctgtggtgtgagctgagcaaggtggcccctgtggagtggaggaagggccctgagaacctgagagatggagaccgctacatcctgcggcaggagggcacccgctgtgagctgcagatctgtggcctggccatggctgatgctggggagtacctgtgtgtgtgtggccaggagaggaccagcgccaccctgaccatccgggccctgcctgcccgcttcattgaagatgtgaagaaccaggaggcccgggagggcgccacagctgtgctgcagtgtgagctgaacagcgctgcccctgtggagtggaggaagggcagcgagaccctgagagatggagaccgctacagcctgcggcaggacggcaccaagtgtgagctgcagatccggggcctggccatggctgacaccggggagtacagctgtgtgtgtggccaggagaggaccagcgccatgctgactgtgcgggccctgcccatcaagttcacagagggcctgagaaatgaggaggccacagaaggagccacagctgtgctgcgctgtgagctgagcaagatggcccctgtggagtggtggaagggccacgagaccctgagagatggagacagacacagcctgcggcaggatggagcccgctgtgagctgcagatccggggcctggtggccgaggatgctggggagtacctgtgcatgtgtgggaaggagaggaccagcgccatgctgactgtgcgggccatgcccagcaagttcatcgagggcctgagaaatgaggaggccacagaaggagacacagccaccctgtggtgtgagctgagcaaggccgcccctgtggagtggaggaagggccacgagaccctgagagatggagacagacacagcctgcggcaggacggcagccgctgtgagctgcagatccggggcctggccgtggtggatgctggggagtacagctgtgtgtgtggccaggagaggaccagcgccaccctgactgtgcgggccctgcctgcccgcttcattgaagatgtgaagaaccaggaggcccgggagggcgccacagctgtgctgcagtgtgagctgagcaaggccgcccctgtggagtggaggaagggcagcgagaccctgcggggcggggaccgctacagcctgcggcaggacggcacccgctgtgagctgcagatccacggcctgtctgtggccgacaccggggagtacagctgtgtgtgtggccaggagaggaccagcgccaccctgactgtgcgggccccccagcctgtgttccgggagcccctgcagagcctgcaggccgaggagggcagcacagccaccctgcagtgtgagctgtctgagcccacagccaccgtggtgtggagcaaaggaggcctgcagctgcaggccaatggaagaagagagccccggctgcagggctgcacagctgagctggtgctgcaggacctgcagagagaagatactggagagtacacctgcacctgtggcagccaggccaccagcgccaccctgactgtgacagctgcccctgtgcgcttcctgcgggagctgcagcaccaggaggtggatgagggcggcacagcccacctgtgctgtgagctgagccgggccggggcctctgtggagtggaggaagggcagcctgcagctgttcccctgtgccaagtaccagatggtgcaggatggagctgctgctgagctgctggtgcggggcgtggagcaggaggatgctggggactacacctgtgacaccggccacacccagagcatggccagcctgtctgtgcgggtgccccggcccaagttcaagacccggctgcagagcctggagcaggagaccggggacatcgcccggctgtgctgccagctgagtgatgctgagagcggggctgtggtgcagtggctgaaggagggcgtggagctgcacgccggccccaagtatgagatgaggagccagggcgccacccgggagctgctgatccaccagctggaggccaaggacacaggagaatatgcctgtgtgactggaggccagaagacagctgccagcctgcgggtgacagagcctgaggtgaccatcgtgcggggcctggtggatgctgaggtgacagcagatgaagatgtggagttcagctgtgaggtgtcccgggccggggccactggagtgcagtggtgcctgcagggcctgcccctgcagagcaatgaggtgacagaggtggccgtgagagatggccgcatccacaccctgcggctgaagggcgtgaccccagaagatgctggcaccgtgtccttccacctgggcaaccacgccagcagcgcccagctgactgtgcgggcccctgaggtgaccatcctggagcccctgcaggatgtgcagctgtctgagggccaggatgccagcttccagtgccgcctgagccgggccagcggccaggaggcccgctgggccctgggcggcgtgcccctgcaggccaatgagatgaatgacatcaccgtggagcagggcaccctgcacctgctgaccctgcacaaggtgaccctggaggatgctggcaccgtgtccttccacgtgggcacctgcagcagcgaggcccagctgaaggtgacagccaagaacacagtggtgcggggcctggagaatgtggaggccctggagggcggggaggccctgtttgagtgccagctgagccagcctgaggtggccgcccacacctggctgctggatgatgagcctgtgcacaccagtgaaaatgctgaggtggtgttctttgaaaatggcctgcggcacctgctgctgctgaagaacctgcggccccaggacagctgccgggtgaccttcctggccggggacatggtgaccagcgccttcctgactgtgcggggctggaggctggagatcctggagcccctgaagaatgctgctgtgcgggccggggcccaggcctgcttcacctgcaccctgtctgaggccgtgcctgtgggggaggcctcctggtacatcaacggggctgctgtgcagccagatgacagcgactggacagtgacagcagatggcagccaccacgccctgctgctgcggagcgcccagccccaccacgccggggaggtgacctttgcctgcagagatgctgtggccagcgcccggctgactgtgctgggcctgcctgaccccccagaagatgctgaggtggtggcccggagcagccacacagtgaccctgtcctgggccgcccccatgtctgatggcggcggcggcctgtgtggctacagagtggaggtgaaggagggcgccaccggccagtggaggctgtgccacgagctggtgcccggcccagaatgtgtggtggatggcctggcccctggagagacctaccgcttccgggtggccgctgtgggccctgtgggcgctggggagcctgtgcacctgccccagacagtgcggctggccgagccccccaagcctgtgcccccccagcccagcgcccctgagagccggcaggtggccgccggggaggatgtgtccctggagctggaggtggtggccgaggccggggaggtgatctggcacaagggcatggagcgcatccagcccggcggccgctttgaggtggtgtcccagggccggcagcagatgctggtgatcaagggcttcaccgctgaggaccagggcgagtaccactgcggcctggcccagggcagcatctgcccagctgctgccaccttccaggtggccctgagccctgcctctgtggatgaggccccccagcccagcctgcccccagaggccgcccaggagggggacctgcacctgctgtgggaggccctggccaggaagaggaggatgagccgggagcccaccctggacagcatcagcgagctgcctgaagaagatggccgcagccagaggctgccccaggaggccgaggaggtggccccagacctgtctgagggctacagcacagcagatgagctggccaggactggagatgctgacctgagccacaccagcagtgatgatgagagccgggccggcacccccagcctggtgacctacctgaagaaggccggccggcccggcaccagccccctggccagcaaggtgggcgccccagctgcccccagcgtgaagccccagcagcagcaggagcccctggccgctgtgcggccccccctgggggacctgagcaccaaggacctgggggaccccagcatggacaaggctgctgtgaagatccaggccgccttcaagggctacaaggtgaggaaggagatgaagcagcaggagggccccatgttcagccacacctttggagacacagaggcccaggtgggagatgccctgcggctggagtgtgtggtggccagcaaggcagatgtgcgggcccgctggctgaaggatggagtggagctgacagatggccgccaccaccacatcgaccagctgggagatggcacctgcagcctgctgatcaccggcctggacagagcagatgctggctgctacacctgccaggtgagcaacaagtttggccaggtgacccacagcgcctgtgtggtggtgtctggcagcgagagcgaggccgagagcagcagcggcggggagctggatgatgccttcagaagagctgcccggcggctgcacaggctcttccgcaccaagagccctgctgaggtgtctgatgaggagctgttcctgtctgcagatgagggccctgctgagcctgaggagcctgctgactggcagacctaccgggaggatgagcacttcatctgcatccgctttgaggccctgacagaggcccggcaggccgtgacccgcttccaggagatgtttgccaccctgggcattggagtggagatcaagctggtggagcagggccccaggagagtggagatgtgcatcagcaaggagaccccagcccctgtggtgcccccagagcccctgcccagcctgctgaccagtgatgctgcccctgtgttcctgacagagctgcagaaccaggaggtgcaggacggctaccctgtgtcctttgactgtgtggtgacaggccagcccatgcccagcgtgcgctggttcaaggatggcaagctgctggaggaggatgaccactacatgatcaatgaagaccagcagggcggccaccagctgatcatcacagctgtggtgcctgctgacatgggcgtgtaccgctgcctggctgaaaattccatgggcgtgagcagcaccaaggccgagctgcgggtggacctgaccagcacagattatgacacagctgctgatgccacagagagcagcagctacttcagcgcccagggctacctgagcagccgggagcaggagggcacagagagcaccacagatgagggccagctgccccaggtggtggaggagctgcgggacctgcaggtggcccctggcacccggctggccaagttccagctgaaggtgaagggctacccagccccccggctgtactggttcaaggatggccagcccctgacagccagcgcccacatccgcatgacagacaagaagatcctgcacaccctggagatcatctctgtgaccagagaagattctggccagtatgctgcctacatcagcaatgccatgggcgccgcctacagcagcgcccggctgctggtgcggggcccagatgagcctgaggagaagccagccagtgatgtgcatgagcagctggtgccccccaggatgctggagcgcttcacccccaagaaggtgaagaagggcagcagcatcaccttctctgtgaaggtggagggccggcctgtgcccaccgtgcactggctgcgggaggaggccgagcggggcgtgctgtggattggaccagacaccccaggctacacagtggccagcagcgcccagcagcacagcctggtgctgctggatgtgggccggcagcaccagggcacctacacctgcatcgccagcaatgctgctggccaggccctgtgcagcgccagcctgcacgtgtctggcctgcccaaggtggaggagcaggagaaggtgaaggaggccctgatcagcaccttcctgcagggcaccacccaggccatcagcgcccagggcctggagacagccagctttgctgacctgggcggccagaggaaggaggagcccctggccgccaaggaggccctgggccacctgagcctggccgaggtgggcacagaggagttcctgcagaagctgaccagccagatcacagagatggtgtctgccaagatcacccaggccaagctgcaggtgcctggaggagacagtgatgaggacagcaagacccccagcgccagccccaggcatggccgcagccggcccagcagcagcatccaggagagcagcagcgagagtgaagatggagatgcccggggggagatctttgacatctacgtggtgacagctgactacctgcccctgggcgctgagcaggatgccatcaccctgcgggagggccagtatgtggaggtgctggatgctgcccaccccctgcgctggctggtgaggaccaagcccaccaagagcagccccagccggcagggctgggtgtccccagcctacctggaccggcggctgaagctgagccctgagtggggcgctgctgaggcccctgagttccctggagaggccgtgtctgaagatgagtacaaggcccggctgagcagcgtcatccaggagctgctgagcagcgagcaggcctttgtggaggagctgcagttcctgcagagccaccacctgcagcacctggagcgctgcccccacgtgcccatcgctgtggccggccagaaggctgtgatcttcagaaatgtgcgggacatcggccgcttccacagcagcttcctgcaggagctgcagcagtgtgacacagatgatgatgtggccatgtgcttcatcaagaaccaggccgcctttgagcagtacctggagttcctggtgggccgggtgcaggccgagagcgtggtggtgtccacagccatccaggagttctacaagaagtatgcagaggaggccctgctggccggggaccccagccagcccccacctccacccctgcagcactacctggagcagcctgtggagcgggtgcagcgctaccaggccctgctgaaggagctgatccggaacaaggccaggaaccggcagaactgtgccctgctggagcaggcctatgctgtggtgtctgccctgccccagagagctgagaacaagctgcacgtgtccctgatggagaactacccaggcaccctgcaggccctgggggagcccatccggcagggccacttcatcgtgtgggagggcgcccctggggccaggatgccctggaagggccacaacagacatgtgttcctgttcaggaaccacctggtgatctgcaagccccggcgggacagcaggacagacacagtgtcctatgtgttcaggaacatgatgaagctgagcagcattgacctgaatgaccaggtggagggagatgaccgggcctttgaggtgtggcaggagagagaagattctgtgaggaagtacctgctgcaggccaggacagccatcatcaagagctcctgggtgaaggagatctgtggcatccagcagaggctggccctgcctgtgtggaggcccccagactttgaggaggagctggccgactgcacagctgagctgggggagaccgtgaagctggcctgccgggtgacaggcacccccaagcctgtgatctcctggtacaaggatggcaaggctgtgcaggtggacccccaccacatcctgattgaagatcctgatggcagctgtgccctgatcctggacagcctgactggagtggacagcggccagtacatgtgctttgctgccagcgctgctggcaactgcagcaccctgggcaagatcctggtgcaggtgccccccaggtttgtgaacaaggtgcgggccagcccctttgtggagggggaggatgcccagttcacctgcaccatcgagggcgccccctacccccagatccgctggtacaaggatggagccctgctgaccactggaaacaagttccagaccctgtctgagcccaggagcggcctgctggtgctggtgatccgggccgccagcaaggaggacctgggcctgtatgaatgtgagctggtgaaccggctgggcagcgcccgggccagcgctgagctgcgcatccagagccccatgctgcaggcccaggagcagtgccaccgggagcagctggtggccgctgtggaggtgacagagcaggagaccaaggtgcccaagaagacagtcatcatcgaggagaccatcaccaccgtggtgaagagcccccggggccagaggaggagccccagcaagagccccagccgcagccccagccgctgcagcgccagccccctgcggcccggcctgctggccccagacctgctgtacctgcctggagctggccagcccaggaggcctgaggccgagcccggccagaagcctgtggtgcccaccctgtatgtgacagaagctgaggcccacagccctgccctgcccggcctgagcggcccccagcccaagtgggtggaggtggaggagaccatcgaggtgcgggtgaagaagatgggcccccagggcgtgagccccaccacagaggtgcccaggagcagcagcggccacctgttcaccctgcccggggccaccccaggaggagaccccaacagcaacaacagcaacaacaagctgctggcccaggaggcctgggcccagggcacagccatggtgggcgtgcgggagcccctggtgttccgggtggatgcccggggctctgtggactgggccgccagcggcatgggcagcctggaggaggagggcaccatggaggaggccggggaggaggagggggaggatggagatgcctttgtgacagaggagagccaggacacccacagcctgggggaccgggaccccaagatcctgacccacaatggaaggatgctgaccctggccgacctggaggactatgtgcctggagagggggagaccttccactgcggcggccctggccctggggccccagatgaccccccctgtgaggtgtctgtcatccagcgggagattggagagcccaccgtgggccagcctgtgctgctgtctgtgggccacgccctgggcccccggggccccctgggcctcttccggcctgagcccaggggggccagccccccaggcccccaggtgcgcagcctggagggcaccagcttcctgctgcgggaggccccagcccggcctgtgggcagcgccccctggacccagagcttctgcacccgcatcagaagatctgctgacagcggccagagcagcttcaccacagagctgagcacccagacagtgaactttggcaccgtgggggagaccgtgaccctgcacatctgcccagacagagatggagatgaggccgcccagccctag

SEQ ID NO: 19625 - DNA, 1071 bp, synthetic construct
  source 1..1071: mol_type = other DNA; note = Synthetic coding sequence
atggccacagctgccctgctgcggggggccaccccaggccggggcggccctgtgtggcgctggaggctgcgggccgccccccgctgccgcctggcccacagcagctgcagccctggaggagaccccacagctggggccgcctgggcctgcttccggctggatggccgcaccctgctgcgggtgcggggcccagatgctgcccccttcctgctgggcctgctgaccaatgagctgcccctgcccagccctgctgctgctggggcccctcctgctgcccgggccggctacgcccacttcctgaatgtgcagggccgcaccctgtatgatgtgatcctgtatggcctgcaggagcacagcgaggtgtctggcttcctgctggagtgtgacagctctgtgcagggcgccctgcagaagcacctggccctgtaccgcatccggaggaaggtgacagtggagccccaccctgagctgcgggtgtgggccgtgctgcccagcagccctgaggcctgtggggccgccagcctgcaggagagagctggagctgctgccatcctgatccgggaccccaggacagccaggatgggctggaggctgctgacccaggatgagggccctgccctggtgcctgggggccgcctgggggacctgtgggactaccaccagcaccgctacctgcagggcgtgcctgagggcgtgcgggacctgcccccaggagtggccctgcccctggagagcaacctggccttcatgaatggagtgtccttcaccaagggctgctacatcggccaggagctgacagcccggacccaccacatgggcgtcatcaggaagaggctcttccctgtgcgcttcctggaccccctgcccaccagcggcatcacccctggggccaccgtgctgacagccagcggccagacagtgggcaagttccgggccggccagggcaatgtgggcctggccctgctgtggagcgagaagatcaagggccccctgcacatccgggccagcgagggcgcccaggtggccctggccgcctctgtgcctgactggtggcccaccgtgtccaagtag

SEQ ID NO: 19626 - DNA, 1395 bp, synthetic construct
  source 1..1395: mol_type = other DNA; note = Synthetic coding sequence
atgagagctgcccggcggggcctgcactgtgccggggctgagcggccccggcggcggggccgcctgtgggacagcagcggcgtgccccagaggcagaagaggcctggcccctggaggacccagacccaggagcagatgagcagagatgtgtgcatccacacctggccctgcacctactacctggagcccaagaggcgctgggtgacaggccagctgagcctgaccagcctgagcctgcgcttcatgacagacagcactggagagatcctggtgtccttccccctgagcagcatcgtggagatcaagaaggaggccagccacttcatcttcagcagcatcaccatcctggagaagggccacgccaagcactggttcagcagcctgcggcccagcagaaatgtggtgttcagcatcatcgagcacttctggagggagctgctgctgagccagcctggagctgtggctgatgcctctgtgcccaggaccagaggagaggagctgaccggcctgatggccggcagccagaagaggctggaggacacagcccgggtgctgcaccaccagggccagcagctggacagcgtgatgaggggcctggacaagatggagagtgacctggaggtggccgaccggctgctgacagagctggagagccctgcctggtggcccttcagcagcaagctgtggaagaccccacctgagaccaagcccagagaagatgtgtccatgaccagctgtgagccctttgggaaggagggcatcctgatcaagatcccagctgtgatcagccacaggacagagagccacgtgaagccaggccgcctgactgtgctggtgtctggcctggagatccatgacagcagcagcctgctgatgcacagatttgagcgggaggatgtggatgacatcaaggtgcacagcccctatgagatcagcatccggcagcgcttcatcggcaagccagacatggcctaccgcctcatcagcgccaagatgcctgaggtgatccccatcctggaggtgcagttcagcaagaagatggagctgctggaggatgccctggtgctgcggagcgcccggaccagcagccctgctgagaagagctgcagcgtgtggcacgccgccagcggcctgatgggccgcaccctgcaccgggagcccccagctggggaccaggagggcacagccctgcacctgcagaccagcctgcctgccctgtctgaggccgacacccaggagctgacccagatcctgcggaggatgaagggcctggccctggaggccgagagcgagctggagcggcaggatgaggccctggatggagtggccgctgctgtggaccgggccaccctgaccatcgacaagcacaacagaaggatgaagaggctgacctag

SEQ ID NO: 19627 - DNA, 669 bp, synthetic construct
  source 1..669: mol_type = other DNA; note = Synthetic coding sequence
atgaccagctgtgagccctttgggaaggagggcatcctgatcaagatcccagctgtgatcagccacaggacagagagccacgtgaagccaggccgcctgactgtgctggtgtctggcctggagatccatgacagcagcagcctgctgatgcacagatttgagcgggaggatgtggatgacatcaaggtgcacagcccctatgagatcagcatccggcagcgcttcatcggcaagccagacatggcctaccgcctcatcagcgccaagatgcctgaggtgatccccatcctggaggtgcagttcagcaagaagatggagctgctggaggatgccctggtgctgcggagcgcccggaccagcagccctgctgagaagagctgcagcgtgtggcacgccgccagcggcctgatgggccgcaccctgcaccgggagcccccagctggggaccaggagggcacagccctgcacctgcagaccagcctgcctgccctgtctgaggccgacacccaggagctgacccagatcctgcggaggatgaagggcctggccctggaggccgagagcgagctggagcggcaggatgaggccctggatggagtggccgctgctgtggaccgggccaccctgaccatcgacaagcacaacagaaggatgaagaggctgacctag

SEQ ID NO: 19628 - DNA, 201 bp, synthetic construct
  source 1..201: mol_type = other DNA; note = Synthetic coding sequence
atgccccagtaccagacctgggaggagttcagcagagctgctgagaagctgtacctggccgaccccatgaaggcccgggtggtgctgaagtaccgccacagtgatggcaacctgtgtgtgaaggtgacagatgacctggtgcagtggcacctgaactactgcaccctgcggcacggcattgctgggggcctggagacctag

SEQ ID NO: 19629 - DNA, 249 bp, synthetic construct
  source 1..249: mol_type = other DNA; note = Synthetic coding sequence
atgccccagtaccagacctgggaggagttcagcagagctgctgagaagctgtacctggccgaccccatgaaggcccgggtggtgctgaagtaccgccacagtgatggcaacctgtgtgtgaaggtgacagatgacctggtgcggcagtgcctggccctgctgctgcggctgcagtgcagcggcatgatcatcgcccactgcatcctggacctgctgggcagcagcggccccctggccagcgccagctag

SEQ ID NO: 19630 - DNA, 651 bp, synthetic construct
  source 1..651: mol_type = other DNA; note = Synthetic coding sequence
atgcaggccaacggggccggcggcggcggcggcggcggcggcggcggcggcggcggcggcggcggcggcggcggccagggccagaccccagagctggcctgcctgagcgcccagaatggagagagcagccccagcagcagcagcagcgctggggacctggcccacgccaacggcctgctgcccagcgcccccagcgctgccagcaacaacagcaacagcctgaatgtgaacaacggggtgcctggaggagctgctgctgccagcagcgccaccgtggccgccgccagcgccaccacagctgccagcagcagcctggccaccccagagctgggcagcagcctgaagaagaagaagaggctgagccagagtgatgaagatgtgatccggctgattggccagcacctgaatggcctgggcctgaaccagacagtggacctgctgatgcaggagagcggctgccgcctggagcaccccagcgccaccaagttcaggaaccacgtgatggagggggactgggacaaggccgagaatgacctgaatgagctgaagcccctggtgcacagcccccacgccatcgtggcccagaccttcagcgagaccagcatcaacttcttccccctgacagctgccttctgccacgtgcggggctag

SEQ ID NO: 19631 - DNA, 2340 bp, synthetic construct; identical to SEQ ID NO: 19401
  source 1..2340: mol_type = other DNA; note = Synthetic coding sequence

SEQ ID NO: 19632 - DNA, 666 bp, synthetic construct
  source 1..666: mol_type = other DNA; note = Synthetic coding sequence
atggctgctgccagcggctctgtgctgcagcgctgcatcgtgtccccagctggccgccacagcgccagcctcatcttcctgcacggcagcggggacagcggccagggcctgaggatgtggatcaagcaggtgctgaaccaggacctgaccttccagcacatcaagatcatctaccccacagccccaccccgcttcaagatcaccaatgactgcccagagcacctggagagcattgatgtgatgtgccaggtgctgacagacctgattgatgaggaggtgaagagcggcatcaagaagaaccgcatcctgattggaggcttctccatgggcggctgcatggccatccacctggcctacagaaaccaccaggatgtggccggcgtgtttgccctgagcagcttcctgaacaaggccagcgctgtgtaccaggccctgcagaagagcaatggagtgctgcctgagctgttccagtgccacggcacagcagatgagctggtgctgcacagctgggccgaggagaccaacagcatgctgaagagcctgggcgtgaccaccaagttccacagcttccccaacgtgtaccacgagctgagcaagacagagctggacatcctgaagctgtggatcctgaccaagctgcccggggagatggagaagcagaagtag

SEQ ID NO: 19633 - DNA, 714 bp, synthetic construct
  source 1..714: mol_type = other DNA; note = Synthetic coding sequence
atggctgctgccagcggctctgtgctgcagcgctgcatcgtgtccccagctggccgccacagcgccagcctcatcttcctgcacggcagcggggacagcggccagggcctgaggatgtggatcaagcaggtgctgaaccaggacctgaccttccagcacatcaagatcatctaccccacagccccacccaggagctacacccccatgaagggcggcatcagcaatgtgtggtttgaccgcttcaagatcaccaatgactgcccagagcacctggagagcattgatgtgatgtgccaggtgctgacagacctgattgatgaggaggtgaagagcggcatcaagaagaaccgcatcctgattggaggcttctccatgggcggctgcatggccatccacctggcctacagaaaccaccaggatgtggccggcgtgtttgccctgagcagcttcctgaacaaggccagcgctgtgtaccaggccctgcagaagagcaatggagtgctgcctgagctgttccagtgccacggcacagcagatgagctggtgctgcacagctgggccgaggagaccaacagcatgctgaagagcctgggcgtgaccaccaagttccacagcttccccaacgtgtaccacgagctgagcaagacagagctggacatcctgaagctgtggatcctgaccaagctgcccggggagatggagaagcagaagtag

SEQ ID NO: 19634 - DNA, 471 bp, synthetic construct
  source 1..471: mol_type = other DNA; note = Synthetic coding sequence
atggagacagccaaggagatgacccgggagagcctgcccatcaagtgcctggaggccgtcatcctgggcatctacctgaccaacggccagcccagcattgagcgcttccccatctccttcaagacctacttcagcggcaactacttccaccacgtggtgctgggcatctactgcaatggccgctatggcagcctgggcatgagcagaagagctgagctgatggacaagcccctgaccttccgcaccctgagtgacctgatctttgattttgaagattcctacaagaagtacctgcacacagtgaagaaggtgaagattggcctgtatgtgccccatgagccccacagcttccagcccatcgagtggaagcagctggtgctgaatgtgtccaagatgctgcgggctgacatcaggaaggagctggagaagtatgcccgggacatgaggatgaagggcctgtgcagccactag

SEQ ID NO: 19635 - DNA, 936 bp, synthetic construct
  source 1..936: mol_type = other DNA; note = Synthetic coding sequence
atgacaggcagcgctgctgacacccaccgctgcccccaccccaagggggccaagggcaccaggagccgcagcagccacgcccggcctgtgtccctggccaccagcggcggcagcgaggaggaggacaaggatggcggcgtgctcttccacgtgaacaagagcggcttccccatcgacagccacacctgggagaggatgtggatgcacgtggccaaggtgcaccccaagggcggggagatggtgggcgccatcagaaatgctgccttcctggccaagcccagcatcccccaggtgcccaactaccgcctgtccatgaccatcccagactggctgcaggccatccagaactacatgaagaccctgcactacctgaccaacggccagcccagcattgagcgcttccccatctccttcaagacctacttcagcggcaactacttccaccacgtggtgctgggcatctactgcaatggccgctatggcagcctgggcatgagcagaagagctgagctgatggacaagcccctgaccttccgcaccctgagtgacctgatctttgattttgaagattcctacaagaagtacctgcacacagtgaagaaggtgaagattggcctgtatgtgccccatgagccccacagcttccagcccatcgagtggaagcagctggtgctgaatgtgtccaagatgctgcgggctgacatcaggaaggagctggagaagtatgcccgggacatgaggatgaagatcctgaagccagccagcgcccacagccccacccaggtgcgcagccggggcaagagcctgagcccccggcggcggcaggccagccccccccggcggctgggccggcgggagaagagccctgccctgcctgagaagaaggtggccgacctgagcaccctgaatgaggtgggctaccagatccgcatctag

SEQ ID NO: 19636 - DNA, 873 bp, synthetic construct
  source 1..873: mol_type = other DNA; note = Synthetic coding sequence
atgtggatgcacgtggccaaggtgcaccccaagggcggggagatggtgggcgccatcagaaatgctgccttcctggccaagcccagcatcccccaggtgcccaactaccgcctgtccatgaccatcccagactggctgcaggccatccagaactacatgaagaccctgcagtacaaccacacaggcacccagttctttgagatcaggaagatgaggcccctgagcggcctgatggagacagccaaggagatgacccgggagagcctgcccatcaagtgcctggaggccgtcatcctgggcatctacctgaccaacggccagcccagcattgagcgcttccccatctccttcaagacctacttcagcggcaactacttccaccacgtggtgctgggcatctactgcaatggccgctatggcagcctgggcatgagccggcgggcagagctgatggacaagcccctgaccttccgcaccctgagtgacctgatctttgattttgaggacagctacaagaagtacctgcacacagtgaagaaggtgaagattggcctgtatgtgccccatgagccccacagcttccagcccatcgagtggaagcagctggtgctgaatgtgtccaagatgctgcgggctgacatcaggaaggagctggagaagtatgcccgggacatgaggatgaagatcctgaagccagccagcgcccacagccccacccaggtgcgcagccggggcaagagcctgagcccccggcggcggcaggccagccccccccggcggctgggcagaagagagaagagccctgccctgcctgagaagaaggtggccgacctgagcaccctgaatgaggtgggctaccagatccgcatctag

SEQ ID NO: 19637 - DNA, 756 bp, synthetic construct
  source 1..756: mol_type = other DNA; note = Synthetic coding sequence
atgaccatcccagactggctgcaggccatccagaactacatgaagaccctgcagtacaaccacacaggcacccagttctttgagatcaggaagatgaggcccctgagcggcctgatggagacagccaaggagatgacccgggagagcctgcccatcaagtgcctggaggccgtcatcctgggcatctacctgaccaacggccagcccagcattgagcgcttccccatctccttcaagacctacttcagcggcaactacttccaccacgtggtgctgggcatctactgcaatggccgctatggcagcctgggcatgagcagaagagctgagctgatggacaagcccctgaccttccgcaccctgagtgacctgatctttgattttgaagattcctacaagaagtacctgcacacagtgaagaaggtgaagattggcctgtatgtgccccatgagccccacagcttccagcccatcgagtggaagcagctggtgctgaatgtgtccaagatgctgcgggctgacatcaggaaggagctggagaagtatgcccgggacatgaggatgaagatcctgaagccagccagcgcccacagccccacccaggtgcgcagccggggcaagagcctgagcccccggcggcggcaggccagccccccccggcggctgggccggcgggagaagagccctgccctgcctgagaagaaggtggccgacctgagcaccctgaatgaggtgggctaccagatccgcatctag

SEQ ID NO: 19638 - DNA, 873 bp, synthetic construct; identical to SEQ ID NO: 19636
  source 1..873: mol_type = other DNA; note = Synthetic coding sequence

SEQ ID NO: 19639 - DNA, 723 bp, synthetic construct
  source 1..723: mol_type = other DNA; note = Synthetic coding sequence
atggccggcagccctgagctggtggtgctggaccccccctgggacaaggagctggccgccggcacagagagccaggccctggtgtctgccaccccccgggaggacttccgggtgcgctgcaccagcaagagagctgtgacagagatgctgcagctgtgtggccgctttgtgcagaagctgggagatgccctgcctgaggagatccgggagcccgccctgagagatgcccagtggacctttgagagcgctgtgcaggagaacatcagcatcaatggccaggcctggcaggaggccagtgacaactgcttcatggacagcgacatcaaggtgctggaggaccagtttgatgagatcatcgtggacatcgccaccaagaggaagcagtaccccaggaagatcctggagtgtgtgatcaagaccatcaaggccaagcaggagatcctgagcctgcctgccctgattgagcagggcgagggcttcagccaggtgctgaggatgcagcccgtcatccacctgcagaggatccaccaggaggtgttcagcagctgccacaggaagccagatgccaagccagagaacttcatcacccagatcgagaccacccccacagaaacagccagcaggaagaccagtgacatggtgctgaagaggaagcagaccaaggactgcccccagaggaagtggtaccccctgcggcccaagaagatcaacctggacacctag

SEQ ID NO: 19640 - DNA, 519 bp, synthetic construct
  source 1..519: mol_type = other DNA; note = Synthetic coding sequence
atggccggcagccctgagctggtggtgctggaccccccctgggacaaggagctggccgccggcacagagagccaggccctggtgtctgccaccccccgggaggacttccgggtgcgctgcaccagcaagagagctgtgacagagatgctgcagctgtgtggccgctttgtgcagaagctgggagatgccctgcctgaggagatccgggagcccgccctgagagatgcccagtggacctttgagagcgctgtgcaggagaacatcagcatcaatggccaggcctggcaggaggccagtgacaactgcttcatggacagcgacatcaaggtgctggaggaccagtttgatgagatcatcgtggacatcgccaccaagaggaagcagtaccccaggaagatcctggagtgtgtgatcaagaccatcaaggccaagcaggagatcctgaagcagtaccaccctgtggtgcaccccctggacctgaagtatgaccctgaccctgtgctggcctgcatcaactag

SEQ ID NO: 19641 - DNA, 846 bp, synthetic construct
  source 1..846: mol_type = other DNA; note = Synthetic coding sequence
atggccggcagccctgagctggtggtgctggaccccccctgggacaaggagctggccgccggcacagagagccaggccctggtgtctgccaccccccgggaggacttccgggtgcgctgcaccagcaagagagctgtgacagagatgctgcagctgtgtggccgctttgtgcagaagctgggagatgccctgcctgaggagatccgggagcccgccctgagagatgcccagtggacctttgagagcgctgtgcaggagaacatcagcatcaatggccaggcctggcaggaggccagtgacaactgcttcatggacagcgacatcaaggtgctggaggaccagtttgatgagatcatcgtggacatcgccaccaagaggaagcagtaccccaggaagatcctggagtgtgtgatcaagaccatcaaggccaagcaggagatcctgaagcagtaccaccctgtggtgcaccccctggacctgaagtatgaccctgaccctgccccccacatggagaacctgaagtgccgcggggagaccgtggccaaggagatcagcgaggccatgaagagcctgcctgccctgattgagcagggcgagggcttcagccaggtgctgaggatgcagcctgtgatccacctgcagaggatccaccaggaggtgttcagcagctgccacaggaagccagatgccaagccagagaacttcatcacccagatcgagaccacccccacagaaacagccagcaggaagaccagtgacatggtgctgaagaggaagcagaccaaggactgcccccagaggaagtggtaccccctgcggcccaagaagatcaacctggacacctag

SEQ ID NO: 19642 - DNA, 228 bp, synthetic construct
  source 1..228: mol_type = other DNA; note = Synthetic coding sequence
atggacagcgacatcaaggtgctggaggaccagtttgatgagatcatcgtggacatcgccaccaagaggaagcagtaccccaggaagatcctggagtgtgtgatcaagaccatcaaggccaagcaggagatcctgaagcagtaccaccctgtggtgcaccccctggacctgaagtatgaccctgaccccggggccaagccaggcggcctggccctgggcgctgtgtag

SEQ ID NO: 19643 - DNA, 279 bp, synthetic construct
  source 1..279: mol_type = other DNA; note = Synthetic coding sequence
atggaggactaccaggccgctgaggagacagcctttgtggtggatgaggtgagcaacatcgtgaaggaggccattgaaagtgccatcggcggcaatgcctaccagcacagcaaggtgaaccagtggaccaccaacgtggtggagcagaccctgagccagctgaccaagctgggcaagcccttcaagtacatcggaaatggagtgctcttcctgctgtacctgagagatggcttcctgaccctcatccggggggccagcagcaccaggaacaacagctag

SEQ ID NO: 19644 - DNA, 204 bp, synthetic construct
  source 1..204: mol_type = other DNA; note = Synthetic coding sequence
atgcagaagaatggagctggcctgcacacagccagcagctgcttctgggacagcagcacagatggcatgatcttcatccacgtgtgtgaggtgctgctgtgtgagatctatgactggaagttccccatctttgaatgtaatgcctgcctgagccccttcaagaccttcaacaaccggctggccaaggtgctgtgtgtggcctag

SEQ ID NO: 19645 - DNA, 342 bp, synthetic construct
  source 1..342: mol_type = other DNA; note = Synthetic coding sequence
atggaggactaccaggccgctgaggagacagcctttgtggtggatgaggtgagcaacatcgtgaaggaggccattgaaagtgccatcggcggcaatgcctaccagcacagcaaggtgaaccagtggaccaccaacgtggtggagcagaccctgagccagctgaccaagctgggcaagcccttcaagtacatcgtgacctgtgtgatcatgcagaagaatggagctggcctgcacacagccagcagctgcttctgggacagcagcacagatggcagctgcaccgtgcgctgggagaacaagaccatgtactgcatcgtgtctgccttcggcctgagcatctag

SEQ ID NO: 19646 - DNA, 2037 bp, synthetic construct
  source 1..2037: mol_type = other DNA; note = Synthetic coding sequence
atgtatgctgctgtggagcacggccctgtgctgtgcagcgacagcaacatcctgtgcctgtcctggaagggccgggtgcccaagtctgagaaggagaagcctgtgtgcagaagacgctactatgaggagggctggctggccactggaaatggccggggcgtggtgggcgtgaccttcaccagcagccactgcagaagagacaggagcaccccccagaggatcaacttcaacctgcggggccacaacagcgaggtggtgctggtgcgctggaatgagccctaccagaagctggccacctgtgatgctgatggcggcatctttgtgtggatccagtatgagggccgctggagcgtggagctggtgaatgacagaggagcccaggtgtctgacttcacctggagccatgatggcacccaggccctgatctcctacagagatggctttgtgctggtgggctctgtgtctggccagaggcactggagcagcgagatcaacctggagagccagatcacctgtggcatctggaccccagatgaccagcaggtgctgtttggaacagcagatggccaggtgattgtgatggactgccacggccgcatgctggcccacgtgctgctgcatgaaagtgatggagtgctgggcatgtcctggaactaccccatcttcctggtggaggacagcagcgagagtgacacagacagtgatgattatgccccaccccaggacggccctgctgcctaccccatccctgtgcagaacatcaagcccctgctgactgtgtccttcaccagcggggacatcagcctgatgaacaactatgatgacctgagccccaccgtcatccgcagcggcctgaaggaggtggtggcccagtggtgcacccagggcgacctgctggccgtggccggcatggagcggcagacccagctgggggagctgcccaacggccccctgctgaagagcgccatggtgaagttctacaacgtgcggggggagcacatcttcaccctggacaccctggtgcagaggcccatcatcagcatctgctggggccaccgggacagccggctgctgatggccagcggccctgccctgtatgtggtgcgggtggagcaccgggtgagcagcctgcagctgctgtgccagcaggccatcgccagcaccctgcgggaggacaaggatgtgtccaagctgaccctgcccccccggctgtgcagctacctgagcacagccttcatccccaccatcaagccacccatcccagaccccaacaacatgagggactttgtgtcctaccccagcgctggaaatgaaaggctgcactgcaccatgaagaggacagaagatgatcctgaggtgggcggcccctgctacaccctgtacctggagtacctgggcggcctggtgcccatcctgaagggccgccgcatcagcaagctgcggcctgagtttgtgatcatggaccccaggacagacagcaagccagatgagatctacggcaacagcctcatcagcaccgtcatcgacagctgcaactgcagcgacagcagtgacatcgagctgagtgatgactgggccgccaagaagagccccaagatcagccgggccagcaagagccccaagctgccccgcatcagcattgaggccaggaagagccccaagctgccccgggccgcccaggagctgagccgcagcccccggctgcccctgaggaagcccagcgtgggcagccccagcctgacccggcgggagttcccctttgaggacatcacccagcacaactacctggcccaggtgaccagcaacatctggggcaccaagttcaagatcgtgggcctggccgccttcctgcccaccaacctgggcgctgtgatctacaagaccagcctgctgcacctgcagccccggcagatgaccatctacctgcctgaggtgaggaagatctccatggactacatcaacctgcccgtcttcaaccccaacgtgttttctgaagatgaagatgacctgcctggagatgctgtgtggacagactag

SEQ ID NO: 19647 - DNA, 4632 bp, synthetic construct
  source 1..4632: mol_type = other DNA; note = Synthetic coding sequence
atgtatgctgctgtggagcacggccctgtgctgtgcagcgacagcaacatcctgtgcctgtcctggaagggccgggtgcccaagtctgagaaggagaagcctgtgtgcagaagacgctactatgaggagggctggctggccactggaaatggccggggcgtggtgggcgtgaccttcaccagcagccactgcagaagagacaggagcaccccccagaggatcaacttcaacctgcggggccacaacagcgaggtggtgctggtgcgctggaatgagccctaccagaagctggccacctgtgatgctgatggcggcatctttgtgtggatccagtatgagggccgctggagcgtggagctggtgaatgacagaggagcccaggtgtctgacttcacctggagccatgatggcacccaggccctgatctcctacagagatggctttgtgctggtgggctctgtgtctggccagaggcactggagcagcgagatcaacctggagagccagatcacctgtggcatctggaccccagatgaccagcaggtgctgtttggaacagcagatggccaggtgattgtgatggactgccacggccgcatgctggcccacgtgctgctgcatgaaagtgatggagtgctgggcatgtcctggaactaccccatcttcctggtggaggacagcagcgagagtgacacagacagtgatgattatgccccaccccaggacggccctgctgcctaccccatccctgtgcagaacatcaagcccctgctgactgtgtccttcaccagcggggacatcagcctgatgaacaactatgatgacctgagccccaccgtcatccgcagcggcctgaaggaggtggtggcccagtggtgcacccagggcgacctgctggccgtggccggcatggagcggcagacccagctgggggagctgcccaacggccccctgctgaagagcgccatggtgaagttctacaacgtgcggggggagcacatcttcaccctggacaccctggtgcagaggcccatcatcagcatctgctggggccaccgggacagccggctgctgatggccagcggccctgccctgtatgtggtgcgggtggagcaccgggtgagcagcctgcagctgctgtgccagcaggccatcgccagcaccctgcgggaggacaaggatgtgtccaagctgaccctgcccccccggctgtgcagctacctgagcacagccttcatccccaccatcaagccacccatcccagaccccaacaacatgagggactttgtgtcctaccccagcgctggaaatgaaaggctgcactgcaccatgaagaggacagaagatgatcctgaggtgggcggcccctgctacaccctgtacctggagtacctgggcggcctggtgcccatcctgaagggccgccgcatcagcaagctgcggcctgagtttgtgatcatggaccccaggacagacagcaagccagatgagatctacggcaacagcctcatcagcaccgtcatcgacagctgcaactgcagcgacagcagtgacatcgagctgagtgatgactgggccgccaagaagagccccaagatcagccgggccagcaagagccccaagctgccccgcatcagcattgaggccaggaagagccccaagctgccccgggccgcccaggagctgagccgcagcccccggctgcccctgaggaagcccagcgtgggcagccccagcctgacccggcgggagttcccctttgaggacatcacccagcacaactacctggcccaggtgaccagcaacatctggggcaccaagttcaagatcgtgggcctggccgccttcctgcccaccaacctgggcgctgtgatctacaagaccagcctgctgcacctgcagccccggcagatgaccatctacctgcctgaggtgaggaagatctccatggactacatcaacctgcccgtcttcaaccccaacgtgttttctgaagatgaagatgacctgcctgtgactggagccagcggcgtgcctgagaacagccccccctgcaccgtgaacatccccatcgcccccatccacagcagcgcccaggccatgagccccacccagagcatcggcctggtgcagagcctgctggccaaccagaatgtgcagctggatgtgctgaccaaccagaccacagctgtgggcacagctgagcacgccggggacagcgccacccagtaccctgtgagcaaccgctacagcaaccctggccaggtgatcttcggctctgtggagatgggccgcatcatccagaaccccccacccctgagcctgcccccaccaccccagggccccatgcagctgagcacagtgggccacggggaccgggaccacgagcacctgcagaagagcgccaaggccctgcggcccaccccccagctggccgcagaaggagatgctgtggtgttttctgccccccaggaggtgcaggtgaccaagatcaaccccccaccaccctacccaggcaccatcccagctgcccccaccacagctgcccctcctccacccctgcccccaccccagccccctgtggatgtgtgcctgaagaagggggacttcagcctgtaccccacctctgtgcactaccagacccccctgggctatgagcgcatcaccacctttgacagcagtggaaatgtggaggaggtgtgccggcccaggaccaggatgctgtgcagccagaacacctacaccctgcccggccctggcagcagcgccaccctgcggctgacagccacagagaagaaggtgccccagccctgcagcagcgccaccctgaaccggctgactgtgccccgctacagcatccccactggagaccccccaccctacccagagatcgccagccagctggcccagggccgcggggccgcccagaggagtgacaacagcctcatccacgccaccctgcggaggaacaaccgggaggccaccctgaagatggcccagctggccgacagcccccgggcccccctgcagcccctggccaagagcaagggcggccctggaggagtggtgacccagctgcctgcccggcccccaccagccctgtacacctgcagccagtgcagcggcaccggccccagcagccagcccggggccagcctggcccacacagccagcgccagccccctggccagccagagcagctacagcctgctgagccccccagacagcgcccgggacagaacagattatgtgaacagcgccttcacagaagatgaggccctgagccagcactgccagctggagaagcccctgcggcacccccccctgcctgaggccgctgtgaccctgaagaggcccccaccctaccagtgggaccccatgctgggggaggatgtgtgggtgccccaggagaggacagcccagaccagcggccccaaccccctgaagctgagcagcctgatgctgagccagggccagcacctggatgtgtcccggctgcccttcatcagccccaagagccctgccagccccacagccaccttccagacaggctacggcatgggcgtgccctacccaggcagctacaacaacccccccctgcccggggtgcaggccccctgcagccccaaggatgccctgagccccacccagtttgcccagcaggagcctgctgtggtgctgcagcccctgtacccacccagcctgagctactgcaccctgccccccatgtacccaggcagcagcacctgcagcagcctgcagctgccccctgtggccctgcacccctggagcagctacagcgcctgcccccccatgcagaacccccagggcaccctgccccccaagccccacctggtggtggagaagcccctggtgagccccccacctgctgacctgcagagccacctgggcacagaggtgatggtggagacagctgacaacttccaggaggtgctgagcctgacagagagccctgtgccccagaggacagagaagtttgggaagaagaacaggaagaggctggacagcagagctgaggagggctctgtgcaggccatcacagagggcaaggtgaagaaggaggcccggaccctgagtgacttcaacagcctcatcagcagcccccacctgggccgggagaagaagaaggtgaagagccagaaggaccagctgaagagcaagaagctgaacaagaccaatgagttccaggacagcagcgagagcgagcctgagctgttcatctctggagatgagctgatgaaccagagccagggcagcaggaagggctggaagagcaagaggagccccagggctgctggggagctggaggaggccaagtgccggcgggccagcgagaaggaggatggccgcctgggcagccagggctttgtgtatgtgatggccaacaagcagcccctgtggaatgaggccacccaggtgtaccagctggactttggaggccgggtgacccaggagagcgccaagaacttccagatcgagctggagggccggcaggtgatgcagtttggaagaattgatggcagcgcctacatcctggacttccagtaccccttctctgctgtgcaggcctttgctgtggccctggccaacgtgacccagaggctgaagtag

SEQ ID NO: 19648 - DNA, 3234 bp, synthetic construct
  source 1..3234: mol_type = other DNA; note = Synthetic coding sequence
atggacagcaagatgaagaagatggccgagctgcagctgtctgtggtgtctgaccccaagaacaggaaggccatcgagaaccagatccagcagtgggagcagaacctggagaagttccacatggacctcttcaggatgcgctgctacctggccagcctgcagggcggggagctgcccaaccccaagagcctgctggccgccgccagccggcccagcaagctggccctgggccgcctgggcatcctgtctgtgagcagcttccacgccctggtgtgcagcagagatgattctgccctgaggaagaggaccctgagcctgacccagagaggaagaaacaagaagggcatcttcagcagcctgaagggcctggacaccctggccaggaagggcaaggagaagaggcccagcatcacccagatctttgacagcagcggcagccacggcttcagcggcacccagctgccccagaacagcagcaacagcagcgaggtggatgagctgctgcacatctacggcagcacagtggatggagtgccccgggacaatgcctgggagatccagacctacgtgcacttccaggacaaccacggcgtgacagtgggcatcaagccagagcaccgggtggaggacatcctgaccctggcctgcaagatgaggcagctggagcccagccactacggcctgcagctgaggaagctggtggatgacaacgtggagtactgcatcccagccccctatgagtacatgcagcagcaggtgtatgatgaaattgaggtgttccccctgaatgtgtatgatgtgcagctgaccaagacaggctctgtgtgtgactttggatttgctgtgacagcccaggtggatgagcggcagcacctgagccgcatcttcatcagtgatgtgctgcctgatggcctggcctatggagagggcctgaggaaaggaaatgagatcatgaccctgaatggagaggccgtgtctgacctggacctgaagcagatggaggccctcttcagcgagaagtctgtgggcctgaccctgattgcccggcccccagacaccaaggccaccctgtgcacctcctggagcgacagcgacctcttcagccgggaccagaagagcctgctgcccccacccaaccagagccagctgctggaggagttcctggacaacttcaagaagaacacagccaatgacttcagcaatgtgcctgacatcaccaccggcctgaagaggagccagacagatggcaccctggaccaggtgagccaccgggagaagatggagcagaccttccgctctgctgagcagatcacagccctgtgccgctccttcaatgacagccaggccaacggcatggagggcccccgggagaaccaggaccccccacccaggagcctggcccggcacctgagtgatgctgaccggctgaggaaggtgatccaggagctggtggacacagagaagagctatgtgaaggacctgagctgcctgtttgagctgtacctggagcccctgcagaatgagaccttcctgacccaggatgagatggagagcctgtttggcagcctgcctgagatgctggagttccagaaggtgttcctggagaccctggaggatggcatcagcgccagcagtgacttcaacaccctggagacccccagccagttcaggaagctgctcttcagcctgggcggcagcttcctgtactatgctgaccacttcaagctgtacagcggcttctgtgccaaccacatcaaggtgcagaaggtgctggagcgggccaagacagacaaggccttcaaggccttcctggatgccaggaaccccaccaagcagcacagcagcaccctggagagctacctgatcaagcctgtgcagagggtgctgaagtaccccctgctgctgaaggagctggtgtccctgacagaccaggagagcgaggagcactaccacctgacagaggccctgaaggccatggagaaggtggccagccacatcaatgagatgcagaagatctatgaggactatggcaccgtgtttgaccagctggtggccgagcagagcggcacagagaaggaggtgacagagctgtccatgggagagctgctgatgcacagcacagtgtcctggctgaaccccttcctgagcctgggcaaggccaggaaggacctggagctgactgtgtttgtgttcaagagagctgtgatcctggtgtacaaggagaactgcaagctgaagaagaagctgcccagcaacagcaggcctgcccacaacagcacagacctggaccccttcaagttccgctggctgatccccatcagcgccctgcaggtgcggctgggcaacccagctggaacagagaacaacagcatctgggagctgatccacaccaagtcagaaattgagggccggcctgagaccatcttccagctgtgctgcagcgacagcgagagcaagaccaacatcgtgaaggtgatccgcagcatcctgcgggagaacttcagaagacacatcaagtgtgagctgcccctggagaagacctgcaaggaccggctggtgcccctgaagaacagagtgcctgtgtctgccaagctggccagcagccgcagcctgaaggtgctgaagaacagcagcagcaatgagtggacaggagagaccgggaagggcaccctgctggacagtgatgagggcagcctgagcagcggcacccagagcagcggctgccccacagctgagggccggcaggacagcaagagcaccagccctgggaagtacccccaccctggcctggccgactttgctgacaacctgatcaaggagagtgacatcctgagtgatgaagatgatgaccaccggcagacagtgaagcagggcagccccaccaaggacatcgagatccagttccagaggctgcgcatcagtgaagatcctgatgtgcaccctgaggccgagcagcagcccggccctgagagcggggagggccagaagggcggggagcagcccaagctggtgcggggccacttctgccccatcaagaggaaggccaacagcaccaagagggaccggggcaccctgctgaaggcccagatccgccaccagagcctggacagccagagtgaaaatgccaccatcgacctgaacagcgtgctggagcgggagttctctgtgcagagcctgacctctgtggtgtctgaggagtgcttctatgaaacagagagccacggcaagagctag

SEQ ID NO: 19649 - DNA, 579 bp, synthetic construct
  source 1..579: mol_type = other DNA; note = Synthetic coding sequence
atgagccagtgtgcctgcctggaggaggtgcacctgcccaacatcaagccaggagagggcctgggcatgtacatcaagagcacctatgatggcctgcacgtgatcaccggcaccacagaaaatgtgggctggcagctgaagaacctggtgaagaagctgcgggagaaccccaccggggtggtgctgctgctgaagaagaggcccaccggcagcttcaacttcaccccagcccccctgaagaacctgcgctggaagccacccctggtgcagaccagccccccaccagccaccacccagagccctgagagcaccatggacaccagcctgaagaaggagaagagcgccatcctggacctgtacatccccccacctcctgctgtgccctacagccccagagatgaaaatggcagctttgtgtatggaggcagcagcaagtgcaagcagcccctgcccggccccaagggcagcgagagccccaacagcttcctggaccaggagagcagaagaagacgcttcaccatcgctgacagcgaccagctgcccggctacagcgtggagaccaacatcctgcccacctag

SEQ ID NO: 19650 - DNA, 1668 bp, synthetic construct
  source 1..1668: mol_type = other DNA; note = Synthetic coding sequence
atggagcctgtgaccaagtggagccccaagcaggtggtggactggacccggggcctggatgactgcctgcagcagtatgtgcacaagtttgagcgggagaagatcaacggggagcagctgctgcagatcagccaccaggacctggaggagctgggcgtgacccgcatcggccaccaggagctggtgctggaggccgtggacctgctgtgtgccctgaactacggcctggagacagacaacatgaagaacctggtgctgaagctgcgggccagcagccacaacctgcagaactacatcagcagcaggaggaagagccctgcctatgatggcaacaccagcaggaaggccccaaatgagttcctgacctctgtggtggagctgattggagctgccaaggccctgctggcctggctggaccgggcccccttcaccggcatcacagacttctctgtgaccaagaacaagatcatccagctgtgcctggacctgaccaccaccgtgcagaaggactgctttgtggccgagatggaggacaaggtgctgactgtggtgaaggtgctgaatggcatctgtgacaagaccatccgcagcaccacagatcctgtgatgagccagtgtgcctgcctggaggaggtgcacctgcccaacatcaagccaggagagggcctgggcatgtacatcaagagcacctatgatggcctgcacgtgatcaccggcaccacagagaacagccctgctgacaggagccagaagatccacgccggagatgaggtgatccaggtgaaccagcagacagtggtgggctggcagctgaagaacctggtgaagaagctgcgggagaaccccactggagtggtgctgctgctgaagaagaggcccaccggcagcttcaacttcaccccagcccccctgaagaacctgcgctggaagccacccctggtgcagaccagccccccaccagccaccacccagagccctgagagcaccatggacaccagcctgaagaaggagaagagcgccatcctggacctgtacatccccccacctcctgctgtgccctacagccccagagatgaaaatggcagctttgtgtatggaggcagcagcaagtgcaagcagcccctgcccggccccaagggcagcgagagccccaacagcttcctggaccaggagagcagaagaagacgcttcaccatcgctgacagcgaccagctgcccggctacagcgtggagaccaacatcctgcccaccaagatgagggagaagacccccagctatggcaagccccggcccctgtccatgccagcagatggcaactggatgggcatcgtggacccctttgcccggccccggggccacggcaggaagggggaggatgccctgtgccgctacttcagcaatgaaagaattcctcccatcatcgaggagagcagcagccccccctaccgcttcagccggcccaccacagagcggcacctggtgagaggagctgactacatccggggcagccgctgctacatcaacagcgacctgcacagcagcgccaccatccccttccaggaggagggcaccaagaagaagagcggcagcagcgccaccaagagcagcagcacagagcccagcctgctggtgtcctggttcacccggctgaagctgctgacccactag

SEQ ID NO: 19651 - DNA, 708 bp, synthetic construct
  source 1..708: mol_type = other DNA; note = Synthetic coding sequence
atgaggagccgggtgctgtggggcgccgcccgctggctgtggccccggcgggctgtgggccctgcccggcggcccctgagcagcggcagcccccccctggaggagctgttcacccggggcggccccctgcggaccttcctggagcggcaggccggcagcgaggcccacctgaaggtgcggcggcctgagctgctggccgtcatcaagctgctgaatgagaaggagcgggagctgcgggagacagagcacctgctgcatgatgaaaatgaagacctgaggaagctggctgaaaatgagatcaccctgtgccagaaggagatcacccagctgaagcaccagatcatcctgctgctggtgcccagcgaggagacagatgaaaatgacctgatcctggaggtgacagctggggtgggcggcggcctgcggcatgccagcgccagcatcggcggcagcgaggcctaccgccacatgaagtttgaaggaggagtgcaccgggtgcagagggtgcccaagacagagaagcagggccgggtgcacaccagcaccatgacagtggccatcctgccccagcccacagagatcaacctggtgatcaaccccaaggacctgagaattgacaccaagagggccagcggggccggcggccagcacgtgaacaccacagattctgctgtgagaattgtgcacctgcccacagactggaagtag

SEQ ID NO: 19652 - DNA, 816 bp, synthetic construct
  source 1..816: mol_type = other DNA; note = Synthetic coding sequence
atgaggagccgggtgctgtggggcgccgcccgctggctgtggccccggcgggctgtgggccctgcccggcggcccctgagcagcggcagcccccccctggaggagctgttcacccggggcggccccctgcggaccttcctggagcggcaggccggcagcgaggcccacctgaaggtgcggcggcctgagctgctggccgtcatcaagctgctgaatgagaaggagcgggagctgcgggagacagagcacctgctgcatgatgaaaatgaagacctgaggaagctggctgaaaatgagatcaccctgtgccagaaggagatcacccagctgaagcaccagatcatcctgctgctggtgcccagcgaggagacagatgaaaatgacctgatcctggaggtgacagctggggtgggcggccaggaggccatgctgttcaccagcgagatctttgacatgtaccagcagtatgctgccttcaagcgctggcactttgagaccctggagtacttccccagcgagctgggcggcctgcggcatgccagcgccagcatcggcggcagcgaggcctaccgccacatgaagtttgaaggaggagtgcaccgggtgcagagggtgcccaagacagagaagcagggccgggtgcacaccagcaccatgacagtggccatcctgccccagcccacagagatcaacctggtgatcaaccccaaggacctgagaattgacaccaagagggccagcggggccggcggccagcacgtgaacaccacagattctgctgtgagaattgtgcacctgcccacagactggaagtag

SEQ ID NO: 19653 - DNA, 1143 bp, synthetic construct
  source 1..1143: mol_type = other DNA; note = Synthetic coding sequence
atgaggagccgggtgctgtggggcgccgcccgctggctgtggccccggcgggctgtgggccctgcccggcggcccctgagcagcggcagcccccccctggaggagctgttcacccggggcggccccctgcggaccttcctggagcggcaggccggcagcgaggcccacctgaaggtgcggcggcctgagctgctggccgtcatcaagctgctgaatgagaaggagcgggagctgcgggagacagagcacctgctgcatgatgaaaatgaagacctgaggaagctggctgaaaatgagatcaccctgtgccagaaggagatcacccagctgaagcaccagatcatcctgctgctggtgcccagcgaggagacagatgaaaatgacctgatcctggaggtgacagctggggtgggcggccaggaggccatgctgttcaccagcgagatctttgacatgtaccagcagtatgctgccttcaagcgctggcactttgagaccctggagtacttccccagcgagctgggcggcctgcggcatgccagcgccagcatcggcggcagcgaggcctaccgccacatgaagtttgaaggaggagtgcaccgggtgcagagggtgcccaagacagagaagcagggccgggtgcacaccagcaccatgacagtggccatcctgccccagcccacagagatcaacctggtgatcaaccccaaggacctgagaattgacaccaagagggccagcggggccggcggccagcacgtgaacaccacagattctgctgtgagaattgtgcacctgcccaccggggtggtgtctgagtgccagcaggagaggagccagctgaagaacaaggagctggccatgaccaagctgcgggccaagctgtacagcatgcacctggaggaggagatcaacaagaggcagaatgccaggaagatccagatcggcagcaagggccgctctgagaagatccgcacctacaacttcccccagaacagagtgacagaccaccgcatcaacaagaccctgcatgacctggagaccttcatgcagggcgactacctgctggatgagctggtgcagagcctgaaggagtatgctgactatgagagcctggtggagatcatcagccagaaggtgtag

SEQ ID NO: 19654 - DNA, 3561 bp, synthetic construct
  source 1..3561: mol_type = other DNA; note = Synthetic coding sequence
atgtgtgaggtgatgcccaccatcaatgaaggagaccggctgggccccccccacggggctgatgctgatgccaactttgagcagctgatggtgaacatgctggatgagcgggagaagctgctggagagcctgcgggagagccaggagaccctggccgccacccagagccggctgcaggatgccatccacgagcgggaccagctgcagaggcacctgaacagcgccctgccccaggagtttgccaccctgacccgggagctgtccatgtgccgggagcagctgctggagcgggaggaggagatcagcgagctgaaggccgagaggaacaacacccggctgctgctggagcacctggagtgcctggtgtccagacatgagaggagcctgaggatgacagtggtgaagaggcaggcccagagccccagcggcgtgagcagcgaggtggaggtgctgaaggccctgaagagcctgtttgagcaccacaaggccctggatgagaaggtgcgggagcggctgcgggccgccctggagcgggtgaccaccctggaggagcagctggccggggcccaccagcaggtgtctgccctgcagcagggcgctggggtgagagatggagctgctgaggaggagggcaccgtggagctgggccccaagaggctgtggaaggaggacaccggccgggtggaggagctgcaggagctgctggagaagcagaactttgagctgagccaggcccgggagcggctggtgaccctgaccaccaccgtgacagagctggaggaggacctgggcacagcccggcgggacctgatcaagtctgaggagctgagcagcaagcaccagagggacctgcgggaggccctggcccagaaggaggacatggaggagcgcatcaccaccctggagaagcgctacctggccgcccagcgggaggccaccagcatccatgacctgaatgacaagctggagaatgagctggccaacaaggagagcctgcaccggcagtgtgaggagaaggcccggcacctgcaggagctgctggaggtggccgagcagaagctgcagcagaccatgaggaaggccgagaccctgcctgaggtggaggccgagctggcccagagaattgctgccctgaccaaggccgaggagagacatggcaacatcgaggagcacctgcggcagctggagggccagctggaggagaagaaccaggagctggcccgggtgcggcagcgggagaagatgaatgaagaccacaacaagaggctgagtgacacagtggaccggctgctgtctgagagcaatgaaaggctgcagctgcacctgaaggagaggatggccgccctggaggagaagggccgcctgtctgaggagattgagaagctgcggcaggaggtggaccagctgaagggccggggcggcccctttgtggatggagtgcacagccgcagccacatgggcagcgctgctgatgtgcgcttcagcctgggcaccaccacccacgcccctcctggggtgcaccggcgctacagcgccctgcgggaggagagcgccaaggactgggagaccagccccctgcccggcatgctggccccagctgctggccctgcctttgacagcgaccctgagatcagtgatgtggatgaagatgagcccggcggcctggtgggcagcgcagatgtggtgagccccagcggccacagtgatgcccagaccctggccatgatgctgcaggagcagctggatgccatcaatgaggagatccgcatgatccaggaggagaaggagagcacagagctgcgggcagaggagattgagaccagggtgaccagcggctccatggaggccctgaacctgaagcagctgaggaagaggggcagcatccccaccagcctgacagccctgagcctggccagcgccagcccccccctgagcggccgcagcacccccaagctgaccagccgctctgctgcccaggacctggacaggatgggcgtgatgaccctgcccagcgacctgaggaagcacaggaggaagctgctgagccctgtgtcccgggaggagaaccgggaggacaaggccaccatcaagtgtgagaccagcccccccagcagccccaggaccctgcggctggagaagctgggccacccagccctgagccaggaggagggcaagagcgccctggaggaccagggcagcaaccccagcagcagcaacagcagccaggacagcctgcacaagggggccaagaggaagggcatcaagagcagcatcggccgcctgtttgggaagaaggagaagggccgcctcatccagctgagcagagatggagccactggacatgtgctgctgacagattctgagttctccatgcaggagcccatggtgcctgccaagctgggcacccaggccgagaaggaccggcggctgaagaagaagcaccagctgctggaggatgcccggaggaagggcatgccctttgcccagtgggatggccccaccgtggtgtcctggctggagctgtgggtgggcatgcctgcctggtacgtggccgcctgccgggccaacgtgaagagcggggccatcatgtctgccctgagtgacacagagatccagcgggagatcggcatcagcaatgccctgcaccggctgaagctgcggctggccatccaggagatggtgtccctgaccagccccagcgccccacccaccagcaggaccagcagtggaaatgtgtgggtgacccatgaggagatggagaccctggagaccagcaccaagacagacagcgaggagggctcctgggcccagaccctggcctatggagacatgaaccacgagtggattggaaatgagtggctgcccagcctgggcctgccccagtaccgcagctacttcatggagtgcctggtggatgccaggatgctggaccacctgaccaagaaggacctgcgggtgcacctgaagatggtggacagcttccacaggaccagcctgcagtatggcatcatgtgcctgaagaggctgaactatgacaggaaggagctggagaagagaagagaggagagccagcacgagatcaaggatgtgctggtgtggaccaatgaccaggtggtgcactgggtgcagagcatcggcctgcgggactatgccggcaacctgcatgaaagtggagtgcacggggccctgctggccctggatgagaactttgaccacaacaccctggccctgatcctgcagatccccacccagaacacccaggcccggcaggtgatggagcgggagttcaacaacctgctggccctgggcacagacaggaagctggatgatggagatgacaaggtgttcagaagagcccccagctggaggaagcgcttccggccccgggagcaccacggccggggcggcatgctgagcgccagcgctgagaccctgcctgctggcttccgggtgtccaccctgggcaccctgcagcccccaccagccccacccaagaagatcatgcctgaggcccacagccactacctgtatggccacatgctgagcgccttccgggactag

SEQ ID NO: 19655 - DNA, 1803 bp, synthetic construct
  source 1..1803: mol_type = other DNA; note = Synthetic coding sequence
atgagccgggtggccaagtaccgccggcaggtgtctgaagatcctgacatcgacagcctgctggagaccctgagccctgaggagatggaggagctggagaaggagctggatgtggtggaccctgatggctctgtgcctgtgggcctgcggcagaggaaccagacagagaagcagagcactggagtgtacaaccgggaggccatgctgaacttctgtgagaaggagaccaagaagctgatgcagcgggagatgtccatggatgagagcaagcaggtggagaccaagacagatgccaagaatggagaggagcggggcagagatgccagcaagaaggccctgggcccccggcgggacagcgacctgggcaaggagcccaagaggggcggcctgaagaagagcttcagccgggacagagatgaagctgggggcaagtctggagagaagcccaaggaggagaagatcatccggggcatcgacaagggccgggtgcgggctgctgtggacaagaaggaggccggcaaggatggccgcggggaggagagagctgtggccaccaagaaggaggaggagaagaagggcagtgacaggaacacaggcctgagccgggacaaggacaagaagcgggaggagatgaaggaggtggccaagaaggaggatgatgagaaggtgaagggggagaggaggaacacagacaccaggaaggagggggagaagatgaagagagctgggggcaacacagacatgaagaaggaggatgagaaggtgaagaggggcactggaaacacagacaccaagaaggatgatgagaaggtgaagaagaatgagcccctgcacgagaaggaggccaaggatgacagcaagaccaagaccccagagaagcagaccccatctggccccaccaagcccagcgagggccctgccaaggtggaggaggaggccgcccccagcatctttgatgagcccctggagcgggtgaagaacaatgaccctgagatgacagaggtgaatgtgaacaacagcgactgcatcaccaatgagatcctggtgcgcttcacagaggccctggagttcaacacagtggtgaagctgtttgccctggccaacaccagggcagatgaccacgtggcctttgccatcgccatcatgctgaaggccaacaagaccatcaccagcctgaacctggacagcaaccacatcaccgggaagggcatcctggccatcttccgggccctgctgcagaacaacaccctgacagagctgcgcttccacaaccagaggcacatctgtggcggcaagacagagatggagatcgccaagctgctgaaggagaacaccaccctgctgaagctgggctaccactttgagctggccggccccaggatgacagtgaccaacctgctgagcaggaacatggacaagcagaggcagaagaggctgcaggagcagaggcaggcccaggaggccaagggggagaagaaggacctgctggaggtgcccaaggccggggctgtggccaagggcagccccaagcccagcccccagcccagccccaagcccagccccaagaacagccccaagaagggcggggccccagctgcccctcctcctcctcctccacccctggcccctcctctcatcatggagaacctgaagaacagcctgagccctgccacccagaggaagatgggagacaaggtgctgcctgcccaggagaagaacagccgggaccagctgctggccgccatccgcagcagcaacctgaagcagctgaagaaggtggaggtgcccaagctgctgcagtag

SEQ ID NO: 19656 - DNA, 828 bp, synthetic construct
  source 1..828: mol_type = other DNA; note = Synthetic coding sequence
atgggcacccggctgcccctggtgctgcggcagctgcggcggcccccccagcccccaggccccccccggcggctgcgggtgccctgccgggccagcagcggcggcggcggcggcggcggcggcggccgggagggcctgctgggccagaggcggccccaggacggccaggcccggagcagctgcagccctgggggccgcaccccagctgcccgggacagcatcgtgcgggaggtgatccagaacagcaaggaggtgctgagcctgctgcaggagaagaacccagccttcaagcctgtgctggccatcatccaggccggagatgacaacctgatgcaggagatcaaccagaacctggccgaggaggccggcctgaacatcacccacatctgcctgcccccagacagcagcgaggccgagatcattgatgagatcctgaagatcaatgaagacaccagggtgcacggcctggccctgcagatcagcgagaacctcttcagcaacaaggtgctgaatgccctgaagccagagaaggatgtggatggagtgacagacatcaacctgggcaagctggtgagaggagatgcccatgaatgttttgtgtcccctgtggccaaggccgtcatcgagctgctggagaagagcggcgtgaacctggatggcaagaagatcctggtggtgggcgcccacggcagcctggaggccgccctgcagtgcctcttccagaggaagggctccatgaccatgagcatccagtggaagacccggcagctgcagagcaagacagagagccgctctgtgacccggctggagtgccggcgggtcatctag

SEQ ID NO: 19657 - DNA, 999 bp, synthetic construct
  source 1..999: mol_type = other DNA; note = Synthetic coding sequence
tgaggaagagagggcctgctgggccagaggcggccccaggacggccaggcccggagcagctgcagccctgggggccgcaccccagctgcccgggacagcatcgtgcgggaggtgatccagaacagcaaggaggtgctgagcctgctgcaggagaagaacccagccttcaagcctgtgctggccatcatccaggccggagatgacaacctgatgcaggagatcaaccagaacctggccgaggaggccggcctgaacatcacccacatctgcctgcccccagacagcagcgaggccgagatcattgatgagatcctgaagatcaatgaagacaccagggtgcacggcctggccctgcagatcagcgagaacctcttcagcaacaaggtgctgaatgccctgaagccagagaaggatgtggatggagtgacagacatcaacctgggcaagctggtgagaggagatgcccatgaatgttttgtgtcccctgtggccaaggccgtcatcgagctgctggagaagtctgtgggcgtgaacctggatggcaagaagatcctggtggtgggcgcccacggcagcctggaggccgccctgcagtgcctcttccagaggaagggctccatgaccatgagcatccagtggaagacccggcagctgcagagcaagctgcatgaagctgacatcgtggtgctgggcagccccaagccagaggagatccccctgacctggatccagcccggcaccaccgtgctgaactgcagccatgacttcctgagcggcaaggtgggctgcggcagcccccgcatccactttggaggcctcatcgaggaggatgatgtgatcctgctggccgccgccctgcgcatccagaacatggtgagcagcggccgccgctggctgcgggagcagcagcaccggcgctggaggctgcactgcctgaagctgcagcccctgagccctgtgcccagcgacatcgagatcagccggggccagaccccctag

SEQ ID NO: 19658 - DNA, 2937 bp, synthetic construct
  source 1..2937: mol_type = other DNA; note = Synthetic coding sequence
atgggcacccggctgcccctggtgctgcggcagctgcggcggcccccccagcccccaggccccccccggcggctgcgggtgccctgccgggccagcagcggcggcggcggcggcggcggcggcggccgggagggcctgctgggccagaggcggccccaggacggccaggcccggagcagctgcagccctgggggccgcaccccagctgcccgggacagcatcgtgcgggaggtgatccagaacagcaaggaggtgctgagcctgctgcaggagaagaacccagccttcaagcctgtgctggccatcatccaggccggagatgacaacctgatgcaggagatcaaccagaacctggccgaggaggccggcctgaacatcacccacatctgcctgcccccagacagcagcgaggccgagatcattgatgagatcctgaagatcaatgaagacaccagggtgcacggcctggccctgcagatcagcgagaacctcttcagcaacaaggtgctgaatgccctgaagccagagaaggatgtggatggagtgacagacatcaacctgggcaagctggtgagaggagatgcccatgaatgttttgtgtcccctgtggccaaggccgtcatcgagctgctggagaagagcggcgtgaacctggatggcaagaagatcctggtggtgggcgcccacggcagcctggaggccgccctgcagtgcctcttccagaggaagggctccatgaccatgagcatccagtggaagacccggcagctgcagagcaagctgcacgaggccgacatcgtggtgctgggcagccccaagccagaggagatccccctgacctggatccagcccggcaccaccgtgctgaactgcagccatgacttcctgagcggcaaggtgggctgcggcagcccccgcatccactttggaggcctgattgaagaagatgatgtgatcctgctggccgccgccctgcgcatccagaacatggtgtcctctggaagacgctggctgcgggagcagcagcaccggcgctggaggctgcactgcctgaagctgcagcccctgagccctgtgcccagcgacatcgagatcagccggggccagacccccaaggctgtggatgtgctggccaaggagatcggcctgctggctgatgaaattgagatctacggcaagagcaaggccaaggtgcggctgtctgtgctggagcggctgaaggaccaggctgatggcaagtatgtgctggtggccggcatcacccccacccccctgggggagggcaagagcacagtgaccatcggcctggtgcaggccctgacagcccacctgaatgtgaacagctttgcctgcctgcggcagcccagccagggccccacctttggagtgaagggcggggccgccggcggcggctacgcccaggtgatccccatggaggagttcaacctgcacctgaccggggacatccacgccatcacagctgccaacaacctgctggccgccgccatcgacacccgcatcctgcacgagaacacccagacagacaaggccctgtacaaccggctggtgcccctggtgaatggagtgcgggagttcagcgagatccagctggcccggctgaagaagctgggcatcaacaagacagaccccagcaccctgacagaggaggaggtgtccaagtttgcccggctggacatcgaccccagcaccatcacctggcagagggtgctggacaccaatgaccgcttcctgaggaagatcaccatcggccagggcaacacagagaagggccactaccggcaggcccagtttgatattgctgtggccagcgagatcatggctgtgctggccctgacagacagcctggccgacatgaaggcccggctgggccgcatggtggtggccagtgacaagagcggccagcctgtgacagcagatgacctgggcgtgactggagccctgactgtgctgatgaaggatgccatcaagcccaacctgatgcagaccctggagggcacccctgtgtttgtgcatgctggcccctttgccaacatcgcccacggcaacagctctgtgctggccgacaagatcgccctgaagctggtgggggaggagggctttgtggtgacagaggccggctttggagctgacatcggcatggagaagttcttcaacatcaagtgccgggccagcggcctggtgcccaacgtggtggtgctggtggccaccgtgcgggccctgaagatgcacggcggcggccccagcgtgacagctggggtgcccctgaagaaggagtacacagaggagaacatccagctggtggctgatggctgctgcaacctgcagaagcagatccagatcacccagctgtttggagtgcctgtggtggtggccctgaatgtgttcaagacagacaccagggctgagattgacctggtgtgtgagctggccaagagagctggggcctttgatgctgtgccctgctaccactggagcgtgggcggcaagggctctgtggacctggcccgggctgtgcgggaggccgccagcaagaggagccgcttccagttcctgtatgatgtgcaggtgcccatcgtggacaagatccgcaccatcgcccaggccgtgtatggagccaaggacatcgagctgagccctgaggcccaggccaagattgaccgctacacccagcagggcttcggcaacctgcccatctgcatggccaagacccacctgagcctgagccaccagcctgacaagaagggcgtgccccgggacttcatcctgcccatcagtgatgtgcgggccagcatcggggccggcttcatctaccccctggtgggcaccatgagcaccatgcctggcctgcccacccggccctgcttctatgacatcgacctggacacagaaacagagcaggtgaagggcctcttctag

SEQ ID NO: 19659 - DNA, 408 bp, synthetic construct
  source 1..408: mol_type = other DNA; note = Synthetic coding sequence
atgatccccaacggctacctgatgtttgaagatgagaacttcatcgagagctctgtggccaagctgaatgccctgaggaagagcggccagttctgtgatgtgcggctgcaggtgtgtggccacgagatgctggcccacagagctgtgctggcctgctgcagcccctacctgtttgagatcttcaacagcgacagcgacccccacggcatcagccacgtgaagtttgatgacctgaaccctgaggccgtggaggtgctgctgaactatgcctacacagcccagctgaaggctgacaaggagctggtgaaggatgtgtacagcgctgccaagaagctgaagatggacagagtgaagcagcacctgctgtacttctgcctgcacagcaccagcaccagcagcctgctgtag

SEQ ID NO: 19660 - DNA, 1929 bp, synthetic construct
  source 1..1929: mol_type = other DNA; note = Synthetic coding sequence
atgatccccaacggctacctgatgtttgaagatgagaacttcatcgagagctctgtggccaagctgaatgccctgaggaagagcggccagttctgtgatgtgcggctgcaggtgtgtggccacgagatgctggcccacagagctgtgctggcctgctgcagcccctacctgtttgagatcttcaacagcgacagcgacccccacggcatcagccacgtgaagtttgatgacctgaaccctgaggccgtggaggtgctgctgaactatgcctacacagcccagctgaaggctgacaaggagctggtgaaggatgtgtacagcgctgccaagaagctgaagatggacagagtgaagcaggtgtgtggggactacctgctgagcaggatggatgtgaccagctgcatctcctacagaaactttgccagctgcatgggagacagccggctgctgaacaaggtggatgcctacatccaggagcacctgctgcagatcagcgaggaggaggagttcctgaagctgccccggctgaagctggaggtgatgctggaggacaacgtgtgcctgcccagcaatggcaagctgtacaccaaggtgatcaactgggtgcagaggagcatctgggagaatggagacagcctggaggagctgatggaggaggtgcagaccctgtactacagcgctgaccacaagctgctggatggcaacctgctggatggccaggccgaggtgtttggaagtgatgatgaccacatccagtttgtgcagaagaagcccccaagagaaaatggccacaagcagatcagcagcagcagcacaggctgcctgagcagccccaatgccaccgtgcagagccccaagcatgagtggaagatcgtggccagcgagaagaccagcaacaacacctacctgtgcctggccgtgctggatggcatcttctgtgtgatcttcctgcacggcaggaacagcccccagagcagccccaccagcacccccaagctgagcaagagcctgagctttgagatgcagcaggatgagctgattgagaagcccatgagccccatgcagtatgcccggagcggcctgggcacagctgagatgaatggcaagctgattgctgctgggggctacaaccgggaggagtgcctgaggacagtggagtgctacaacccccacacagaccactggagcttcctggcccccatgaggaccccccgggcccgcttccagatggctgtgctgatgggccagctgtatgtggtgggcggcagcaatggccacagtgatgacctgagctgtggggagatgtatgacagcaacattgatgactggatccctgtgcctgagctgcggaccaaccgctgcaatgctggggtgtgtgccctgaatggcaagctgtacatcgtgggcggcagtgacccctacggccagaagggcctgaagaactgtgatgtgtttgatcctgtgaccaagctgtggaccagctgtgcccccctgaacatcagaagacaccagagcgctgtgtgtgagctgggcggctacctgtacatcattggaggagctgagagctggaactgcctgaacacagtggagcgctacaaccctgagaacaacacctggaccctcatcgcccccatgaatgtggccaggagaggagctggggtggccgtgctgaatggcaagctgtttgtgtgtggcggctttgatggcagccacgccatcagctgtgtggagatgtatgaccccaccagaaatgagtggaagatgatgggcaacatgaccagccccaggagcaatgccggcatcgccaccgtgggcaacaccatctatgctgtgggcggctttgatggaaatgagttcctgaacacagtggaggtgtacaacctggagagcaatgagtggagcccctacaccaagatcttccagttctag

SEQ ID NO: 19661 - DNA, 408 bp, synthetic construct
  source 1..408: mol_type = other DNA; note = Synthetic coding sequence
atgagcaagaacacagtgagcagcgcccgcttcaggaaggtggatgtggatgaatatgatgagaacaagtttgtggatgaggaggatggaggagatggccaggccggcccagatgaaggagaggtggacagctgcctgcggcagggcaacatgacagctgccctgcaggccgccctgaagaacccccccatcaacaccaagagccaggccgtgaaggacagagctggcagcatcgtgctgaaggtgctgatctccttcaaggccaatgacatcgagaaggctgtgcagagcctggacaagaatggagtggacctgctgatgaagtacatctacaagggctttgagagccccagcgacaacagcagcgccatgctgctgcagtggcatgagaaggtgcccctggtgtag

SEQ ID NO: 19662 - DNA, 849 bp, synthetic construct
  source 1..849: mol_type = other DNA; note = Synthetic coding sequence
atggccagcagcttcctgcctgctggggccatcaccggggacagcggcggggagctgagcagtggagatgattctggagaggtggagttcccccacagccctgagattgaggagaccagctgcctggccgagctgtttgagaaggccgccgcccacctgcagggcctcatccaggtggccagccgggagcagctgctgtacctgtatgcccgctacaagcaggtgaaggtgggcaactgcaacacccccaagcccagcttctttgattttgagggcaagcagaagtgggaggcctggaaggccctgggggacagcagccccagccaggccatgcaggagtacatcgctgtggtgaagaagctggaccccggctggaacccccagatccctgagaagaagggcaaggaggccaacacaggctttggaggccctgtgatcagcagcctgtaccacgaggagaccatccgggaggaggacaagaacatctttgactactgccgggagaacaacatcgaccacatcaccaaggccatcaagagcaagaatgtggatgtgaatgtgaaggatgaggagggccgggccctgctgcactgggcctgtgaccggggccacaaggagctggtgacagtgctgctgcagcacagagctgacatcaactgccaggacaatgaaggccagacagccctgcactacgccagcgcctgtgagttcctggacatcgtggagctgctgctgcagagcggggctgaccccaccctgcgggaccaggacggctgcctgcctgaggaggtgacaggctgcaagacagtgtccctggtgctgcagaggcacaccaccgggaaggcctag

SEQ ID NO: 19663 - DNA, 9354 bp, synthetic construct
  source 1..9354: mol_type = other DNA; note = Synthetic coding sequence
atgaggagcagcaagagcaaggaggtgcccctgcccaaccccaggaacagccagagcaaggacacagtgcaggccgacatcaccacctcctgggatgccctgagccagaccaaggccgccctgcggcacatcgagaacaagctggaggtggcccccaccagcacagctgtgtgtgacagcgtgatggacaccaagaagagcagcaccagcgccaccaggaagatcagcaggaaggatggccgctacctggatgacagctgggtgaatgcccccatcagcaagagcaccaagagcaggaaggagaagagccgcagccccctgcgggccaccaccctggagagcaatgtgaagaagaacaacagagtggagttccgggagcccctggtgtcctaccgggagatccatggagcccccagcaacttcagcagcagccacctggagagcaagcacgtgtactgtgtggatgtgaatgaggagaagacagaaagtggcaactggatgattggcagccgggaggagaggaacatccgcagctgtgactttgagagcagccagagcagcgtcatcaatgacacagtggtgcgcttcctgaatgacaggcctgccattgatgccctgcagaacagcgagtgcctgatccgcatgggcgcctccatgaggacagaggaggagatgcccaacagaaccaagggcagcgagaacaacctgaagctgtctgtgaacaacatggcccatgacacagaccccaaggccctgcggctgacagacagcagccccagcagcaccagcaccagcaacagccagaggctggacatcctgaagaggcggcagcatgatgtgaagctggagaagctgaaggagcgcatcaggaagcagtgggagcacagcgaggagaccaacggccggggccagaagctgggccacatcgaccaccctgtgatggtggtgaatgtggacaacagcgtgacagccaaggtgaggaaggtggccacagcccccccagccccagcctacaagggcttcaaccccagcgagaccaagatccgcaccccagatggcaaggtgtggcaggaggccgagttccagaacatgagccgggagctgtacagagacctggccctgcactttgctgatgacatcagcatcaaggagaagccagctgagaagagcaaggagaagaaggtggtgaagcctgtgaggaaggtgcagaaggtggcccagctgagcagcacagagtgcaggacaggcagcagccacctgatcagcaccagctcctggagagatggccagaagctggtgaagaagatcctgggccctgcccccaggatggagcccaaggagcagaggacagccagcagtgaccggggcggccgggagaggacagccaagagcggcggccacatcggccgggcagagagtgacccccggctggatgtgctgcaccgccacctgcagaggaacagcgagaggagccgcagcaagagccgctctgagaacaacatcaagaagctggccagcagcctgcctgacaacaagcaggaggagaacacagccctgaacaaggacttcctgcccatcgagatccggggcatcctggatgacctgcagctggacagcacagcccacacagccaagcaggacacagtggagctgcagaaccagaagagcagcgcccctgtgcacgcccccaggagccacagccctgtgaagaggaagccagacaagatcacagccaatgaagacccccctgtgatcagcaagaggaggcactatgacacagatgaggtgcggcagtacatcgtgcggcagcaggaggagaggaagaggaagcagaatgaggagaagaaggcccagaaggaggccacagagcagaagaacaagaggctgcaggagctgtacaggaagcagaaggaggccttcaccaaggtgaagaatgtgcccccatctgagcccagcgccacccggcggctgcaggagacctacagcaagctgctgctggagaagaccctgctggaggagcccagccaccagcacgtgacccaggagacccaggccaagccaggctaccagcccagcggggagagtgacaaggagaacaaggtgcaggagaggcctccttctgccagcagcagcagtgacatgagcctgtctgagcccccccagcccctggccaggaaggacctgatggagagcacctggatgcagcctgagcggctgagcccccaggtgcaccacagccagccccagccctttgctggaacagctggcagcctgctgagccacctgctgagcctggagcacgtgggcatcctgcacaaggactttgagagcatcctgcccaccaggaagaaccacaacatggccagccggcccctgaccttcaccccccagccctacgtgaccagccctgctgcctacacagatgccctgctgaagcccagcgccagccagtacaagagcaagctggacagaattgaggccctgaaggccacagctgccagcctgagcagcagaattgaaagtgaggccaagaagctggccggggccagcatcaactacggcagcgcctggaacacagaatatgatgtgcagcaggccccccaggaggatggcccctggaccaaggctgtgaccccacctgtgaaggatgacaatgaagatgtgttcagcgcccgcatccagaagatgctgggcagctgtgtgtcccatgccacctttgatgatgacctgcccggggtgggcaacctgtctgagttcaagaagctgcctgagatgatccggccccagagcgccatcagcagcttccgggtgcgcagccctggccccaagccagagggcctgctggcccagctgtgcaagaggcagacagacagcagcagcagtgacatgcaggcctgcagccaggacaaggccaagatcagcctgggcagcagcattgattctgtgtctgagggccccctgctgtctgagggcagcctgtctgaggaggagggggaccaggacggccagcccctgctgaaggtggccgagatcctgaaggagaaggagttctgccctggagagaggaacagctatgagcccatcaaggagttccagaaggaggccgagaagttcctgcccctgtttggccacatcggcggcacccagagcaagggcccctgggaggagctggccaagggcagcccccacagcgtcatcaacatcttcaccaagagctaccagctgtatggcaagggctttgaggacaagctggaccggggcaccagcaccagccggcccctgaatgccacagccacccccctgagcggcgtgtcctatgaagatgactttgtgagcagccctggcaccggcaccagcacagagaagaagagcaccctggagccccacagcaccctgagcccccaggaggaccacagcaacaggaagagcgcctatgaccccagctctgtggatgtgaccagccagcacagcagcggggcccagagcgctgccagcagccgcagcagcaccagcagcaagggcaagaagggcaagaaggagaagacagagtggctggacagcttcaccggaaatgtgcagaacagcctgctggatgaggagaaggccgagcggggcagccaccagggcaagaagagcggcaccagcagcaagctgtctgtgaaggactttgagcagaccctggacacagacagcaccctggaggacctgagcggccacagcgtgtctgtgtccagtgacaagggccgcagccagaagacccccaccagccccctgagccccagcagccagaagagcctgcagtttgatgtggccggcaccagcagcgagaggagcaagagctctgtgatgccacccaccatcaccggcttcaagcccaatgcccccctgacagacctgaacccagctgccagcaggaccaccacagagaacatggcccccatccctggcagcaagcgcttcagccctgctggcctgcaccacaggatggctgctgagctgagctacctgaatgccatcgaggagagcgtgcggcagctgagtgatgtggagcgggtgcggggcatcagcctggcccagcaggagagcgtgtccctggcccagatcatcaaggcccagcagcagagacatgagcgggacctggccctgctgaagctgaaggccgagcaggaggccctggagagccagaggcagctggaggagaccaggaacaaggccgcccaggtgcacgccgagagcctgcagcaggtggtgcagagccagcgggaggtgacagaggtgctgcaggaggccacctgcaagattgctgcccagcagagcgagacagcccggctgaccacagatgctgcccggcagatctgtgagatggccgagctgaccaggacccacatcagtgatgctgtggtggccagcggggcccccctggccatcctgtatgaccaccagaggcagcacctgcctgactttgtgaagcagctgcggaccaggacagaaacagacaggaagagccccagcgtgtccctgagccagagcaaggagggcaccctggacagcaagcaccagaagtacagcgccagctatgacagctacagcgagagcagcggctacaagaaccacgaccggcgcagcagcagcggcagcagccggcaggagagccccagcgtgcccagctgcaaggaaaatgagaagaagctgaatggagagaagattgagagcagcattgatgagcaggtgcagacagctgctgatgacagcctgcggagtgacagcgtgcccagcctgcctgatgagaaggacagcaccagcatcgccacagagtacagcctgaagtttgatgagagcatgacagaagatgaaattgaggagcagagcttccgcagcctgctgcccagcgagagccaccggcgcttcaacatggagaagagaagaggccaccatgatgacagtgatgaggaggccagccctgagaagaccaccctgagcacagccaaggagctgaacatgcccttcagcggcggccaggacagcttcagcaagttcaccatggagatggtgcggcagtacatgaaggaggaggagatgagagctgcccaccagagcagcctgctgcggctgcgggagaaggccctgaaggagaagaccaaggccgagctggcctggctggagcaccagaagaagcacctgcgggacaagggggaggatgacaagatgccacccctgaggaagaagcagaggggcctgctgctgcggctgcagcaggagaaggccgagatcaagaggctgcaggaggccaacaaggccgccaggaaggagcggcagctgatcctgaagcagcaggaggagattgagaagatccggcagaccaccatcaagctgcaggagaagctgaagtctgctggggagagcaagctggacagccacagtgatgatgacaccaaggacaacaaggccaccagccctggccccacagacctggagaccaggagccccagccccatcagcatcagcagcagcgagaccagcagcatcatgcagaagctgaagaagatgaggagcaggatggatgagaagttcctgaccaagcgggagcagaagctgatgcagaggcggcagcacgccgaggagctgctggagtggaagaggcggctggatgctgaggaggccgagatccggcagatggagaagcaggccctggccgcctgggacaaggagctgatcaagcccaagacccccaagaaggagctggaggaccagaggacagagcagaaggagatcgccagcgaggaggagagccctgtgcccctgtacagccacctgaacagcgagagcagcatccctgaggagctgggcagccctgctgtggagtatgtgcccagcgagagcatcggccaggagcagcccggcagcccagaccacagcatcctgacagaggagatgatctgcagccaggagctggagagcagcaccagccccagcaagcacagcctgcccaagagctgcacctctgtgtccaagcaggagagcagcaagggcagccacaggactggaggccagtgccacctgcccatcaagagccaccagcactgctacagctggagcgatgagagcctgtccatgacccagagcgagaccaccagtgaccagagcgacatcgagggccgcatccgggccctgaaggatgagctgaggaagaggaagtctgtggtgaaccagctgaagaaggagcagaagaagaggcagaaggagcggctgaaggcccaggaggccagcctcatcaagcagctggagagctatgatgagttcatcaagaagacagaggccgagctgagccaggacctggagaccagccccacagccaagccccagatcaagaccctgagcagcgccagcgagaagcccaagatcaagcccctgacccccctgcacagaagtgaaacagccaagaactggaagagcctgacagaaagtgagaggagccggggcagcctggagagcattgctgagcacgtggatgccagcctgagcggcagcgagaggtctgtgtctgagaggagcctgagcgcctatgccaagagggtgaatgagtgggacagcaggacagaggacttccagacccccagccctgtgctgcggagcagcaggaagatccgggaggagagcggggacagcctggagaatgtgcctgccctgcacctgctgaaggagctgaatgccaccagccgcatcctggacatgtctgatggcaaggtgggggagagcagcaagaagtctgagatcaaggagattgagtacaccaagctgaagaagagcaagattgaagatgccttcagcaaggagggcaagagtgatgtgctgctgaagctggtgctggagcagggcgacagcagcgagatcctgagcaagaaggacctgcccctggacagtgaaaatgtgcagaaggacctggtgggcctggccatcgagaacctgcacaagtctgaggagatgctgaaggagcggcagagcgaccaggacatgaaccacagccccaacatccagagcggcaaggacatccacgagcagaagaacaccaaggagaaggacctgtcctggagcgagcacctgtttgcccccaaggagatcccctacagtgaagattttgaggtgtcctccttcaagaaggagatctctgctgagctgtacaaggatgactttgaggtgagcagcctgctgagcctgaggaaggacagccagagctgccgggacaagccccagcccatgaggagcagcaccagcggggccaccagctttggcagcaatgaggagatcagtgaatgtctgtctgagaagagcctgagcatccacagcaatgtgcacagcgaccggctgctggagctgaagagccccacagagctgatgaagagcaaggagaggagtgatgtggagcacgagcagcaggtgacagagagccccagcctggcctctgtgcccacagcagatgagctgtttgacttccacatcggggacagagtgctgattggaaatgtgcagcccggcatcctgcgcttcaagggggagaccagctttgccaagggcttctgggccggcgtggagctggacaagccagagggcaacaacaacggcacctatgatggcatcgcctactttgagtgcaaggagaagcacggcatctttgccccaccccagaagatcagccacatccctgagaactttgatgattatgtggacatcaatgaagatgaggactgctacagtgatgagcgctaccagtgctacaaccaggagcagaatgacacagagggccccaaggaccgggagaaggatgtgtctgagtacttctatgagaagagcctgcccagcgtgaatgacatcgaggcctctgtgaacagaagccgcagcctgaagattgaaacagacaacgtgcaggacatcagcggcgtgctggaggcccacgtgcaccagcagagctctgtggacagccagatcagcagcaaagaaaacaaggacctgatcagtgatgccacagagaaggtgtccattgctgctgaagatgacaccctggacaacaccttcagcgaggagctggagaagcagcagcagttcacagaggaggaggacaacctgtatgcagaggccagcgagaagctgtgcacccccctgctggacctgctgacccgggagaagaaccagctggaggcccagctgaagagcagcctgaatgaggagaagaagagcaagcagcagctggagaagatcagcctgctgacagacagcctgctgaaggtgtttgtgaaggacacagtgaaccagctgcagcagatcaagaagaccagagatgagaagatccagctgagcaaccaggagctgctgggagatgaccagaagaaggtgaccccccaggacctgagccagaatgtggaggagcagagccccagcatcagcggctgcttcctgagcagcgagctggaggatgagaaggaggagatcagcagcccagacatgtgccccaggcctgagagccctgtgtttggagccagcggccaggaggagctggccaagaggctggccgagctggagctgagccgggagttcctgagcgccctgggagatgaccaggactggtttgatgaggactttggcctgagcagcagccacaagatccagaagaacaaggccgaggagaccatcgtgcccctgatggccgagcccaagagggtgacccagcagccctgtgagaccctgctggccgtgccccacacagctgaggaggtggagatcctggtgcacaatgctgctgaggagctgtggaagtggaaggagctgggccatgacctgcacagcatcagcatccccaccaagctgctgggctgtgccagcaagggcctggacatcgagagcaccagcaagagggtgtacaagcaggccgtgtttgacctgaccaaggagatctttgaggagatctttgctgaggaccccaacctgaaccagcctgtgtggatgaagccctgccgcatcaacagcagctacttccggcgggtgaagaaccccaacaacctggatgagatcaagagcttcatcgccagcgaggtgctgaagctgttcagcctgaagaaggagcccaaccacaagacagactggcagaagatgatgaagtttggaaggaagaagagggacagagtggaccacatcctggtgcaggagctgcacgaggaggaggcccagtgggtgaactatgatgaagatgagctgtgtgtgaagatgcagctggctgatggcatctttgagaccctcatcaaggacaccattgatgtgctgaaccagatcagcgagaagcagggccgcatgctgctggtgtag

SEQ ID NO: 19664 - DNA, 2946 bp, synthetic construct; identical to SEQ ID NO: 18691
  source 1..2946: mol_type = other DNA; note = Synthetic coding sequence

SEQ ID NO: 19665 - DNA, 648 bp, synthetic construct
  source 1..648: mol_type = other DNA; note = Synthetic coding sequence
atgtctgccaagagagctgagctgaagaagacccacctggtgaaggagcggcactgctggaccagcaagaactacaaggctgtgtgcctggagctgaagccagagcccaccaagacctttgactacaaggctgtgaagcaggagggccgcttcaccaaggccggcgtgacccaggacctgaagaatgagctgcgggaggtgcgggaggagctgaaggagaagatggaggagatcaagcagatcaaggacctgatggacaaggactttgacaagctgcatgaatttgtggagatcatgaaggagatgcagaaggacatggatgagaagatggacatcctgatcaacacccagaagaactacaagctgcccctgcggcgggcccccaaggagcagcaggagctgcggctgatgggcaagacccaccgggagccccagctgcggcccaagaagatggatggagccagcggcgtgaatggagccccctgtgccctgcacaagaagaccatggccccccagaagaccaagcagggcagcctggaccccctgcaccactgcggcacctgctgtgagaagtgcctgctgtgtgccctgaagaacaactacaacagaggcatctatgctgctgtgggcctgctggacctgtggtag

SEQ ID NO: 19666 - DNA, 606 bp, synthetic construct
  source 1..606: mol_type = other DNA; note = Synthetic coding sequence
atgtctgccaagagagctgagctgaagaagacccacctgagcaagaactacaaggctgtgtgcctggagctgaagccagagcccaccaagacctttgactacaaggctgtgaagcaggagggccgcttcaccaaggccggcgtgacccaggacctgaagaatgagctgcgggaggtgcgggaggagctgaaggagaagatggaggagatcaagcagatcaaggacctgatggacaaggactttgacaagctgcatgaatttgtggagatcatgaaggagatgcagaaggacatggatgagaagatggacatcctgatcaacacccagaagaactacaagctgcccctgcggcgggcccccaaggagcagcaggagctgcggctgatgggcaagacccaccgggagccccagctgcggcccaagaagatggatggagccagcggcgtgaatggagccccctgtgccctgcacaagaagaccatggccccccagaagaccaagcagggcagcctggaccccctgcaccactgcggcacctgctgcgtgtctgagaccctgcctgagcccagcactggagcccggcccctggccccagccccctggtag

SEQ ID NO: 19667 - DNA, 300 bp, synthetic construct
  source 1..300: mol_type = other DNA; note = Synthetic coding sequence
atgtctgccaagagagctgagctgaagaagacccacctgagcaagaactacaaggctgtgtgcctggagctgaagccagagcccaccaaggtgcgcagcccctttgaggccatgcaggccgcccggcctgagatccacggggaggtgaccaggagccagggcagctttgctgaccccagcggccaggacctgagccagacctttgactacaaggctgtgaagcaggagggccgcttcaccaaggccggccgcaccccccggctgctggaggagctgagcctgctgctgctgcccctgtag

SEQ ID NO: 19668 - DNA, 639 bp, synthetic construct
  source 1..639: mol_type = other DNA; note = Synthetic coding sequence
atgtctgccaagagagctgagctgaagaagacccacctgagcaagaactacaaggctgtgtgcctggagctgaagccagagcccaccaagacctttgactacaaggctgtgaagcaggagggccgcttcaccaaggccggcgtgacccaggacctgaagaatgagctgcgggaggtgcgggaggagctgaaggagaagatggaggagatcaagcagatcaaggacctgatggacaaggactttgacaagctgcatgaatttgtggagatcatgaaggagatgcagaaggacatggatgagaagatggacatcctgatcaacacccagaagaactacaagctgcccctgcggcgggcccccaaggagcagcaggagctgcggctgatgggcaagacccaccgggagccccagctgcggcccaagaagatggatggagccagcggcgtgaatggagccccctgtgccctgcacaagaagaccatggccccccagaagaccaagcagggcagcctggaccccctgcaccactgcggcacctgctgtgagaagtgcctgctgtgtgccctgaagaacaactacaacagagcccagctgcagaacctgcctgctgtgcccatccaccacctgcaggccccctag

SEQ ID NO: 19669 - DNA, 402 bp, synthetic construct
  source 1..402: mol_type = other DNA; note = Synthetic coding sequence
tgatatgagctgcgggaggagcacctggacaagatcttcaagcaccgggagctgcagcagaagctggtggatgccaagctggagcaggcccaggagatgatgaaggaggccgaggagcggcacaagcgggagaaggagtacctgctgaaccaggccgctgagtggaagctgcaggccaaggtgctgaaggagcaggagaccgtgctgcaggcccaggtgcggcctgggggccggggcatgggcgtgctgagcagcctgagcccagacaagaaggccggggccaagggcggccagcagaagagcagctatgtggccggagatggcggcatgggcattggaaatgaggagcagctgcacatctacagctacttccaggtgaagatcaaggcccagtactactag

SEQ ID NO: 19670 - DNA, 687 bp, synthetic construct
  source 1..687: mol_type = other DNA; note = Synthetic coding sequence
atggccagcgaggagctgcagaaggacctggaggaggtgaaggtgctgctggagaaggccaccaggaagagggtgagagatgccctgacagctgagaagagcaagattgaaacagagatcaagaacaagatgcagcagaagagccagaagaaggccgagctgctggacaatgagaagccagctgctgtggtggcccccatcaccaccggctacacagtgaagatcagcaactacggctgggaccagagcgacaagtttgtgaagatctacatcaccctgactggagtgcaccaggtgcccacagaaaatgtgcaggtgcacttcacagagaggagctttgacctgctggtgaagaacctgaatggcaagagctacagcatgattgtgaacaacctgctgaagcccatctctgtggagggcagcagcaagaaggtgaagacagacacagtgctgatcctgtgcaggaagaaggtggagaacacccgctgggactacctgacccaggtggagaaggagtgcaaggagaaggagaagcccagctatgacacagaaacagaccccagcgagggcctgatgaatgtgctgaagaagatctatgaagatggagatgatgacatgaagaggaccatcaacaaggcctgggtggagagccgggagaagcaggccaagggggacacagagttctag

SEQ ID NO: 19671 - DNA, 558 bp, synthetic construct
  source 1..558: mol_type = other DNA; note = Synthetic coding sequence
atgcagcagaagagccagaagaaggccgagctgctggacaatgagaagccagctgctgtggtggcccccatcaccaccggctacacagtgaagatcagcaactacggctgggaccagagcgacaagtttgtgaagatctacatcaccctgactggagtgcaccaggtgcccacagaaaatgtgcaggtgcacttcacagagaggagctttgacctgctggtgaagaacctgaatggcaagagctacagcatgattgtgaacaacctgctgaagcccatctctgtggagggcagcagcaagaaggtgaagacagacacagtgctgatcctgtgcaggaagaaggtggagaacacccgctgggactacctgacccaggtggagaaggagtgcaaggagaaggagaagcccagctatgacacagaaacagaccccagcgagggcctgatgaatgtgctgaagaagatctatgaagatggagatgatgacatgaagaggaccatcaacaaggcctgggtggagagccgggagaagcaggccaagggggacacagagttctag

SEQ ID NO: 19672 - DNA, 1134 bp, synthetic construct
  source 1..1134: mol_type = other DNA; note = Synthetic coding sequence
atggagcagctgcctgacctgcacagccacttcagtgacctgaacctggaggcccacatgtatgccagccagtggttcctgaccctcttcaccgccaagttccccctgtgcatggtgttccacatcatcgacctgctgctgtgtgagggcctgaacatcatcttccacgtggccctggccctgctgaagaccagcaaagaagacctgctgcaggccgactttgagggcgccctgaagttcttccgggtgcagctgcccaagcgctacagagcagaagaaaatgcccggcggctgatggagcaggcctgcaacatcaaggtgcccaccaagaagctgaagaagtatgagaaggagtaccagaccatgagggagagccagctgcagcaggaggaccccatggaccgctacaagagagaaaatagaaggctgcaggaggcctccatgaggctggagcaggagaatgatgacctggcccacgagctggtgaccagcaagatcgccctgagaaatgacctggaccaggccgaggacaaggcagatgtgctgaacaaggagctgctgctgaccaagcagaggctggtggagacagaggaggagaagaggaagcaggaggaggagacagcccagctgaaggaggtgttcaggaagcagctggagaaggccgagtatgagatcaagaagaccacagccatcatcgccgagtacaagcagatctgcagccagctgagcacccggctggagaagcagcaggccgccagcaaggaggagctggaggtggtgaagggcaagatgatggcctgcaagcactgcagcgacatcttcagcaaggagggcgccctgaagctggccgccaccggccgggaggaccagggcatcgagacagatgatgagaaggacagcctgaagaagcagctgcgggagatggagctggagctggcccagaccaagctgcagctggtggaggccaagtgcaagatccaggagctggagcaccagagaggagccctgatgaatgagatccaggccgccaagaacagctggttcagcaagaccctgaacagcatcaagacagccaccggcacccagcccctgcagcctgcccctgtgacccagccccccaaggagagcacctag

SEQ ID NO: 19673 - DNA, 762 bp, synthetic construct
  source 1..762: mol_type = other DNA; note = Synthetic coding sequence
atgattgagaacagctcctggagcatgacctttgaggagagagaaaatagaaggctgcaggaggcctccatgaggctggagcaggagaatgatgacctggcccacgagctggtgaccagcaagatcgccctgagaaatgacctggaccaggccgaggacaaggcagatgtgctgaacaaggagctgctgctgaccaagcagaggctggtggagacagaggaggagaagaggaagcaggaggaggagacagcccagctgaaggaggtgttcaggaagcagctggagaaggccgagtatgagatcaagaagaccacagccatcatcgccgagtacaagcagatctgcagccagctgagcacccggctggagaagcagcaggccgccagcaaggaggagctggaggtggtgaagggcaagatgatggcctgcaagcactgcagcgacatcttcagcaaggagggcgccctgaagctggccgccaccggccgggaggaccagggcatcgagacagatgatgagaaggacagcctgaagaagcagctgcgggagatggagctggagctggcccagaccaagctgcagctggtggaggccaagtgcaagatccaggagctggagcaccagagaggagccctgatgaatgagatccaggccgccaagaacagctggttcagcaagaccctgaacagcatcaagacagccaccggcacccagcccctgcagcctgcccctgtgacccagccccccaaggagagcacctag

SEQ ID NO: 19674 - DNA, 759 bp, synthetic construct
  source 1..759: mol_type = other DNA; note = Synthetic coding sequence
atgggcaagagctatgatggccgggcctacgtgatcaccggcatgtggaaccccaatgcccctgtgttcctggccctgaatgaggagacccccaaggacaagcaggtgtacatgacagtggccgtggacatggtggtgacagaggtggtggagcctgtgcgcttcctgctggagaccgtggtgcgggtgtacccagccaatgaacgcttctggtacttcagcaggaagaccttcacagagaccttcttcatgaggctgaagcagagcgagggcaagggccacaccaatgctggagatgccatctatgaggtggtgtccctgcagcgggagagtgacaaggaggagcctgtgacccccaccagcggcggcggccccatgagcccccaggatgatgaagctgaggaggagagtgacaatgagctgagcagcggcactggagatgtgtccaaggactgcccagagaagatcctgtacagctggggcgagctgctgggcaagtggcacagcaacctgggcgcccggcccaagggcctgagcaccctggtgaagagcggcgtgcctgaggccctgcgggcagaggtgtggcagctgctggccggctgccacgacaaccaggccatgctggaccgctaccgcatcctgatcaccaaggtgtgctggagcctgctggaggtgcacagccggccctgcctgcccggctaccaccagtggaagctgcagaacagcaagtactgcaggatggccaacgtggccgcctag

SEQ ID NO: 19675 - DNA, 2484 bp, synthetic construct
  source 1..2484: mol_type = other DNA; note = Synthetic coding sequence
atggaggtgcgggccagcctgcagaaggtgtctggcagcagtgacagcgtggccaccatgaacagcgaggagtttgtgctggtgccccagtatgcagatgacaacagcaccaagcatgaggagaagccccagctgaagatcgtgtccaatggagatgagcagctggagaaggccatggaggagatcctgcgggacagcgagaagaggcccagcagcctgctggtggactgccagagcagcagcgagatcagtgaccacagctttggagacatcccagccagccagaccaacaagcccagcctgcagctgatcctggaccccagcaacacagagatcagcaccccccggcccagcagccctgggggcctgcctgaggaggacagcgtgctcttcaacaagctgacctacctgggctgcatgaaggtgagcagccccagaaatgaggtggaggccctgcgggccatggccaccatgaagagcagcagccagtaccccttccctgtgaccctgtatgtgcccaacgtgcctgagggctctgtgcgcatcatcgaccagagcagcaatgtggagatcgccagcttccccatctacaaggtgctcttctgtgcccggggccatgatggcaccacagagagcaactgctttgccttcacagagagcagccacggcagcgaggagttccagatccacgtgttcagctgtgagatcaaggaggccgtgagccgcatcctgtacagcttctgcacagccttcaagaggagcagccggcaggtgtctgatgtgaaggacagcgtcatccccaccccagacagtgatgtgttcaccttctctgtgtccctggaggtgaaggaggatgatggcaagggcaacttccggctgctggtgatccccatcccctttgagtacttcagccctgtgcccaaggaccgggacaagttctacttcaagctgaagcagggcatcgagaagaaggtggtgatcaccgtgcagcagctgagcaacaaggagctggccatcgagcgctgcttcggcatgctgctgagccctggaagaaatgtgaagaacagcgacatgcacctgctggacatggagagcatgggcaagagctatgatggccgggcctacgtgatcaccggcatgtggaaccccaatgcccctgtgttcctggccctgaatgaggagacccccaaggacaagcaggtgtacatgacagtggccgtggacatggtggtgacagaggtggtggagcctgtgcgcttcctgctggagaccgtggtgcgggtgtacccagccaatgaacgcttctggtacttcagcaggaagaccttcacagagaccttcttcatgaggctgaagcagagcgagggcaagggccacaccaatgctggagatgccatctatgaggtggtgtccctgcagcgggagagtgacaaggaggagcctgtgacccccaccagcggcggcggccccatgagcccccaggatgatgaggccgaggaggagagtgacaatgagctgagcagcggcactggagatgtgtccaaggactgcccagagaagatcctgtacagctggggcgagctgctgggcaagtggcacagcaacctgggcgcccggcccaagggcctgagcaccctggtgaagtctggagtgcctgaggccctgcgggcagaggtgtggcagctgctggccggctgccacgacaaccaggccatgctggaccgctaccgcatcctgatcaccaaggacagcgcccaggagagcgtcatcacccgggacatccacaggaccttccctgcccatgactacttcaaggacacaggaggagatggccaggagagcctgtacaagatctgcaaggcctacagcgtgtatgatgaagatattggctactgccagggccagagcttcctggccgctgtgctgctgctgcacatgcctgaggagcaggccttctgtgtgctggtgaagatcatgtatgactatggcctgcgggacctgtacagaaacaactttgaggacctgcactgcaagttctaccagctggagcggctgatgcaggagcagctgcctgacctgcacagccacttcagtgacctgaacctggaggcccacatgtatgccagccagtggttcctgaccctcttcaccgccaagttccccctgtgcatggtgttccacatcatcgacctgctgctgtgtgagggcctgaacatcatcttccacgtggccctggccctgctgaagaccagcaaagaagacctgctgcaggccgactttgagggcgccctgaagttcttccgggtgcagctgcccaagcgctacagagcagaagaaaatgcccggcggctgatggagcaggcctgcaacatcaaggtgcccaccaagaagctgaagaagtatgagaaggagtaccagaccatgagggagagccagctgcagcaggaggaccccatggaccgctacaagttcttcttcctgtag

SEQ ID NO: 19676 - DNA, 2580 bp, synthetic construct
  source 1..2580: mol_type = other DNA; note = Synthetic coding sequence
atgggcaaccgggagatggaggagctgatccccctggtgaaccggctgcaggatgccttcagcgccctgggccagagctgcctgctggagctgccccagattgctgtggtgggcggccagagcgctgggaagagctctgtgctggagaactttgtgggccgggacttcctgccccggggcagcggcatcgtgacccggcggcccctggtgctgcagctggtgaccagcaaggccgagtatgcagagttcctgcactgcaagggcaagaagttcacagactttgatgaggtgcggctggagattgaagctgagacagacagagtgacaggcatgaacaagggcatcagcagcatccccatcaacctgcgggtgtacagcccccacgtgctgaacctgaccctgattgacctgcccggcatcaccaaggtgcctgtgggggaccagcccccagacatcgagtaccagatccgggagatgatcatgcagttcatcacccgggagaactgcctgatcctggccgtgaccccagccaacacagacctggccaacagtgatgccctgaagctggccaaggaggtggacccccagggcctgcggaccatcggggtcatcaccaagctggacctgatggatgagggcacagatgccagagatgtgctggagaacaagctgctgcccctgcggcggggctacgtgggcgtggtgaacagaagccagaaggacattgatggcaagaaggacatcaaggccgccatgctggccgagaggaagttcttcctgagccacccagcctaccgccacatcgctgacaggatgggcaccccccacctgcagaaggtgctgaaccagcagctgaccaaccacatccgggacaccctgcccaacttcaggaacaagctgcagggccagctgctgagcattgaacatgaggtggaggcctacaagaacttcaagccagaggaccccaccaggaagaccaaggccctgctgcagatggtgcagcagtttgctgtggactttgagaagagaattgagggcagcggggaccaggtggacaccctggagctgtctggaggagccaagatcaaccgcatcttccacgagcgcttcccctttgagatcgtgaagatggagttcaatgagaaggagctgcggcgggagatctcctatgccatcaagaacatccacggcatcagaacaggcctcttcaccccagacatggcctttgaggccatcgtgaagaagcagatcgtgaagctgaagggccccagcctgaagtctgtggacctggtgatccaggagctgatcaacacagtgaagaagtgcaccaagaagctggccaacttcccccggctgtgtgaggagacagaaagaattgtggccaaccacatccgggagcgggagggcaagaccaaggaccaggtgctgctgctgattgacatccaggtgtcctacatcaacaccaaccacgaggacttcatcggctttgccaatgcccagcagaggagcagccaggtgcacaagaagaccaccgtgggcaaccaggtgatcaggaagggctggctgaccatcagcaacatcggcatcatgaagggcggcagcaagggctactggtttgtgctgacagctgagagcctgtcctggtacaaggatgatgaggagaaggagaagaagtacatgctgcccctggacaacctgaaggtgagagatgtggagaagagcttcatgagcagcaagcacatctttgccctcttcaacacagagcagagaaatgtgtacaaggactaccgcttcctggagctggcctgtgacagccaggaggatgtggacagctggaaggccagcctgctgcgggccggcgtgtacccagacaagtctgtggctgaaaatgatgaaaatggccaggccgagaacttctccatggacccccagctggagcggcaggtggagaccatccggaacctggtggacagctacatgagcatcatcaacaagtgcatccgggacctgatccccaagaccatcatgcacctgatgatcaacaacgtgaaggacttcatcaacagcgagctgctggcccagctgtacagcagcgaggaccagaacaccctgatggaggagagcgctgagcaggcccagaggagagatgagatgctgaggatgtaccaggccctgaaggaggccctgggcatcatcggggacatcagcacagccaccgtgtccaccccagcccctcctcctgtggatgacagctggatccagcacagcagaagaagccccccacccagccccaccacccagaggcggcccaccctgagcgcccccctggcccggcccaccagcggccggggccctgccccagccatccccagccctggcccccacagcggggcccctcctgtgcccttccggcccggccccctgccccccttccccagcagcagtgacagctttggagccccaccccaggtgcccagccggcccacccgggccccacccagcgtgcccagccggcggcccccacccagccccacccggcccaccatcatccggcccctggagagcagcctgctggactag

SEQ ID NO: 19677 - DNA, 1761 bp, synthetic construct
  source 1..1761: mol_type = other DNA; note = Synthetic coding sequence
tctgagagcctgagcagcgctgtgtttgtggagggcctgaagaggcagggcggctgtgcccggctggaggaggcctgcctgtctgaggccggggaggacctgactggagtgcgcttcagcctgcccgggaagaacttcccctgtggcagcagcagcagcagcagccgcagcaggaacagcagcagcagcaacagcagcagcagcagcagcaccaccaccaccaccaccagcagcagcggggcccaggacaggatgcctgtgctggagcgctacttccaccctgctgagctgggccgccgctggacaggccctgagggcgtgctgcccagcagccctggcagccggcccggctgccagcagggccccctgccctgggacctgcctgagatgatccgcatggtgaagctggtgtggaagagcaagtctgagctgcaggccaccaagcagaggggcatcctggacaatgaagatgccctgcgctccttccctggggacatccggctgcggggccagacaggagtgcgggcagagcggcggggcagctaccccttcatcgacttccggctgctgaacagcaccacctacagcggggagatcggcaccaagaagaaggtgaagaggctgctgtccttccagcgctacttccacgccagccggctgctgcggggcatcatcccccaggcccccctgcacctgctggatgaggactacctgggccaggcccggcacatgctgagcaaggtgggcatgtgggactttgacatcttcctgtttgaccggctgaccaatggaaacagcctggtgaccctgctgtgccacctgttcaacacccacggcctcatccaccacttcaagctggacatggtgaccctgcaccgcttcctggtgatggtgcaggaggactaccacagccagaacccctaccacaatgctgtgcacgccgcagatgtgacccaggccatgcactgctacctgaaggagcccaagctggccagcttcctgacccccctggacatcatgctgggcctgctggccgctgctgcccatgatgtggaccaccctggggtgaaccagcccttcctgatcaagaccaaccaccacctggccaacctgtaccagaacatgtctgtgctggagaaccaccactggaggagcaccatcggcatgctgcgggagagccggctgctggcccacctgcccaaggagatgacccaggacatcgagcagcagctgggcagcctcatcctggccacagacatcaaccggcagaatgagttcctgacccggctgaaggcccacctgcacaacaaggacctgcggctggaggatgcccaggacagacacttcatgctgcagatcgccctgaagtgtgccgacatctgcaacccctgccgcatctgggagatgagcaagcagtggagcgagcgggtgtgtgaggagttctaccggcagggcgagctggagcagaagtttgagctggagatcagccccctgtgcaaccagcagaaggacagcatccccagcatccagatcggcttcatgagctacatcgtggagcccctcttccgggagtgggcccacttcaccggcaacagcaccctgtctgagaacatgctgggccacctggcccacaacaaggcccagtggaagagcctgctgccccggcagcacaggagccggggcagcagcggcagcggccctgaccatgaccacgccggccagggcacagagagcgaggagcaggagggggacagcccctag

SEQ ID NO: 19678 - DNA, 525 bp, synthetic construct
  source 1..525: mol_type = other DNA; note = Synthetic coding sequence
atgaccaccaagaacctggagaccaaggtgacagtgaccagcagccccatcagaggagctggagatggcatggagacagaggagccccccaagtctgtggaggtgaccagcggcgtgcagagcaggaagcaccacagcctgcagagcccctggaagaaggctgtgcccagcgagagccctggggtgctgcagctgggcaagatgctgacagagaaggccatggaggtgaaggctgtgcgcatcctggtgcccaaggccgccatcacccatgacatccccaacaagaacaccaaggtgaagagcctgggccaccacaagggggagttcctgggccagagcgagggcgtgattgagcccaacaaggagctgtctgaggtgaagaatgtgctggagaagctgaagaacagcgagcggcggctgctgcaggacaaggagggcctgagcaaccagctgcgggtgcagacagaggtgcggcgggccctgattgacaagatgagcaccaccctgtatgtgtggaccttctag

SEQ ID NO: 19679 - DNA, 1203 bp, synthetic construct; identical to SEQ ID NO: 19075
  source 1..1203: mol_type = other DNA; note = Synthetic coding sequence

SEQ ID NO: 19680 - DNA, 276 bp, synthetic construct
  source 1..276: mol_type = other DNA; note = Synthetic coding sequence
atggatgctgacagtgatgtggccctggacatcctgatcaccaacgtggtgtgtgtgttccgcacccgctgccacctgaacctgaggaagatcgccctggagggcgccaacgtcatctacaagagagatgtgggcaaggtgctgatgaagctgaggaagccccgcatcacagccaccatctggagcagcggcaagatcatctgcacaggagccaccagcgaggaggaggccaagtttggagcccggcggctggcccggagcctgcagaagctgtag

SEQ ID NO: 19681 - DNA, 492 bp, synthetic construct
  source 1..492: mol_type = other DNA; note = Synthetic coding sequence
atggatgctgacagtgatgtggccctggacatcctgatcaccaacgtggtgtgtgtgttccgcacccgctgccacctgaacctgaggaagatcgccctggagggcgccaacgtcatctacaagagagatgtgggcaaggtgctgatgaagctgaggaagccccgcatcacagccaccatctggagcagcggcaagatcatctgcacaggagccaccagcgaggaggaggccaagtttggagcccggcggctggcccggagcctgcagaagctgggcttccaggtgatcttcacagacttcaaggtggtgaatgtgctggccgtgtgcaacatgccctttgagatccggctgcctgagttcaccaagaacaaccggccccacgccagctatgagcctgagctgcaccctgctgtgtgctaccgcatcaagagcctgcgggccaccctgcagatcttcagcacaggcagcatcaccgtgacaggcatcctgtag

SEQ ID NO: 19682 - DNA, 1023 bp, synthetic construct
  source 1..1023: mol_type = other DNA; note = Synthetic coding sequence
atgctggaggcccctggccccagtgatggctgtgagctgagcaaccccagcgccagccgggtgtcctgtgccggccagatgctggaggtgcagcccggcctgtactttggaggagctgctgctgtggccgagccagaccacctgcgggaggccggcatcacagctgtgctgactgtggacagcgaggagcccagcttcaaggccggccctggggtggaggacctgtggaggctgtttgtgcctgccctggacaagccagagacagacctgctgagccacctggacagatgtgtggccttcatcggccaggcccgggcagagggccgggctgtgctggtgcactgccacgccggcgtgagccgctctgtggccatcatcacagccttcctgatgaagacagaccagctgccctttgagaaggcctatgagaagctgcagatcctgaagccagaggccaagatgaatgaaggatttgagtggcagctgaagctgtaccaggccatgggctatgaggtggacaccagcagcgccatctacaagcagtaccgcctgcagaaggtgacagagaagtacccagagctgcagaacctgccccaggagctgtttgctgtggaccccaccaccgtgtcccagggcctgaaggatgaggtgctgtacaagtgcaggaaatgtagaagaagcctcttccgcagcagcagcatcctggaccaccgggagggcagcggccccatcgcctttgcccacaagaggatgacccccagctccatgctgaccaccggccggcaggcccagtgcaccagctacttcatcgagcctgtgcagtggatggagagcgccctgctgggcgtgatggatggccagctgctgtgccccaagtgcagcgccaagctgggcagcttcaactggtatggagagcagtgcagctgtggccgctggatcaccccagccttccagatccacaagaacagagtggatgagatgaagatcctgcctgtgctgggcagccagacaggcaagatctag

SEQ ID NO: 19683 - DNA, 807 bp, synthetic construct
  source 1..807: mol_type = other DNA; note = Synthetic coding sequence
atgtggcccctgacagccctgctgctgctggccaccctggagaagcccatcctgagcctgcaccccccctggaccaccatcttcaagggggagcgggtgaccctgaagtgtgatggctaccaccccctgctgctggagctgcagcccatcagcaccctgtggtacctgggccacctgctgctgcccagccacaagaagagcattgaggtgcagaccccaggagtgtaccgctgccagaccaggggggcccctgtgtctgaccccatccacctgtctgtgtccaatgactggctgatcctgcaggtgccctatgcccctgtgtttgaaggagagcccctggtgctgcgctgccggggctggtatgacaaggtggtgtacaagctgcactactaccatgatggccaggccgtgcgctacttccacagcagcgccaactacacagtgctgcaggcccgggccagtgacagcggccgctaccagtgcagcggcaccatgagaattcctgtggagagcgcccccatgttcagcgccaaggtggccgtgacagtgcaggaggcccggcatgctgctgctgtgcgggtgctgcaggtgcagcccaggggggcccccctgcggctgggccggcgggtgcacagccctggggcccggggccgcggggcccgcatcgtgctggtgcggggcggctaccgccacccccagtgcccagagacccagagcgtggccgccgcccctggggccggcttcagccctggccctggcctgcaccaccggcccagctccatgggccgcagcctgggctcctggtag

SEQ ID NO: 19684 - DNA, 936 bp, synthetic construct
  source 1..936: mol_type = other DNA; note = Synthetic coding sequence
atgtggcccctgacagccctgctgctgctggccaccctggagaagcccatcctgagcctgcaccccccctggaccaccatcttcaagggggagcgggtgaccctgaagtgtgatggctaccaccccctgctgctggagctgcagcccatcagcaccctgtggtacctgggccacctgctgctgcccagccacaagaagagcattgaggtgcagaccccaggagtgtaccgctgccagaccaggggggcccctgtgtctgaccccatccacctgtctgtgtccaatgactggctgatcctgcaggtgccctatgcccctgtgtttgaaggagagcccctggtgctgcgctgccggggctggtatgacaaggtggtgtacaagctgcactactaccatgatggccaggccgtgcgctacttccacagcagcgccaactacacagtgctgcaggcccgggccagtgacagcggccgctaccagtgcagcggcaccatgagaattcctgtggagagcgcccccatgttcagcgccaaggtggccgtgacagtgcaggccgcccgctgtgccgccagcactggagcccccagcacccagagccgcagccccaggagccgcagcagcaacagaactggagcccggcggctgcccccacctgctgtgtctggaaatgctgtgcggggctgcagcagccggggccgggtgctgccctggacccggcccccacctccaccccagctgcacggcccccagccctggctgctggtgattggccgcttccccagcgagagcccccgctgcccagacaggagccgctggagcccccccagcggcaccccacctcctcctggctgcagcagcagaagagctgccccccggctgcggggccaccccccagccctgcggcggcggccctggaacaaccggctggagccctag

SEQ ID NO: 19685 - DNA, 957 bp, synthetic construct
  source 1..957: mol_type = other DNA; note = Synthetic coding sequence
atgtggcccctgacagccctgctgctgctggtgcccagcagcggccaggccgccaccctggagaagcccatcctgagcctgcaccccccctggaccaccatcttcaagggggagcgggtgaccctgaagtgtgatggctaccaccccctgctgctggagctgcagcccatcagcaccctgtggtacctgggccacctgctgctgcccagccacaagaagagcattgaggtgcagaccccaggagtgtaccgctgccagaccaggggggcccctgtgtctgaccccatccacctgtctgtgtccaatgactggctgatcctgcaggtgccctatgcccctgtgtttgaaggagagcccctggtgctgcgctgccggggctggtatgacaaggtggtgtacaagctgcactactaccatgatggccaggccgtgcgctacttccacagcagcgccaactacacagtgctgcaggcccgggccagtgacagcggccgctaccagtgcagcggcaccatgagaattcctgtggagagcgcccccatgttttctgccaaggtggccgtgacagtgcaggccgcccgctgtgccgccagcactggagcccccagcacccagagccgcagccccaggagccgcagcagcaacagaactggagcccggcggctgcccccacctgctgtgtctggaaatgctgtgcggggctgcagcagccggggccgggtgctgccctggaccaggcctcctcctccaccccagctgcacggcccccagccctggctgctggtgattggccgcttccccagcgagagcccccgctgcccagacaggagccgctggagccccccatctggcaccccacctcctcctggctgcagcagccggcgggccgccccccggctgcggggccaccccccagccctgcggcggcggccctggaacaaccggctggagccctag

SEQ ID NO: 19686 - DNA, 1281 bp, synthetic construct
  source 1..1281: mol_type = other DNA; note = Synthetic coding sequence
atgtggcccctgacagccctgctgctgctggtgcccagcagcggccaggccgccaccctggagaagcccatcctgagcctgcaccccccctggaccaccatcttcaagggggagcgggtgaccctgaagtgtgatggctaccaccccctgctgctggagctgcagcccatcagcaccctgtggtacctgggccacctgctgctgcccagccacaagaagagcattgaggtgcagaccccaggagtgtaccgctgccagaccaggggggcccctgtgtctgaccccatccacctgtctgtgtccaatgactggctgatcctgcaggtgccctatgcccctgtgtttgaaggagagcccctggtgctgcgctgccggggctggtatgacaaggtggtgtacaagctgcactactaccatgatggccaggccgtgcgctacttccacagcagcgccaactacacagtgctgcaggcccgggccagtgacagcggccgctaccagtgcagcggcaccatgagaattcctgtggagagcgcccccatgttttctgccaaggtggccgtgacagtgcaggagctgttccgggcccctgtgctgcgggtgatgggcccccgggaggcccggggggccgccctgggcggcgtggtgctgcgctgtgacacccggctgcacccccagaagagggacacccccctgcagtttgccttctacaagtacagcagagctgtgagaagatttgactggggcgctgagtacacagtgcctgagcctgaggtggaggagctggagagctactggtgtgaggccgccacagccaccaggtctgtgaggaagaggagcccctggctgcagctgcccggccctggcagccccctggaccctgccagcaccacagccccagccccctgggccgccgccctggcccctggcaaccggcccctgtccttcaggaagccccctgtgagccgctctgtgcccctggtgacctctgtgaggaacaccaccagcacaggcctgcagtttcctgccagcggggcccccacagctggccccccagcctgtgccccacccacccccctggagcagagcgctggggccctgaagccagatgtggacctgctgctgcgggagatgcagctgctgaagggcctgctgagccgggtggtgctggagctgaaggagccccaggccctgcgggagctgcggggcaccccagagacccccaccagccactttgctgtgtccccaggcaccccagagaccacccctgtggagagctag

SEQ ID NO: 19687 - DNA, 369 bp, synthetic construct
  source 1..369: mol_type = other DNA; note = Synthetic coding sequence
atggccggcggctgccgggcccccagcagcgcccccaccgtgtccctgcctgagctgcggagcctgctggccagcggccgggcccggctgtttgatgtgcgcagccgggaggaggccgctgctggcaccatccctggggccctgaacatccctgtgtctgagctggagagcgccctgcagatggagcctgctgccttccaggccctgtacagcgctgagaagcccaagctggaggatgagcacctggtgttcttctgccagatgggcaagaggggcctgcaggccacccagctggcccggagcctgggctacacaggagccaggaactatgctggggcctaccgggagtggctggagaaggagagctag

SEQ ID NO: 19688 - DNA, 225 bp, synthetic construct
  source 1..225: mol_type = other DNA; note = Synthetic coding sequence
atggccggcgtgtctgagctggagagcgccctgcagatggagcctgctgccttccaggccctgtacagcgctgagaagcccaagctggaggatgagcacctggtgttcttctgccagatgggcaagaggggcctgcaggccacccagctggcccggagcctgggctacacaggagccaggaactatgctggggcctaccgggagtggctggagaaggagagctag

SEQ ID NO: 19689 - DNA, 1794 bp, synthetic construct; identical to SEQ ID NO: 19042
  source 1..1794: mol_type = other DNA; note = Synthetic coding sequence

SEQ ID NO: 19690 - DNA, 1794 bp, synthetic construct; identical to SEQ ID NO: 19042
  source 1..1794: mol_type = other DNA; note = Synthetic coding sequence

SEQ ID NO: 19691 - DNA, 453 bp, synthetic construct
  source 1..453: mol_type = other DNA; note = Synthetic coding sequence
atgggcgtgcagccccccaacttctcctgggtgctgcccggccgcctggccggcctggccctgccccggctgcctgcccactaccagttcctgctggacctgggcgtgcgccacctggtgtccctgacagagcggggccccccccacagcgacagctgccccggcctgaccctgcaccggctgcgcatcccagacttctgccccccagccccagaccagattgacagatttgtgcagatcgtggatgaggccaatgcccggggggaggccgtgggcgtgcactgtgccctgggctttggaagaacaggcaccatgctggcctgctacctggtgaaggagcggggcctggccgctggagatgccatcgccgagatccggcggctgcggcccggcagcattgagacctatgagcaggagaaggctgtgttccagttctaccagaggaccaagtag

SEQ ID NO: 19692 - DNA, 453 bp, synthetic construct; identical to SEQ ID NO: 19691
  source 1..453: mol_type = other DNA; note = Synthetic coding sequence

SEQ ID NO: 19693 - DNA, 453 bp, synthetic construct; identical to SEQ ID NO: 19691
  source 1..453: mol_type = other DNA; note = Synthetic coding sequence

SEQ ID NO: 19694 - DNA, 4866 bp, synthetic construct
  source 1..4866: mol_type = other DNA; note = Synthetic coding sequence
atggagggctgcatgggagaggagagcttccagatgtgggagctgaacagaaggctggaggcctacctggcccgggtgaaggccctggaggagcagaatgagctgctgtctgctgagctgggcggcctgcgggcccagagcgctgacacctcctggagggcccacgcagatgatgagctggccgccctgcgggccctggtggaccagcgctggagggagaagcacgccgctgaggtggcccgggacaacctggccgaggagctggagggcgtggccggccgctgccagcagctgcggctggcccgggagaggaccacagaggaggtggccaggaacagaagagctgtggaggccgagaagtgtgcccgggcctggctgagcagccaggtggccgagctggagcgggagctggaggccctgcgggtggcccacgaggaggagcgggtgggcctgaatgcccaggccgcctgtgccccccgctgcccagccccaccccggggccccccagccccagcccctgaggtggaggagctggcccggcggctgggggaggcctggagaggagctgtgcggggctaccaggagcgggtggcccacatggagaccagcctgggccaggcccgggagcggctgggccgggctgtgcagggcgcccgggagggccgcctggagctgcagcagctgcaggccgagcggggcggcctgctggagcggcgggccgccctggagcagaggctggagggccgctggcaggagcggctgcgggccacagagaagttccagctggccgtggaggccctggagcaggagaagcagggcctgcagagccagatcgcccaggtgctggagggccggcagcagctggcccacctgaagatgagcctgagcctggaggtggccacctaccgcaccctgctggaggccgagaacagccggctgcagacccctgggggcggcagcaagaccagcctgtccttccaggaccccaagctggagctgcagttccccaggaccccagagggccggcggctgggcagcctgctgcctgtgctgagccccaccagcctgcccagccccctgcctgccaccctggagacccctgtgcctgccttcctgaagaaccaggagttcctgcaggcccggacccccaccctggccagcacccccatcccccccaccccccaggcccccagccctgctgtggatgctgagatccgggcccaggatgcccccctgagcctgctgcagacccagggcggcaggaagcaggcccctgagcccctgcgggcagaggcccgggtggccatcccagcctctgtgctgcccggccctgaggagcccggcggccagaggcaggaggccagcacaggccagagcccagaagatcatgccagcctggccccacccctgagcccagaccacagcagcctggaggccaaggatggagagagcggcggcagcagggtcttcagcatctgccgcggggagggggagggccagatctggggcctggtggagaaggagacagccatcgagggcaaggtggtgagcagcctgcagcaggagatctgggaggaggaggacctgaacaggaaggagatccaggacagccaggtgcccctggagaaggagaccctgaagagcctgggggaggagatccaggagagcctgaagaccctggagaaccagagccatgagaccctggagcgggagaaccaggagtgccccaggagcctggaggaggacctggagaccctgaagagcctggagaaggagaacaaggagctgctgaaggatgtggaggtggtgcggcccctggagaaggaggccgtgggccagctgaagcccaccgggaaggaggacacccagaccctgcagagcctgcagaaggagaaccaggagctgatgaagagcctggagggcaacctggagaccttcctgtttcctggaacagagaaccaggagctggtgagcagcctgcaggagaacctggagagcctgacagccctggagaaggagaaccaggagcccctgcggagccctgaggtgggagatgaggaggccctgcggcccctgaccaaggagaaccaggagcccctgcggagcctggaggatgagaacaaggaggccttccgcagcctggagaaggagaaccaggagcccctgaagaccctggaggaggaggaccagagcatcgtgcggcccctggagacagagaaccacaagagcctgcggagcctggaggagcaggaccaggagaccctgcggaccctggagaaggagacccagcagaggcggcgcagcctgggggagcaggaccagatgaccctgcggcccccagagaaggtggacctggagcccctgaagagcctggaccaggagatcgcccggcccctggagaatgaaaaccaggagttcctgaagagcctgaaggaggagagcgtggaggccgtgaagagcctggagacagagatcctggagagcctgaagtctgctggccaggagaacctggagaccctgaagagccctgagacccaggcccccctgtggaccccagaggagatcaaccagggcgccatgaaccccctggagaaggagatccaggagcccctggagagcgtggaggtgaaccaggagaccttccggctgctggaggaggagaaccaggagagcctgcggagcctgggcgcctggaacctggagaacctgcggagccctgaggaggtggacaaggagagccagaggaacctggaggaggaggagaacctgggcaaaggagagtaccaggagagcctgcggagcctggaggaggagggccaggagctgccccagagcgcagatgtgcagcgctgggaggacacagtggagaaggaccaggagctggcccaggagagccccccaggcatggccggcgtggagaatgaagatgaggccgagctgaacctgcgggagcaggacggcttcaccgggaaggaggaggtggtggagcagggcgagctgaatgccacagaggaggtgtggatccctggagagggccaccctgagagccctgagcccaaggagcagaggggcctggtggagggcgcctctgtgaagggcggcgctgagggcctgcaggaccctgagggccagagccagcaggtgggcgcccctggcctgcaggccccccagggcctgcctgaggccatcgagcccctggtggaggatgatgtggcccctggaggagaccaggccagccctgaggtgatgctgggcagcgagcccgccatgggagagagcgctgctggagctgagcccggccctggccagggcgtgggcggcctgggggaccccggccacctgacccgggaggaggtgatggagccccccctggaggaggagagcctggaggccaagagggtgcagggcctggagggccccaggaaggacctggaggaggccggcggcctgggcacagagttcagcgagctgcccgggaagagccgggacccctgggagcccccccgggagggccgggaggagagcgaggccgaggcccccagaggagctgaggaggccttccctgctgagaccctgggccacactggaagtgatgcccccagcccctggcccctgggcagcgaggaggccgaggaggatgtgccccctgtgctggtgagccccagccccacctacacccccatcctggaggatgcccctggcccccagccccaggccgagggcagccaggaggcctcctggggcgtgcagggccgggcagaggccctgggcaaggtggagagcgagcaggaggagctgggcagcggggagatccctgagggcccccaggaggagggggaggagagccgggaggagagcgaggaggatgagctgggggagaccctgcctgacagcacccccctgggcttctacctgcggagccccaccagcccccgctgggaccccaccggggagcagaggcccccaccccagggcgagaccgggaaggagggctgggaccctgctgtgctggccagcgagggcctggaggcccctccttctgagaaggaggagggggaggagggggaggaggagtgtggccgggacagcgacctgtctgaggagtttgaggacctgggcacagaggcccccttcctgcccggggtgcctggagaggtggccgagcccctgggccaggtgccccagctgctgctggaccctgctgcctgggacagagatggagagagtgatggctttgctgatgaggaggagagcggggaggagggggaggaggaccaggaggagggccgggagcccggggccggccgctggggccctggcagctctgtgggcagcctgcaggccctgagcagcagccagagaggagagttcctggagagtgacagcgtgtctgtgtctgtgccctgggatgacagcctgcggggagctgtggccggggcccccaagacagccctggagacagagagccaggacagcgctgagcccagcggcagcgaggaggagagtgaccctgtgtccctggagcgggaggacaaggtgcccggccccctggagatccccagcggcatggaggatgctggccctggagctgacatcattggagtgaatggccagggccccaacctggagggcaagagccagcacgtgaatggaggagtgatgaatggcctggagcagagcgaggaggtgggccagggcatgcccctggtgtctgagggggaccggggcagccccttccaggaggaggagggcagcgccctgaagacctcctgggccggggcccctgtgcacctgggccagggccagttcctgaagttcacccagcgggagggggaccgggagagctggagcagcggggaggactag

SEQ ID NO: 19695 - DNA, 378 bp, synthetic construct
  source 1..378: mol_type = other DNA; note = Synthetic coding sequence
atggagcggcacaccagccaccccaacaggaaggtgcctgccaaggaggaggccaatgctgtgcccctgtgccgggccaagcccagccccagctacatcaacctgcaggccagcagccccccagccaccttcctgaacatccagaccaccaagctgcccagcgtggaccacaagcccaaggaatgtctgggcctgctggagtgcatgtatgccaacctgcagctgcagacccagctggcccagcagcagatggctgtgctggagcacctgcaggcctctgtgacccagctggcccctggccggggcagcaacaacagcagcctgcctgccctgagccccaaccccctgctgaaccacctgccccagttcagcaagtag

SEQ ID NO: 19696 - DNA, 378 bp, synthetic construct; identical to SEQ ID NO: 19695
  source 1..378: mol_type = other DNA; note = Synthetic coding sequence

SEQ ID NO: 19697 - DNA, 378 bp, synthetic construct; identical to SEQ ID NO: 19695
  source 1..378: mol_type = other DNA; note = Synthetic coding sequence

SEQ ID NO: 19698 - DNA, 378 bp, synthetic construct; identical to SEQ ID NO: 19695
  source 1..378: mol_type = other DNA; note = Synthetic coding sequence

SEQ ID NO: 19699 - DNA, 378 bp, synthetic construct; identical to SEQ ID NO: 19695
  source 1..378: mol_type = other DNA; note = Synthetic coding sequence

SEQ ID NO: 19700 - DNA, 624 bp, synthetic construct
  source 1..624: mol_type = other DNA; note = Synthetic coding sequence
atggccgaggccagcagcgccaacctgggcagcggctgtgaggagaagagacatgagggcagcagcagcgagagcgtgcccccaggcaccaccatcagccgggtgaagctgctggacaccatggtggacaccttcctgcagaagctggtggccgccggcagcagccccctgctgcactgggatggcagcgctggcccccggctgcccagcggcggccagagcgtgaagcaggccttctcctgggccgcctgccgcctgccccagggcaggaaggaggagatcagtgacatcaaggaggagggcaacctggaggccgtgctgaatgccctggacaagatcgtggaggagggcaaggtgaggaaggagcccgcctggaggcccagcggcatccctgagaaggacctgcacagcgtgatggccccctacttcctgcagcagagggacaccctgcggagacatgtgcagaagcaggaggccgagaaccagcagctggctgatgctgtgctggccggccggcggcaggtggaggagctgcagctgcaggtgcaggcccagcagcaggcctggcaggccctgcaccgggagcagcgggagctggtggccgtgctgcgggagcctgagtag

SEQ ID NO: 19701 - DNA, 618 bp, synthetic construct
  source 1..618: mol_type = other DNA; note = Synthetic coding sequence
atggccgaggccagcagcgccaacctgggcagcggctgtgaggagaagagacatgagggcagcagcagcgagagcgtgcccccaggcaccaccatcagccgggtgaagctgctggacaccatggtggacaccttcctgcagaagctggtggccgccggcagctaccagcgcttcacagactgctacaagtgcttctaccagctgcagcctgccatgacccagcagatctatgacaagttcatcgcccagctgcagaccagcatccgggaggagatcagtgacatcaaggaggagggcaacctggaggccgtgctgaatgccctggacaagatcgtggaggagggcaaggtgaggaaggagcccgcctggaggcccagcggcatccctgagaaggacctgcacagcgtgatggccccctacttcctgcagcagagggacaccctgcggagacatgtgcagaagcaggaggccgagaaccagcagctggctgatgctgtgctggccggccggcggcaggtggaggagctgcagctgcaggtgcaggcccagcagcaggcctggcaggccctgcaccgggagcagcgggagctggtggccgtgctgcgggagcctgagtag

SEQ ID NO: 19702 - DNA, 543 bp, synthetic construct
  source 1..543: mol_type = other DNA; note = Synthetic coding sequence
atggccgaggccagcagcgccaacctgggcagcggctgtgaggagaagagacatgagggcagcagcagcgagagcgtgcccccaggcaccaccatcagccgggtgaagctgctggacaccatggtggacaccttcctgcagaagctggtggccgccggcagctaccagcgcttcacagactgctacaagtgcttctaccagctgcagcctgccatgacccagcagatctatgacaagttcatcgcccagctgcagaccagcatccgggaggagatcagtgacatcaaggaggagggcaacctggaggccgtgctgaatgccctggacaagatcgtggaggagggcaaggtgaggaaggagcccgcctgcaatggcaccccctgtggggccatgtgcaggaacagaagacccaggaccagctcctggcagatgcccagctggcagggcggcggccgctggaggagctgcagctaccgcagccggcccagcagccggcccggccgcctgtacacagagaacagaggctcctggctgctgtgctag

SEQ ID NO: 19703 - DNA, 2253 bp, synthetic construct; identical to SEQ ID NO: 19350
  source 1..2253: mol_type = other DNA; note = Synthetic coding sequence

SEQ ID NO: 19704 - DNA, 2667 bp, synthetic construct
  source 1..2667: mol_type = other DNA; note = Synthetic coding sequence
atggccggcgtgggccgcagcggcggcccctggggccgcacccggggcggccgcagcggccgcctgggcgtgtccctgggcgccctgagcagcctgcccctggaggagctgccccggcccctgtgctgccgccgctgcagaagacacttcggctttgccctgcggggggagaccatccctgtgtctgtggccggcagcgccagcagccagtttgcccccctggccctgcacctgagcctgctgctgagccgcatcagcgccagccggctgacccgctggcccccaccagacaagcgggagggcagcgctgtggaccccgggaagagaagaagcctggccgccacccccagcagcagcctgccctgcaccctgattgccctgggcctgcggcatgagaaggaggccaatgagctgatggaggacctgtttgagaccttccaggatgagatgggcttcagcaacatggaggatgatggccctgaggaggaggagcgggtggccgagccccaggccaacttcaacaccccccaggccctgcgctttgaggagctgctggccaacctgctgaatgagcagcaccagatcgccaaggagctgtttgagcagctgaagatgaagaagcccagcgccaagcagcagaaggaggtggagaaggtgaagccccagtgcaaggaggtgcaccagaccctcatcctggaccctgcccagaggaagaggctgcagcagcagatgcagcagcacgtgcagctgctgacccagatccacctgctggccacctgcaaccccaacctgaaccctgaggccagcagcacccgcatctgcctgaaggagctgggcacctttgcccagagcagcatcgccctgcaccaccagtacaaccccaagttccagaccctcttccagccctgcaacctgatgggcgccatgcagctgattgaggacttcagcacccacgtgtccattgactgcagcccccacaagacagtgaagaagacagccaatgagttcccctgcctgcccaagcaggtggcctggatcctggccaccagcaaggtgttcatgtacccagagctgctgcctgtgtgcagcctgaaggccaagaacccccaggacaagatcctcttcaccaaggccgaggacaacctgctggccctgggcctgaagcactttgagggcacagagttcctgaaccccctcatcagcaagtacctgctgacctgcaagacagcccggcagctgactgtgcgcatcaagaacctgaacatgaacagagccccagacaacatcatcaagttctacaagaagaccaagcagctgcctgtgctgggcaagtgctgtgaggagatccagccccaccagtggaagccacccatcgagcgggaggagcaccggctgcccttctggctgaaggccagcctgcccagcatccaggaggagctgcggcacatggctgatggagcccgggaggtgggcaacatgacaggcaccacagagatcaacagcgaccagggcctggagaaggacaacagcgagctgggcagcgagacccgctaccccctgctgctgcccaagggcgtggtgctgaagctgaagcctgtggccgaccgcttccccaagaaggcctggaggcagaagaggagctctgtgctgaagcccctgctgatccagcccagccccagcctgcagcccagcttcaaccctgggaagaccccagcccagagcacccacagcgaggccccacccagcaagatggtgctgcgcatcccccaccccatccagcctgccaccgtgctgcagacagtgcctggggtgccccccctgggcgtgtctggaggagagagctttgagagccctgctgccctgcctgccatgcctcctgaggcccggaccagcttccccctgtctgagagccagaccctgctgagcagcgcccctgtgcccaaggtgatgatgcccagccctgccagctccatgttcaggaagccctacgtgagaagaagacccagcaagagaagaggagcccgggccttccgctgcatcaagccagcccctgtgatccacccagccagcgtcatcttcaccgtgcctgccaccaccgtgaagatcgtgtccctgggcggcggctgcaacatgatccagcctgtgaatgctgctgtggcccagagcccccagaccatccccatcgccaccctgctggtgaaccccaccagcttcccctgccccctgaaccagcccctggtggccagctctgtgagccccctgattgtgtctggcaacagcgtgaacctgcccatccccagcaccccagaggacaaggcccacatgaatgtggacatcgcctgtgctgtggctgatggagaaaatgccttccagggcctggagcccaagctggagccccaggagctgagccccctgagcgccaccgtcttccccaaggtggagcacagccctggccccccacctgtggacaagcagtgccaggagggcctgtctgagaacagcgcctaccgctggacagtggtgaagacagaggagggccggcaggccctggagcccctgccccagggcatccaggagagcctgaacaacagcagccctggggacctggaggaggtggtgaagatggagccagaagatgccacagaggagatcagcggcttcctgtag

SEQ ID NO: 19705 - DNA, 2607 bp, synthetic construct
  source 1..2607: mol_type = other DNA; note = Synthetic coding sequence
atggccggcgtgggccgcagcggcggcccctggggccgcacccggggcggccgcagcggccgcctgggcgtgtccctgggcgccctgagcagcctgcccctggaggagctgccccggcccctgtgctgccgccgctgcagaagacacttcggctttgccctgcggggggagaccatccctgtgtctgtggccggcagcgccagcagccagtttgcccccctggccctgcacctgagcctgctgctgagccgcatcagcgccagccggctgacccgctggcccccaccagacaagcgggagggcagcgctgtggaccccgggaagagaagaagcctggccgccacccccagcagcagcctgccctgcaccctgattgccctgggcctgcggcatgagaaggaggccaatgagctgatggaggacctgtttgagaccttccaggatgagatgggcttcagcaacatggaggatgatggccctgaggaggaggagcgggtggccgagccccaggccaacttcaacaccccccaggccctgcgctttgaggagctgctggccaacctgctgaatgagcagcaccagatcgccaaggagctgtttgagcagctgaagatgaagaagcccagcgccaagcagcagaaggaggtggagaaggtgaagccccagtgcaaggaggtgcaccagaccctcatcctggaccctgcccagaggaagaggctgcagcagcagatgcagcagcacgtgcagctgctgacccagatccacctgctggccacctgcaaccccaacctgaaccctgaggccagcagcacccgcatctgcctgaaggagctgggcacctttgcccagagcagcatcgccctgcaccaccagtacaaccccaagttccagaccctcttccagccctgcaacctgatgggcgccatgcagctgattgaggacttcagcacccacgtgtccattgactgcagcccccacaagacagtgaagaagacagccaatgagttcccctgcctgcccaagcaggtggcctggatcctggccaccagcaaggtgttcatgtacccagagctgctgcctgtgtgcagcctgaaggccaagaacccccaggacaagatcctcttcaccaaggccgaggacaacaagtacctgctgacctgcaagacagcccggcagctgactgtgcgcatcaagaacctgaacatgaacagagccccagacaacatcatcaagttctacaagaagaccaagcagctgcctgtgctgggcaagtgctgtgaggagatccagccccaccagtggaagccacccatcgagcgggaggagcaccggctgcccttctggctgaaggccagcctgcccagcatccaggaggagctgcggcacatggctgatggagcccgggaggtgggcaacatgacaggcaccacagagatcaacagcgaccagggcctggagaaggacaacagcgagctgggcagcgagacccgctaccccctgctgctgcccaagggcgtggtgctgaagctgaagcctgtggccgaccgcttccccaagaaggcctggaggcagaagaggagctctgtgctgaagcccctgctgatccagcccagccccagcctgcagcccagcttcaaccctgggaagaccccagcccagagcacccacagcgaggccccacccagcaagatggtgctgcgcatcccccaccccatccagcctgccaccgtgctgcagacagtgcctggggtgccccccctgggcgtgtctggaggagagagctttgagagccctgctgccctgcctgccatgcctcctgaggcccggaccagcttccccctgtctgagagccagaccctgctgagcagcgcccctgtgcccaaggtgatgatgcccagccctgccagctccatgttcaggaagccctacgtgagaagaagacccagcaagagaagaggagcccgggccttccgctgcatcaagccagcccctgtgatccacccagccagcgtcatcttcaccgtgcctgccaccaccgtgaagatcgtgtccctgggcggcggctgcaacatgatccagcctgtgaatgctgctgtggcccagagcccccagaccatccccatcgccaccctgctggtgaaccccaccagcttcccctgccccctgaaccagcccctggtggccagctctgtgagccccctgattgtgtctggcaacagcgtgaacctgcccatccccagcaccccagaggacaaggcccacatgaatgtggacatcgcctgtgctgtggctgatggagaaaatgccttccagggcctggagcccaagctggagccccaggagctgagccccctgagcgccaccgtcttccccaaggtggagcacagccctggccccccacctgtggacaagcagtgccaggagggcctgtctgagaacagcgcctaccgctggacagtggtgaagacagaggagggccggcaggccctggagcccctgccccagggcatccaggagagcctgaacaacagcagccctggggacctggaggaggtggtgaagatggagccagaagatgccacagaggagatcagcggcttcctgtag

SEQ ID NO: 19706 - DNA, 1575 bp, synthetic construct
  source 1..1575: mol_type = other DNA; note = Synthetic coding sequence
atggccggcggggcccgggaggtgctgaccctgcagctgggccactttgctggctttgtgggcgcccactggtggaaccagcaggatgctgccctgggccgggccacagacagcaaggagcccccaggagagctgtgcccagatgtgctgtacagaactggaagaaccctgcacggccaggagacctacacccccaggctcatcctgatggacctgaagggcagcctgagcagcctgaaggaggagggcggcctgtacagagacaagcagctggatgctgccatcgcctggcagggcaagctgaccacccacaagggcagcagccccctgcccacagccaccacccccaagcccctcatccccacagaggccagcatccgggtgtggagcgacttcctgcgggtgcacctgcaccccaggagcatctgcatgatccagaagtacaaccatgatggagaggccggccgcctggaggccttcggccagggcgagagcgtgctgaaggagcccaagtaccaggaggagctggaggaccggctgcacttctacgtggaggagtgtgactacctgcagggcttccagatcctgtgtgacctgcatgatggcttcagcggcgtgggcgccaaggctgctgagctgctgcaggatgagtacagcggccggggcatcatcacctggggcctgctgcccggcccctaccacagaggagaggcccagaggaacatctaccgcctgctgaacacagccttcggcctggtgcacctgacagcccacagcagcctggtgtgccccctgagcctgggcggcagcctgggcctgcggcctgagccccctgtgtccttcccctacctgcactatgatgccaccctgcccttccactgcagcgccatcctggccacagccctggacacagtgacagtgccctaccgcctgtgcagcagccctgtgtccatggtgcacctggccgacatgctgtccttctgtgggaagaaggtggtgacagctggggccatcatccccttccccctggcccctggccagagcctgcctgacagcctgatgcagtttggaggagccaccccctggacccccctgagcgcctgtggggagcccagcggcacccgctgctttgcccagagcgtggtgctgcggggcatcgaccgggcctgccacaccagccagctgaccccaggcaccccacctccttctgccctgcacgcctgcaccaccggggaggagatcctggcccagtacctgcagcagcagcagcccggggtgatgagcagcagccacctgctgctgaccccctgccgggtggccccaccctacccccacctgttcagcagctgcagccccccagctgtggagagcatccctgtgtttggagccctgtgcagcagcagcagcctgcaccagaccctggaggccctggcccgggacctgaccaagctggacctgcggcgctgggccagcttcatggatgctggggtggagcatgatgatgtggccgagctgctgcaggagctgcagagcctggcccagtgctaccagggcggggacagcctggtggactag

SEQ ID NO: 19707 - DNA, 1479 bp, synthetic construct
  source 1..1479: mol_type = other DNA; note = Synthetic coding sequence
atgccacccacctgcagccctggcctgcggcggcaggactgggcccctggccgctgtgccggcctgcacctgcccccccgggcccccagcagccctgccctgcaggccctggccggccaggccggcgtgcgcagctcctggagctttgctggggtgcctggggcccagaggctgtggatggccgaggcccagagcggcaccggccagctgcaggagcagaagaagggcctgctgattgctgtgtctgtgtctgtggacaagatcatcagccactttggagctgccaggaacctggtgcagaaggcccagctgggggacagccggctgagcccagatgtgggccacctggtgctgaccaccctgtgcccagccctgcacgccctggtggctgatggcctgaagcccttcaggaaggacctgatcaccggccagaggaggagcagcccctggagcgtggtggaggcctctgtgaagccaggcagcagcaccaggagcctgggcaccctgtacagccaggtgtcccggctggcccccctgagcagcagccgcagccgcttccacgccttcatcctgggcctgctgaacaccaagcagctggagctgtggttcagcagcctgcaggaggatgctggcctgctgagcctgctgtacctgcccaccggcttcttcagcctggcccggggcggctgccccagcctgagcacagagctgctgctgctgctgcagcccctgtctgtgctgaccttccacctggacctgctgtttgagcaccaccaccacctgcccctgggccccccccaggccccagcccctcctggccccccaccagccctgcagcagaccatgcaggccatgctgcactttggaggccgcctggcccagagcctgcggggcaccagcaaggaggccgccagtgaccccagcgacagccccaacctgcccaccccaggctcctggtgggagcagctgacccaggccagccgggtgtatgccagcggcggcacagagggcttccccctgagccgctgggcccctggccgccacggcacagctgctgaggagggcgcccaggagcggcccctgcccacagatgagatggcccctggccggggcctgtggctgggccgcctgtttggagtgcctgggggccctgcagaaaatgaaaatggagccctgaagagcagaagacccagctcctggctgccccccaccgtgtctgtgctggccctggtgaagagaggagcccctcctgagatgcccagcccccaggagctggaggccagcgcccccaggatggtgcagacccacagagctgtgcgggccctgtgtgaccacacagctgcccggccagaccagctgtccttccggcggggggaggtgctgcgggtcatcaccaccgtggatgaggactggctgcgctgtggcagagatggcatggagggcctggtgcctgtgggctacaccagcctggtgctgtag

SEQ ID NO: 19708 - DNA, 1302 bp, synthetic construct; identical to SEQ ID NO: 18678
  source 1..1302: mol_type = other DNA; note = Synthetic coding sequence

SEQ ID NO: 19709 - DNA, 2709 bp, synthetic construct
  source 1..2709: mol_type = other DNA; note = Synthetic coding sequence
atgctgagcccccagagggccctgctgtgcaacctgaaccacatccacctgcagcacgtgtccctgggcctgcacctgagccggcggcctgagctgcaggagggccccctgagcaccccacctcctcctggggacaccggcggcaaggagagccggggcccctgcagcggcaccctggtggatgccaacagcaacagccctgctgtgccctgccgctgctgccaggagcacggccctggcctggagaaccggcaggaccccagccaggaggaggagggcgccgccagccccagcgaccccggctgcagcagcagcctgagcagctgcagcgacctgagcccagatgagagccctgtgtctgtgtacctgcgggacctgcctggagatgaagatgcccacccccagcccagcatcatccccctggagcagggcagccccctggccagcgctggccctggcacctgcagcccagacagcttctgctgcagcccagacagctgcagcggggccagcagcagcccagaccccggcctggacagcaactgcaatgccctgaccacctgccaggatgtgcccagccctggcctggaggaggaggatgaaagagctgagcaggacctgcccaccagcgagctgctggaggctgatgatggcaagattgatgctgggaagacagagcccagctggaagatcaaccccatctggaagattgacacagagaagaccaaggccgagtggaagaccacagagaacaacaacacaggctggaagaacaatggaaatgtgaacagctcctggaagtctgagcctgagaagtttgattctggctggaagaccaacacccgcatcacagacagcggcagcaagacagatgctgggaagattgatggcggctggaggagtgatgtgtctgaggagcctgtgccccacaggaccatcaccagcttccacgagctggcccagaagaggaagaggggccctggcctgcccctggtgccccaggccaagaaggacagaagtgactggctgattgtgttctccccagacacagagctgcccccatctggcagccctgggggcagcagcgccccaccccgggaggtgaccaccttcaaggagctgcggagccgcagccgggccccagcccctcctgtgcccccccgggacccccctgtgggctgggccctggtgccccccaggcctcctcctcctcctgtgccccccaggaggaagaagaacagacctggcctgcagcccatcgccgagggccagagcgaggagggccgggctgtgtccccagctgctggggaggaggccccagctgccaaggagcccggggcccaggccggcctggaggtgcgcagctcctggagctttgctggggtgcctggggcccagaggctgtggatggccgaggcccagagcggcaccggccagctgcaggagcagaagaagggcctgctgattgctgtgtctgtgtctgtggacaagatcatcagccactttggagctgccaggaacctggtgcagaaggcccagctgggggacagccggctgagcccagatgtgggccacctggtgctgaccaccctgtgcccagccctgcacgccctggtggctgatggcctgaagcccttcaggaaggacctgatcaccggccagaggaggagcagcccctggagcgtggtggaggcctctgtgaagccaggcagcagcaccaggagcctgggcaccctgtacagccaggtgtcccggctggcccccctgagcagcagccgcagccgcttccacgccttcatcctgggcctgctgaacaccaagcagctggagctgtggttcagcagcctgcaggaggatgctggcctgctgagcctgctgtacctgcccaccggcttcttcagcctggcccggggcggctgccccagcctgagcacagagctgctgctgctgctgcagcccctgtctgtgctgaccttccacctggacctgctgtttgagcaccaccaccacctgcccctgggccccccccaggccccagcccctcctggccccccaccagccctgcagcagaccatgcaggccatgctgcactttggaggccgcctggcccagagcctgcggggcaccagcaaggaggccgccagtgaccccagcgacagccccaacctgcccaccccaggctcctggtgggagcagctgacccaggccagccgggtgtatgccagcggcggcacagagggcttccccctgagccgctgggcccctggccgccacggcacagctgctgaggagggcgcccaggagcggcccctgcccacagatgagatggcccctggccggggcctgtggctgggccgcctgtttggagtgcctgggggccctgcagaaaatgaaaatggagccctgaagagcagaagacccagctcctggctgccccccaccgtgtctgtgctggccctggtgaagagaggagcccctcctgagatgcccagcccccaggagctggaggccagcgcccccaggatggtgcagacccacagagctgtgcgggccctgtgtgaccacacagctgcccggccagaccagctgtccttccggcggggggaggtgctgcgggtcatcaccaccgtggatgaggactggctgcgctgtggcagagatggcatggagggcctggtgcctgtgggctacaccagcctggtgctgtag

SEQ ID NO: 19710 - DNA, 2391 bp, synthetic construct
  source 1..2391: mol_type = other DNA; note = Synthetic coding sequence
atgctgagcccccagagggccctgctgtgcaacctgaaccacatccacctgcagcacgtgtccctgggcctgcacctgagccggcggcctgagctgcaggagggccccctgagcaccccacctcctcctggggacaccggcggcaaggagagccggggcccctgcagcggcaccctggtggatgccaacagcaacagccctgctgtgccctgccgctgctgccaggagcacggccctggcctggagaaccggcaggaccccagccaggaggaggagggcgccgccagccccagcgaccccggctgcagcagcagcctgagcagctgcagcgacctgagcccagatgagagccctgtgtctgtgtacctgcgggacctgcctggagatgaagatgcccacccccagcccagcatcatccccctggagcagggcagccccctggccagcgctggccctggcacctgcagcccagacagcttctgctgcagcccagacagctgcagcggggccagcagcagcccagaccccggcctggacagcaactgcaatgccctgaccacctgccaggatgtgcccagccctggcctggaggaggaggatgaaagagctgagcaggacctgcccaccagcgagctgctggaggctgatgatggcaagattgatgctgggaagacagagcccagctggaagatcaaccccatctggaagattgacacagagaagaccaaggccgagtggaagaccacagagaacaacaacacaggctggaagaacaatggaaatgtgaacagctcctggaagtctgagcctgagaagtttgattctggctggaagaccaacacccgcatcacagacagcggcagcaagacagatgctgggaagattgatggcggctggaggagtgatgtgtctgaggagcctgtgccccacaggaccatcaccagcttccacgagctggcccagaagaggaagaggggccctggcctgcccctggtgccccaggccaagaaggacagaagtgactggctgattgtgttctccccagacacagagctgcccccatctggcagccctgggggcagcagcgccccaccccgggaggtgaccaccttcaaggagctgcggagccgcagccgggccccagcccctcctgtgcccccccgggacccccctgtgggctgggccctggtgccccccaggcctcctcctcctcctgtgccccccaggaggaagaagaacagacctggcctgcagcccatcgccgagggccagagcgaggagggccgggctgtgtccccagctgctggggaggaggccccagctgccaaggagcccggggcccaggccggcctggaggtgcgcagctcctggagctttgctggggtgcctggggcccagaggctgtggatggccgaggcccagagcggcaccggccagctgcaggagcagaagaagggcctgctgattgctgtgtctgtgtctgtggacaagatcatcagccactttggagctgccaggaacctggtgcagaaggcccagctgggggacagccggctgagcccagatgtgggccacctggtgctgaccaccctgtgcccagccctgcacgccctggtggctgatggcctgaagcccttcaggaaggacctgatcaccggccagaggaggagcagcccctggagcgtggtggaggcctctgtgaagccaggcagcagcaccaggagcctgggcaccctgtacagccaggtgtcccggctggcccccctgagcagcagccgcagccgcttccacgccttcatcctgggcctgctgaacaccaagcagctggagctgtggttcagcagcctgcaggaggatgctggctcctggtgggagcagctgacccaggccagccgggtgtatgccagcggcggcacagagggcttccccctgagccgctgggcccctggccgccacggcacagctgctgaggagggcgcccaggagcggcccctgcccacagatgagatggcccctggccggggcctgtggctgggccgcctgtttggagtgcctgggggccctgcagaaaatgaaaatggagccctgaagagcagaagacccagctcctggctgccccccaccgtgtctgtgctggccctggtgaagagaggagcccctcctgagatgcccagcccccaggagctggaggccagcgcccccaggatggtgcagacccacagagctgtgcgggccctgtgtgaccacacagctgcccggccagaccagctgtccttccggcggggggaggtgctgcgggtcatcaccaccgtggatgaggactggctgcgctgtggcagagatggcatggagggcctggtgcctgtgggctacaccagcctggtgctgtag

SEQ ID NO: 19711 - DNA, 513 bp, synthetic construct
  source 1..513: mol_type = other DNA; note = Synthetic coding sequence
atggcctctgtgagcagcgccaccttcagcggccacggggcccggagcctgctgcagttcctgcggctggtgggccagctgaagagggtgcccaggacaggctgggtgtacagaaatgtgcagaggcctgagagcgtgtctgaccacatgtacaggatggctgtgatggccatggtgatcaaggatgaccggctgaacaaggaccgggaggccatgaagcagatcacccagctgctgcctgaggacctgaggaaggagctgtatgagctgtgggaggagtatgagacccagagcagcgctgaggccaagtttgtgaagcagctggaccagtgtgagatgatcctgcaggcctctgaatatgaggacctggagcacaagccaggccgcctgcaggacttctatgacagcacagctgggaagttcaaccaccctgagatcgtgcagctggtgtctgagctggaggccgagaggagcaccaacattgctgctgctgccagcgagccccacagctag

SEQ ID NO: 19712 - DNA, 396 bp, synthetic construct
  source 1..396: mol_type = other DNA; note = Synthetic coding sequence
atggaggcccaggcccagggcctgctggagacagagcccctgcagggcacagatgaagatgctgtggccagcgctgacttcagctccatgctgtctgaggaggagaaggaggagctgaaggccgagctggtgcagctggaggatgagatcaccaccctgcggcaggtgctgagcgccaaggagcggcacctggtggagatcaagcagaagctgggcatgaacctgatgaatgagctgaagcagaacttcagcaagtcctggcatgacatgcagaccaccacagcctacaagaagacccatgagaccctgagccacgccggccagaaggccacagctgccttcagcaatgtgggcacagccatcagcaagaagtttggagacatgaggaggaagtag

SEQ ID NO: 19713 - DNA, 435 bp, synthetic construct
  source 1..435: mol_type = other DNA; note = Synthetic coding sequence
atggaggcccaggcccagggcctgctggagacagagcccctgcagggcacagatgaagatgctgtggccagcgctgacttcagctccatgctgtctgaggaggagaaggaggagctgaaggccgagctggtgcagctggaggatgagatcaccaccctgcggcaggtgctgagcgccaaggagcggcacctggtggagatcaagcagaagctgggcatgaacctgatgaatgagctgaagcagaacttcagcaagtcctggcatgacatgcagaccaccacagcctacaagaagacccatgagaccctgagccacgccggccagaaggccacagctgccttcagcaatgtgggcacagccatcagcaagaagtttggagacatgagctacagcatccgccacagcatctccatgcctgccatgaggaggaagtag

SEQ ID NO: 19714 - DNA, 948 bp, synthetic construct
  source 1..948: mol_type = other DNA; note = Synthetic coding sequence
atggccagctgcccagacagcgacaacagctgggtgctggccggcagcgagagcctgcctgtggagaccctgggccctgccagcaggatggaccctgagagcgagcgggccctgcaggccccccacagccccagcaagacagatggcaaggagctggccggcaccatggatggagagggcaccctcttccagacagagagcccccagagcggcagcatcctgacagaggagacagaggtgaagggcaccctggagggagatgtgtgtggggtggagcccccaggccctggggacacagtggtgcagggcgacctgcaggagaccaccgtggtgacaggcctgggccctgacacccaggacctggagggccagagccccccccagagcctgcccagcacccccaaggccgcctggatccgggaggagggccgctgcagcagcagtgatgatgacacagatgtggacatggagggcctgcggcggcggcggggccgggaggccggccccccccagcccatggtgcccctggccgtggagaaccaggccggcggcggcctgtctgagagcgagaccggccccatggaggaggtggagcggcaggtgctgcctgaccctgaggtgctggaggccgtgggggaccggcaggacggcctgcgggagcagctgcaggcccctgtgcccccagacagcgtgcccagcctgcagaacatgggcctgctgctggacaagctggccaaggagaaccaggacatccggctgctgcaggcccagctgcaggtgggcaccggccggcggggctgggcccgggtgacccacctgggccaggcctctgtgctggccagcagccccaagagaaatgtgtcctacctgcccacccacccagacccccccctgagccactacagccagggcgtcttccctgtgctgggcagccaccccctgtgctag

SEQ ID NO: 19715 - DNA, 2196 bp, synthetic construct
  source 1..2196: mol_type = other DNA; note = Synthetic coding sequence
atggccagctgcccagacagcgacaacagctgggtgctggccggcagcgagagcctgcctgtggagaccctgggccctgccagcaggatggaccctgagagcgagcgggccctgcaggccccccacagccccagcaagacagatggcaaggagctggccggcaccatggatggagagggcaccctcttccagacagagagcccccagagcggcagcatcctgacagaggagacagaggtgaagggcaccctggagggagatgtgtgtggggtggagcccccaggccctggggacacagtggtgcagggcgacctgcaggagaccaccgtggtgacaggcctgggccctgacacccaggacctggagggccagagccccccccagagcctgcccagcacccccaaggccgcctggatccgggaggagggccgctgcagcagcagtgatgatgacacagatgtggacatggagggcctgcggcggcggcggggccgggaggccggccccccccagcccatggtgcccctggccgtggagaaccaggccggcggggagggcgccggcggggagctgggcatcagcctgaacatgtgcctgctgggcgccctggtgctgctgggcctgggcgtgctgctcttcagcggcggcctgtctgagagcgagaccggccccatggaggaggtggagcggcaggtgctgcctgaccctgaggtgctggaggccgtgggggaccggcaggacggcctgcgggagcagctgcaggcccctgtgcccccagattctgtgcccagcctgcagaacatgggcctgctgctggacaagctggccaaggagaaccaggacatccggctgctgcaggcccagctgcaggcccagaaggaggagctgcagagcctgatgcaccagcccaagggcctggaggaggagaatgcccagctgcggggggccctgcagcagggcgaggccttccagagggccctggagagcgagctgcagcagctgcgggcccggctgcagggcctggaggccgactgtgtgcggggcccagatggagtgtgcctgagcggcggccggggcccccagggcgacaaggccatccgggagcagggcccccgggagcaggagcctgagctgtccttcctgaagcagaaggagcagctggaggccgaggcccaggccctgcggcaggagctggagcggcagaggcggctgctgggctctgtgcagcaggacctggagaggagcctgcaggatgccagcagaggagaccctgcccatgctggcctggccgagctgggccaccggctggcccagaagctgcagggcctggagaactggggccaggaccccggggtgtctgccaatgccagcaaggcctggcaccagaagagccacttccagaacagccgggagtggagcggcaaggagaagtggtgggatggccagagggacaggaaggccgagcactggaagcacaagaaggaggagagcggccgggagaggaagaagaactggggcggccaggaggaccgggagcccgccggccgctggaaggagggccggccccgggtggaggagagcggcagcaagaaggagggcaagaggcagggccccaaggagccccccaggaagagcggcagcttccacagcagtggagagaagcagaagcagccccgctggagggagggcaccaaggacagccatgaccccctgcccagctgggccgagctgctgcggcccaagtaccgggccccccagggctgcagcggcgtggatgaatgtgcccggcaggagggcctgaccttctttggaacagagctggcccctgtgcggcagcaggagctggccagcctgctgcggacctacctggcccggctgccctgggccggccagctgaccaaggagctgcccctgagccctgccttctttggagaagatggcatcttcagacatgaccggctgcgcttccgggactttgtggatgccctggaggacagcctggaggaggtggccgtgcagcagacaggagatgatgatgaggtggatgactttgaggacttcatcttcagccacttctttggagacaaggccctgaagaagaggtctgggaagaaggacaagcacagccagagccccagggctgctggcccccgggagggccacagccacagccaccaccaccaccaccggggctag

SEQ ID NO: 19716 - DNA, 2109 bp, synthetic construct
  source 1..2109: mol_type = other DNA; note = Synthetic coding sequence
atggaccctgagagcgagcgggccctgcaggccccccacagccccagcaagacagatggcaaggagctggccggcaccatggatggagagggcaccctcttccagacagagagcccccagagcggcagcatcctgacagaggagacagaggtgaagggcaccctggagggagatgtgtgtggggtggagcccccaggccctggggacacagtggtgcagggcgacctgcaggagaccaccgtggtgacaggcctgggccctgacacccaggacctggagggccagagccccccccagagcctgcccagcacccccaaggccgcctggatccgggaggagggccgctgcagcagcagtgatgatgacacagatgtggacatggagggcctgcggaggagaagaggccgggaggccggccccccccagcccatggtgcccctggccgtggagaaccaggccggcggggagggcgctggaggagagctgggcatcagcctgaacatgtgcctgctgggcgccctggtgctgctgggcctgggcgtgctgctcttcagcggcggcctgtctgagagcgagaccggccccatggaggaggtggagcggcaggtgctgcctgaccctgaggtgctggaggccgtgggggaccggcaggacggcctgcgggagcagctgcaggcccctgtgcccccagacagcgtgcccagcctgcagaacatgggcctgctgctggacaagctggccaaggagaaccaggacatccggctgctgcaggcccagctgcaggcccagaaggaggagctgcagagcctgatgcaccagcccaagggcctggaggaggagaatgcccagctgcggggggccctgcagcagggcgaggccttccagagggccctggagagcgagctgcagcagctgcgggcccggctgcagggcctggaggccgactgtgtgcggggcccagatggagtgtgcctgagcggcggccggggcccccagggcgacaaggccatccgggagcagggcccccgggagcaggagcctgagctgtccttcctgaagcagaaggagcagctggaggccgaggcccaggccctgcggcaggagctggagcggcagaggcggctgctgggctctgtgcagcaggacctggagaggagcctgcaggatgccagcagaggagaccctgcccacgccggcctggccgagctgggccaccggctggcccagaagctgcagggcctggagaactggggccaggaccccggggtgtctgccaatgccagcaaggcctggcaccagaagagccacttccagaacagccgggagtggagcggcaaggagaagtggtgggatggccagagggacaggaaggccgagcactggaagcacaagaaggaggagagcggccgggagaggaagaagaactggggcggccaggaggaccgggagcctgctggccgctggaaggagggccggccccgggtggaggagagcggcagcaagaaggagggcaagaggcagggccccaaggagccccccaggaagagcggcagcttccacagcagcggggagaagcagaagcagccccgctggagggagggcaccaaggacagccatgaccccctgcccagctgggccgagctgctgcggcccaagtaccgggccccccagggctgcagcggcgtggatgaatgtgcccggcaggagggcctgaccttcttcggcacagagctggcccctgtgcggcagcaggagctggccagcctgctgcggacctacctggcccggctgccctgggccggccagctgaccaaggagctgcccctgagccctgccttcttcggggaggatggcatcttcagacatgaccggctgcgcttccgggactttgtggatgccctggaggacagcctggaggaggtggccgtgcagcagacaggagatgatgatgaggtggatgactttgaggacttcatcttcagccacttcttcggggacaaggccctgaagaagaggtctgggaagaaggacaagcacagccagagccccagggctgctggcccccgggagggccacagccacagccaccaccaccaccaccggggctag

SEQ ID NO: 19717 - DNA, 2427 bp, synthetic construct
  source 1..2427: mol_type = other DNA; note = Synthetic coding sequence
atgatctggaggaacaactggaagagcaccaccggccgcctgaatgtgaagctgcagagcgacaagctgcagcacggctgcggccctgactacagcagcgcctggctgcctgccaatgaaagcctgtggcaggccaccaccgtgcccagcaaccacaggaacaaccacatccgccgccacagcatcgccagtgacagcggggacacaggaattggcaccagctgcagcgacagcgtggaggaccacagcaccagcagcggcaccctgtccttcaagcccagccagagcctcatcaccctgcccacagcccacgtgatgcccagcaacagcagcgccagcatcagcaagctgcgggagagcctgaccccagatggcagcaagtggagcaccagcctgatgcagaccctgggcaaccacagcagaggagagcaggacagcagcctggacatgaaggacttccggcccctgaggaagtggagcagcctgagcaagctgacagccccagacaactgtggccagggcggcaccgtgtgccgggaggagagcagaaatggcctggagaagattggcaaggccaaggccctgaccagccagctgcggaccatcggccccagctgcctgcatgacagcatggagatgctgcggctggaggacaaggagatcaacaagaagaggagcagcaccctggactgcaagtacaagtttgagagctgcagcaaagaagacttccgggccagcagcagcaccctgcggcggcagcctgtggacatgacctacagcgccctgcctgagagcaagcccatcatgaccagcagcgaggcctttgagccccccaagtacctgatgctgggccagcaggccgtgggcggcgtgcccatccagcccagcgtgaggacccagatgtggctgacagagcagctgcggaccaaccccctggagggcaggaacacagaggacagctacagcctggccccctggcagcagcagcagatcgaggacttccggcagggcagcgagacccccatgcaggtgctgaccggcagcagccggcagagctacagccctggctaccaggacttcagcaagtgggagagcatgctgaagatcaaggagggcctgctgcggcagaaggagatcgtgattgaccggcagaagcagcagatcacccacctgcacgagcgcatccgggacaatgagctgcgggcccagcacgccatgctgggccactacgtgaactgtgaggacagctatgtggccagcctgcagccccagtatgagaacaccagcctgcagacccccttcagcgaggagagcgtgagccacagccagcagggcgagtttgagcagaagctggccagcacagagaaggaggtgctgcagctgaatgagttcctgaagcagaggctgagcctcttcagcgaggagaagaagaagctggaggagaagctgaagacccgggaccgctacatcagcagcctgaagaagaagtgccagaaggagagcgagcagaacaaggagaagcagaggagaattgagaccctggagaagtacctggccgacctgcccaccctggatgatgtgcagagccagagcctgcagctgcagatcctggaggagaagaacaagaacctgcaggaggccctgattgacacagagaagaagctggaggagatcaagaagcagtgccaggacaaggagacccagctgatctgccagaagaagaaggagaaggagctggtgaccaccgtgcagagcctgcagcagaaggtggagcgctgcctggaggatggcatccggctgcccatgctggatgccaagcagctgcagaatgaaaatgacaacctgcggcagcagaatgaaacagccagcaagatcatcgacagccagcaggatgaaattgacaggatgatcctggagatccagagcatgcagggcaagctgagcaaggagaagctgaccacccagaagatgatggaggagctggagaagaaggagagaaatgtgcagaggctgaccaaggccctgctggagaaccagaggcagacagatgagacctgcagcctgctggaccagggccaggagccagaccagagccggcagcagacagtgctgagcaagaggcccctgtttgacctgactgtgattgaccagctgttcaaggagatgagctgctgcctgtttgacctgaaggccctgtgcagcatcctgaaccagagggcccagggcaaggagcccaacctgagcctgctgctgggcatccgctccatgaactgcagcgctgaggagacagaaaatgaccacagcacagagaccctgaccaagaagctgagtgatgtgtgccagctgcggcgggacattgatgagctgcggaccaccatcagtgacagatatgcccaggacatgggagacaactgcatcacccagtag

SEQ ID NO: 19718 - DNA, 2418 bp, synthetic construct
  source 1..2418: mol_type = other DNA; note = Synthetic coding sequence
atgtggggccgcttcctggcccctgaggccagcggccgggacagccctgggggcgcccgctccttccctgctggccctgactacagcagcgcctggctgcctgccaatgaaagcctgtggcaggccaccaccgtgcccagcaaccacaggaacaaccacatcagaagacacagcatcgccagtgacagcggggacaccggcatcggcaccagctgcagcgacagcgtggaggaccacagcaccagcagcggcaccctgtccttcaagcccagccagagcctcatcaccctgcccacagcccacgtgatgcccagcaacagcagcgccagcatcagcaagctgcgggagagcctgaccccagatggcagcaagtggagcaccagcctgatgcagaccctgggcaaccacagcagaggagagcaggacagcagcctggacatgaaggacttccggcccctgaggaagtggagcagcctgagcaagctgacagccccagacaactgtggccagggcggcaccgtgtgccgggaggagagcagaaatggcctggagaagattggcaaggccaaggccctgaccagccagctgcggaccatcggccccagctgcctgcatgacagcatggagatgctgcggctggaggacaaggagatcaacaagaagaggagcagcaccctggactgcaagtacaagtttgagagctgcagcaaggaggacttccgggccagcagcagcaccctgcggcggcagcctgtggacatgacctacagcgccctgcctgagagcaagcccatcatgaccagcagcgaggcctttgagccccccaagtacctgatgctgggccagcaggccgtgggcggcgtgcccatccagcccagcgtgaggacccagatgtggctgacagagcagctgcggaccaaccccctggagggcaggaacacagaagattcctacagcctggccccctggcagcagcagcagatcgaggacttccggcagggcagcgagacccccatgcaggtgctgaccggcagcagccggcagagctacagccctggctaccaggacttcagcaagtgggagagcatgctgaagatcaaggagggcctgctgcggcagaaggagatcgtcatcgaccggcagaagcagcagatcacccacctgcacgagcgcatccgggacaatgagctgcgggcccagcacgccatgctgggccactacgtgaactgtgaagattcctatgtggccagcctgcagccccagtatgagaacaccagcctgcagacccccttcagcgaggagagcgtgagccacagccagcagggcgagtttgagcagaagctggccagcacagagaaggaggtgctgcagctgaatgagttcctgaagcagaggctgagcctcttcagcgaggagaagaagaagctggaggagaagctgaagacccgggaccgctacatcagcagcctgaagaagaagtgccagaaggagagcgagcagaacaaggagaagcagaggcgcatcgagaccctggagaagtacctggccgacctgcccaccctggatgatgtgcagagccagagcctgcagctgcagatcctggaggagaagaacaagaacctgcaggaggccctgattgacacagagaagaagctggaggagatcaagaagcagtgccaggacaaggagacccagctgatctgccagaagaagaaggagaaggagctggtgaccaccgtgcagagcctgcagcagaaggtggagcgctgcctggaggatggcatccggctgcccatgctggatgccaagcagctgcagaatgaaaatgacaacctgcggcagcagaatgaaacagccagcaagatcatcgacagccagcaggatgaaattgacaggatgatcctggagatccagagcatgcagggcaagctgagcaaggagaagctgaccacccagaagatgatggaggagctggagaagaaggagagaaatgtgcagaggctgaccaaggccctgctggagaaccagaggcagacagatgagacctgcagcctgctggaccagggccaggagccagaccagagccggcagcagacagtgctgagcaagaggcccctgtttgacctgaccgtcatcgaccagctgttcaaggagatgagctgctgcctgtttgacctgaaggccctgtgcagcatcctgaaccagagggcccagggcaaggagcccaacctgagcctgctgctgggcatccgctccatgaactgcagcgctgaggagacagaaaatgaccacagcacagagaccctgaccaagaagctgagtgatgtgtgccagctgcggcgggacattgatgagctgcggaccaccatcagtgacagatatgcccaggacatgggagacaactgcatcacccagtag

SEQ ID NO: 19719 - DNA, 1488 bp, synthetic construct
  source 1..1488: mol_type = other DNA; note = Synthetic coding sequence
atggtggaggagcacgagctgaggaaggagcgcatccaggaggactacaatgacaagtactgggaccagcgctacaccatcgtgcagcagcagatccccagcttcctgcagaagatggctgacaagatcctgagcacaggcaagtacctgaatgtggtgagagaatgtggccatgatgtgacctgccctgtggccaaggagatcatctacaccctgaaggagcgggcctacgtggagcagatcgagaaggccttcaactatgccagcaaggtgctgctggacttcctgatggaggagaaggagctggtggcccacctgcggagcatcaagcgctacttcctgatggaccagggcgacttctttgtgcacttcatggacctggccgaggaggagctgaggaagcctgtggaggacatcaccccaccccggctggaggccctgctggagctggccctgaggatgagcacagccaacacagaccccttcaaggatgacctgaagattgacctgatgcctcatgacctgatcacccagctgctgcgggtgctggccatcgagaccaagcaggagaaggccatggcccacgccgaccccacagagctggccctgagcggcctggaggccttctcctttgactacatcgtgaagtggcccctgagcctcatcatcaacaggaaggccctgacccgctaccagatgctgttccgccacatgttctactgcaagcacgtggagcggcagctgtgcagcgtgtggatcagcaacaagacagccaagcagcacagcctgcacagcgcccagtggtttgctggggccttcaccctgcggcagaggatgctgaactttgtgcagaacatccagtactacatgatgtttgaggtgatggagcccacctggcacatcctggagaagaacctgaagagcgccagcaacattgatgatgtgctgggccaccacacaggcttcctggacacctgcctgaaggactgcatgctgaccaaccctgagctgctgaaggtgttcagcaagctgatgtctgtgtgtgtgatgttcaccaactgcatgcagaagttcacccagagcatgaagctggatggagagctgggcggccagaccctggagcacagcacagtgctgggcctgcctgctggagctgaggagcgggccaggaaggagctggccaggaagcacctggccgagcacgccgacacagtgcagctggtgtctggctttgaggccaccatcaacaagtttgacaagaacttcagcgcccacctgctggacctgctggcccggctgagcatctacagcaccagtgactgtgaacatggcatggccagcgtcatcagccggctggacttcaacggcttctacacagagcggctggagcggctgtctgctgagaggagccagaaggccaccccccaggtgcctgtgctgcggggccccccagccccagccccccgggtggccgtgacagcccagtag

SEQ ID NO: 19720 - DNA, 2709 bp, synthetic construct; identical to SEQ ID NO: 18373
  source 1..2709: mol_type = other DNA; note = Synthetic coding sequence

SEQ ID NO: 19721 - DNA, 1620 bp, synthetic construct; identical to SEQ ID NO: 19445
  source 1..1620: mol_type = other DNA; note = Synthetic coding sequence

SEQ ID NO: 19722 - DNA, 453 bp, synthetic construct
  source 1..453: mol_type = other DNA; note = Synthetic coding sequence
atgagaggagaccggggccggggccggggcggccgcttcggcagcagaggaggccctgggggcggcttccggccctttgtgccccacatcccctttgacttctacctgtgtgagatggccttcccccgggtgaagccagccccagatgagaccagcttcagcgaggccctgctgaagaggaaccaggacctggcccccaacagcgctgagcaggccagcatcctgagcctggtgaccaagatcaacaacgtgattgacaacctgattgtggcccctggcacctttgaggtgcagatcgaggaggtgcggcaggtgggcagctacaagaagggcaccatgaccaccggccacaacgtggccgacctggtggtgatcctgaagatcctgcccacctgtgaatgtgcctgcttctggagctgggagcagaacatcgccctgggcctgggcgtgtag

SEQ ID NO: 19723 - DNA, 348 bp, synthetic construct
  source 1..348: mol_type = other DNA; note = Synthetic coding sequence
atggccttcccccgggtgaagccagccccagatgagaccagcttcagcgaggccctgctgaagaggaaccaggacctggcccccaacagcgctgagcaggccagcatcctgagcctggtgaccaagatcaacaacgtgattgacaacctgattgtggcccctggcacctttgaggtgcagatcgaggaggtgcggcaggtgggcagctacaagaagggcaccatgaccaccggccacaacgtggccgacctggtggtgatcctgaagatcctgcccaccctggaggccgtggccgccctgggcaacaaggtggtggagagcctgcgggcccaggaccccagcgagtag

SEQ ID NO: 19724 - DNA, 312 bp, synthetic construct
  source 1..312: mol_type = other DNA; note = Synthetic coding sequence
atgtctgactgctacacagagctggagaaggctgtgattgtgctggtggagaacttctacaagtatgtgtccaagtacagcctggtgaagaacaagatcagcaagagcagcttccgggagatgctgcagaaggagctgaaccacatgctgagtgacaccggcaacaggaaggctgctgacaagctgatccagaacctggatgccaaccatgatggccgcatcagctttgatgagtactggaccctgattggaggcatcaccggccccatcgccaagctgattcatgagcaggagcagcagagcagcagctag

SEQ ID NO: 19725 - DNA, 312 bp, synthetic construct; identical to SEQ ID NO: 19724
  source 1..312: mol_type = other DNA; note = Synthetic coding sequence

SEQ ID NO: 19726 - DNA, 312 bp, synthetic construct; identical to SEQ ID NO: 19724
  source 1..312: mol_type = other DNA; note = Synthetic coding sequence

SEQ ID NO: 19727 - DNA, 312 bp, synthetic construct; identical to SEQ ID NO: 19724
  source 1..312: mol_type = other DNA; note = Synthetic coding sequence

SEQ ID NO: 19728 - DNA, 306 bp, synthetic construct; identical to SEQ ID NO: 19073
  source 1..306: mol_type = other DNA; note = Synthetic coding sequence

SEQ ID NO: 19729 - DNA, 306 bp, synthetic construct; identical to SEQ ID NO: 19073
  source 1..306: mol_type = other DNA; note = Synthetic coding sequence

SEQ ID NO: 19730 - DNA, 222 bp, synthetic construct
  source 1..222: mol_type = other DNA; note = Synthetic coding sequence
atgagctaccagcagcagcagtgcaagcagccctgccagcccccacctgtgtgccccacccccaagtgcccagagccctgccccccacccaagtgcccagagccctacctgcccccaccctgccccccagagcactgccccccaccaccctgccaggacaagtgcccccctgtgcagccctacccaccctgccagcagaagtacccacccaagagcaagtag

SEQ ID NO: 19731 - DNA, 219 bp, synthetic construct
  source 1..219: mol_type = other DNA; note = Synthetic coding sequence
atgagctaccagcagcagcagtgcaagcagccctgccagcccccacctgtgtgccccacccccaagtgcccagagccctgccccccacccaagtgcccagagccctgccccccacccaagtgcccccagccctgccccccccagcagtgccagcagaagtgcccccctgtgacccccagccccccctgccagcccaagtgcccccccaagagcaagtag

SEQ ID NO: 19732 - DNA, 219 bp, synthetic construct; identical to SEQ ID NO: 19731
  source 1..219: mol_type = other DNA; note = Synthetic coding sequence

SEQ ID NO: 19733 - DNA, 219 bp, synthetic construct; identical to SEQ ID NO: 19554
  source 1..219: mol_type = other DNA; note = Synthetic coding sequence

SEQ ID NO: 19734 - DNA, 219 bp, synthetic construct; identical to SEQ ID NO: 19554
  source 1..219: mol_type = other DNA; note = Synthetic coding sequence

SEQ ID NO: 19735 - DNA, 219 bp, synthetic construct; identical to SEQ ID NO: 19554
  source 1..219: mol_type = other DNA; note = Synthetic coding sequence

SEQ ID NO: 19736 - DNA, 8553 bp, synthetic construct
  source 1..8553: mol_type = other DNA; note = Synthetic coding sequence
atgcccaagctgctgcagggcgtcatcaccgtgattgatgtgttctaccagtatgccacccagcacggggagtatgacaccctgaacaaggccgagctgaaggagctgctggagaatgagttccaccagatcctgaagaaccccaatgaccctgacacagtggacatcatcctgcagagcctggaccgggaccacaacaagaaggtggacttcacagagtacctgctgatgatcttcaagctggtgcaggccaggaacaagatcatcggcaaggactactgccaggtgtctggcagcaagctgagagatgacacccaccagcaccaggaggagcaggaggagacagagaaggaggagaacaagaggcaggagagcagcttcagccacagctcctggagcgctggggagaatgacagctacagcagaaatgtgcggggcagcctgaagccaggcacagagagcatcagccggcggctgtccttccagagggacttcagcggccagcacaacagctacagcggccagagcagcagctatggagagcagaacagcgacagccaccagagcagcggccggggccagtgtggcagcggcagcggccagagccccaactacggccagcacggcagcggcagcggccagagcagcagcaatgacacccacggcagcggcagcggccagagcagcggcttcagccagcacaagagcagcagcggccagagcagcggctacagccagcacggcagcggcagcggccacagcagcggctacggccagcacggcagccgcagcggccagagcagcagaggagagcggcacaggagcagcagcggcagcagcagcagctatggccagcacggcagcggcagccggcagagcctgggccacggccggcagggcagcggcagccggcagagccccagccacgtgcgccacggcagcggcagcggccacagcagcagccacggccagcacggcagcggcagcagctacagctacagccggggccactatgagagcggcagcggccagaccagcggcttcggccagcatgaaagtggcagcggccagagcagcggctacagcaagcacggcagcggcagcggccacagcagcagccagggccagcacggcagcaccagcggccaggccagcagcagcggccagcacggcagcagcagccggcagagcagcagctatggccagcatgaaagtgccagccgccacagcagcggccggggccagcacagcagcggcagcggccagagccctggccacggccagaggggcagcggcagcggccagagccccagcagcggccagcacggcaccggcttcggccgcagcagcagcagcggcccctacgtgtctggcagcggctacagcagcggcttcggccaccacgagagcagcagcgagcacagcagcggctacacccagcacggcagcggcagcggccacagcagcggccacggccagcacggcagccgcagcggccagagcagcagaggagagcggcagggcagcagcgctggcagcagcagcagctatggccagcacggcagcggcagccggcagagcctgggccacagcagacatggcagcggcagcggccagagccccagccccagccggggcagacatgagagcggcagccggcagagcagcagctatggcccccacggctacggcagcggccgcagcagcagccggggcccctatgagagcggcagcggccacagcagcggcctgggccaccaggagagccgcagcggccagagcagcggctacggccagcacggcagcagcagcggccacagcagcacccacggccagcacggcagcaccagcggccagagcagcagctgtggccagcacggggccaccagcggccagagcagcagccacggccagcacggcagcggcagcagccagagcagccgctatggccagcagggcagcggcagcggccagagccccagccggggcagacatggcagtgactttggccacagcagcagctatggccagcacggcagcggcagcggctggagcagcagcaatggcccccacggctctgtgtctggccagagcagcggcttcggccacaagagcggcagcggccagagcagcggctacagccagcacggcagcggcagcagccacagcagcggctacaggaagcacggcagccgcagcggccagagcagccgctctgagcagcacggcagcagcagcggcctgagcagcagctatggccagcacggcagcggcagccaccagagcagcggccacggccggcagggcagcggcagcggccacagccccagccgggtgagacatggcagcagcagcggccacagcagcagccacggccagcacggcagcggcaccagctgcagcagcagctgtggccactatgaaagtggcagcggccaggccagcggcttcggccagcacgagagcggcagcggccagggctacagccagcacggcagcgccagcggccacttcagcagccagggccgccacggcagcaccagcggccagagcagcagcagcggccagcacgacagcagcagcggccagagcagcagctatggccagcacgagagcgccagccaccacgccagcggccggggcagacatggcagcggcagcggccagagccctggccacggccagaggggcagcggcagcggccagagccccagctatggaagacatggcagcggcagcggccgcagcagcagcagcggccgccacggcagcggcagcggccagagcagcggcttcggccacaagagcagcagcggccagagcagcggctacacccagcacggcagcggcagcggccacagcagcagctatgagcagcacggcagccgcagcggccagagcagccgctctgagcagcacggcagcagcagcggcagcagcagcagctatggccagcacggcagcggcagccggcagagcctgggccacggccagcacggcagcggcagcggccagagccccagccccagccggggccgccacggcagcggcagcggccagagcagcagctatggcccctacagaagtggcagcggctggagcagcagccggggcccctatgagagcggcagcggccacagcagcggcctgggccaccgggagagccgcagcggccagagcagcggctacggccagcacggcagcagcagcggccacagcagcacccacggccagcacggcagcaccagcggccagagcagcagctgtggccagcacggggccagcagcggccagagcagcagccacggccagcacggcagcggcagcagccagagcagcggctacggccggcagggcagcggcagcggccagagccctggccacggccagaggggcagcggcagccggcagagccccagctatggccgccacggcagcggcagcggccgcagcagcagcagcggccagcacggcagcggcctgggggagagcagcggcttcggccaccacgagagcagcagcggccagagcagcagctacagccagcacggcagcggcagcggccacagcagcggctacggccagcacggcagccgcagcggccagagcagcagaggagagagacatggcagcagcagcggcagcagcagccactacggccagcacggcagcggcagccggcagagcagcggccacggccggcagggcagcggcagcggccacagccccagccggggccgccacggcagcggcctgggccacagcagcagccacggccagcacggcagcggcagcggccgcagcagcagccggggcccctatgagagccgcagcggccacagctctgtgtttggccagcatgaaagtggcagcggccacagcagcgcctacagccagcacggcagcggcagcggccacttctgcagccagggccagcacggcagcaccagcggccagagcagcacctttgaccaggagggcagcagcacaggccagagcagcagctatggccaccggggcagcggcagcagccagagcagcggctacggccgccacggggccggcagcggccagagccccagccggggcagacatggcagcggcagcggccacagcagcagctatggccagcacggcagcggcagcggctggagcagcagcagcggcagacatggcagcggcagcggccagagcagcggcttcggccaccacgagagcagctcctggcagagcagcggctgcacccagcacggcagcggcagcggccacagcagcagctatgagcagcacggcagccgcagcggccagagcagcagaggagagagacatggcagcagcagcggcagcagcagcagctatggccagcacggcagcggcagccggcagagcctgggccacggccagcacggcagcggcagcggccagagccccagccccagccggggccgccacggcagcggcagcggccagagcagcagctacagcccctacggcagcggcagcggctggagcagcagccggggcccctatgagagcggcagcagccacagcagcggcctgggccaccgggagagccgcagcggccagagcagcggctacggccagcacggcagcagcagcggccacagcagcacccacggccagcacggcagcaccagcggccagagcagcagctgtggccagcacggggccagcagcggccagagcagcagccacggccagcacggcagcggcagcagccagagcagcggctacggccggcagggcagcggcagcggccagagccctggccacggccagaggggcagcggcagccggcagagccccagctatggccgccacggcagcggcagcggccgcagcagcagcagcggccagcacggcagcggcctgggggagagcagcggcttcggccaccacgagagcagcagcggccagagcagcagctacagccagcacggcagcggcagcggccacagcagcggctacggccagcacggcagccgcagcggccagagcagcagaggagagagacatggcagcagcagccgcagcagcagccgctatggccagcacggcagcggcagccggcagagcagcggccacggccggcagggcagcggcagcggccagagccccagccggggccgccacggcagcggcctgggccacagcagcagccacggccagcacggcagcggcagcggccgcagcagcagccggggcccctatgagagccgcagcggccacagctctgtgtttggccagcatgaaagtggcagcggccacagcagcgcctacagccagcacggcagcggcagcggccacttctgcagccagggccagcacggcagcaccagcggccagagcagcacctttgaccaggagggcagcagcacaggccagagcagcagccacggccagcacggcagcggcagcagccagagcagcagctatggccagcagggcagcggcagcggccagagccccagccggggcagacatggcagcggcagcggccacagcagcagctatggccagcacggcagcggcagcggctggagcagcagcagcggcagacatggcagcggcagcggccagagcagcggcttcggccaccacgagagcagctcctggcagagcagcggctacacccagcacggcagcggcagcggccacagcagcagctatgagcagcacggcagccgcagcggccagagcagcagaggagagcagcacggcagcagcagcggcagcagcagcagctatggccagcacggcagcggcagccggcagagcctgggccacggccagcacggcagcggcagcggccagagccccagccccagccggggccgccacggcagcggcagcggccagagcagcagctatggcccctacggcagcggcagcggctggagcagcagccggggcccctatgagagcggcagcggccacagcagcggcctgggccaccgggagagccgcagcggccagagcagcggctacggccagcacggcagcagcagcggccacagcagcacccacggccagcacggcagcgccagcggccagagcagcagctgtggccagcacggggccagcagcggccagagcagcagccacggccagcacggcagcggcagcagccagagcagcggctacggccggcagggcagcggcagcggccagagccctggccacggccagaggggcagcggcagccggcagagccccagctatggccgccacggcagcggcagcggccgcagcagcagcagcggccagcacggccctggcctgggggagagcagcggcttcggccaccacgagagcagcagcggccagagcagcagctacagccagcacggcagcggcagcggccacagcagcggctacggccagcacggcagccgcagcggccagagcagcagaggagagagacatggcagcagcagcggcagcagcagccgctatggccagcacggcagcggcagccggcagagcagcggccacggccggcagggcagcggcagcggccacagccccagccggggccgccacggcagcggcagcggccacagcagcagccacggccagcacggcagcggcagcggccgcagcagcagccggggcccctatgagagccgcagcggccacagctctgtgtttggccagcatgaaagtggcagcggccacagcagcgcctacagccagcacggcagcggcagcggccacttctgcagccagggccagcacggcagcaccagcggccagagcagcacctttgaccaggagggcagcagcacaggccagagcagcagccacggccagcacggcagcggcagcagccagagcagcagctatggccagcagggcagcggcagcggccagagccccagccggggcagacatggcagcggcagcggccacagcagcagctatggccagcacggcagcggcagcggctggagcagcagcagcggcagacatggcagcggcagcggccagagcagcggcttcggccaccacgagagcagctcctggcagagcagcggctacacccagcacggcagcggcagcggccacagcagcagctatgagcagcacggcagccgcagcggccagagcagcagaggagagagacatggcagcagcagcggcagcagcagcagctatggccagcacggcagcggcagccggcagagcctgggccacggccagcacggcagcggcagcggccagagccccagccccagccggggccgccacggcagcggcagcggccagagcagcagctacagcccctacggcagcggcagcggctggagcagcagccggggcccctatgagagcggcagcggccacagcagcggcctgggccaccgggagagccgcagcggccagagcagcggctacggccagcacggcagcagcagcggccacagcagcacccacggccagcacggcagcaccagcggccagagcagcagctgtggccagcacggggccagcagcggccagagcagcagccacggccagcacggcagcggcagcagccagagcagcggctacggccggcagggcagcggcagcggccagagccctggccacggccagaggggcagcggcagccggcagagccccagctatggccgccacggcagcggcagcggccgcagcagcagcagcggccagcacggcagcggcctgggggagagcagcggcttcggccaccacgagagcagcagcggccagagcagcagctacagccagcacggcagcggcagcggccacagcagcggctacggccagcacggcagccgcagcggccagagcagcagaggagagagacatggcagcagcagcggcagcagcagccactacggccagcacggcagcggcagccggcagagcagcggccacggccggcagggcagcggcagcggccagagccccagccggggccgccacggcagcggcctgggccacagcagcagccacggccagcacggcagcggcagcggccgcagcagcagccggggcccctatgagagccggctgggccacagctctgtgtttggccagcatgaaagtggcagcggccacagcagcgcctacagccagcacggcagcggcagcggccacttctgcagccagggccagcacggcagcaccagcggccagagcagcacctttgaccaggagggcagcagcacaggccagagcagcagctatggccaccggggcagcggcagcagccagagcagcggctacggccgccacggggccggcagcggccagagcctgagccacggcagacatggcagcggcagcggccagagcagcagctatggccagcacggcagcggcagcggccagagcagcggctacagccagcacggcagcggcagcggccaggacggctacagctactgcaagggcggcagcaaccatgatggcggcagcagcggcagctacttcctgtccttccccagcagcaccagcccctatgaatatgtgcaggagcagcgctgctacttctaccagtag

SEQ ID NO: 19737 - DNA, 876 bp, synthetic construct
  source 1..876: mol_type = other DNA; note = Synthetic coding sequence
atgagcagtggagcagatggcggcggcggcgctgctgtggccgcccggagtgacaagggcagccctggagaagatggctttgtgcccagcgccctgggcacccgggagcactgggatgctgtgtatgaaagagagctgcagaccttccgggagtatggagacacaggagagatctggtttggagaggagagcatgaacagactcatccgctggatgcagaagcacaagatccccctggatgcctctgtgctggacatcggcactggaaatggagtcttcctggtggagctggccaagtttggcttcagcaacatcaccggcatcgactacagccccagcgccatccagctgagcggcagcatcatcgagaaggagggcctgagcaacatcaagctgaaggtggaggacttcctgaacctgagcacccagctgagcggcttccacatctgcatcgacaagggcacctttgatgccatcagcctgaacccagacaatgccatcgagaagaggaagcagtatgtgaagagcctgagccgggtgctgaaggtgaagggcttcttcctgatcaccagctgcaactggaccaaggaggagctgctgaatgagttcagcgagggctggagcacagtggccggcttctggctgacagctgccctgacctcctgggcccaggccatcttcagcaccagcgccagccgggtgggcggcaccaccggcacccaccaccacgcctggatcatctttgtgttcctggccgagacccgcttctgccacgtggtgcaggccggcctggagctgctgggcagcagtgacagccccacctggccacccaaggtgctgggcctgtaccacgcccggcccagcctggccttctag

SEQ ID NO: 19738 - DNA, 633 bp, synthetic construct
  source 1..633: mol_type = other DNA; note = Synthetic coding sequence
atggccccctggggcaagaggctggccggcgtgcggggcgtgctgctggacatctctggagtgctgtatgattctggagctgggggcggcacagccatcgccggctctgtggaggccgtggcccggctgaagaggagccggctgaaggtgcgcttctgcaccaatgaaagccagaagagcagagctgagctggtgggccagctgcagaggctgggctttgacatcagcgagcaggaggtgacagccccagccccagctgcctgccagatcctgaaggagcagggcctgcggccctacctgctgattcatgatggagtgcgctcagaatttgaccagattgacaccagcaaccccaactgtgtggtgattgctgatgctggggagagcttctcctaccagaacatgaacaatgccttccaggtgctgatggagctggagaagcctgtgctgatcagcctgggcaagggccgctactacaaggagaccagcggcctgatgctggatgtgggcccctacatgaaggccctggagtatgcctgtggcatcaaggccgaggtggtgggcaagcccagccctgagttcttcaagagcgccctgcaggccatcggcgtggaggcccaccaggcccagtag

SEQ ID NO: 19739 - DNA, 813 bp, synthetic construct
  source 1..813: mol_type = other DNA; note = Synthetic coding sequence
atggccccctggggcaagaggctggccggcgtgcggggcgtgctgctggacatctctggagtgctgtatgattctggagctgggggcggcacagccatcgccggctctgtggaggccgtggcccggctgaagaggagccggctgaaggtgcgcttctgcaccaatgaaagccagaagagcagagctgagctggtgggccagctgcagaggctgggctttgacatcagcgagcaggaggtgacagccccagccccagctgcctgccagatcctgaaggagcagggcctgcggccctacctgctgattcatgatggagtgcgctcagaatttgaccagattgacaccagcaaccccaactgtgtggtgattgctgatgctggggagagcttctcctaccagaacatgaacaatgccttccaggtgctgatggagctggagaagcctgtgctgatcagcctgggcaagggccgctactacaaggagaccagcggcctgatgctggatgtgggcccctacatgaaggccctggagtatgcctgtggcatcaaggccgaggtggtgggcaagcccagccctgagttcttcaagagcgccctgcaggccatcggcgtggaggcccaccaggccgtgatgattggagatgacatcgtgggagatgtgggcggggcccagagatgtggcatgagggccctgcaggtgaggacaggcaagttccggcccagtgatgagcaccaccctgaggtgaaggcagatggctacgtggacaacctggccgaggccgtggacctgctgctgcagcacgccgacaagtag

SEQ ID NO: 19740 - DNA, 3948 bp, synthetic construct
  source 1..3948: mol_type = other DNA; note = Synthetic coding sequence
atggctgacacagacctcttcatggagtgtgaggaggaggagctggagccctggcagaagatcagtgatgtgattgaggacagcgtggtggaggactacaacagcgtggacaagaccaccaccgtgtctgtgtcccagcagcctgtgtctgcccctgtgcccatcgccgcccacgcctctgtggccggccacctgagcaccagcaccaccgtgagcagcagcggggcccagaacagcgacagcaccaagaagaccctggtgaccctcatcgccaacaacaatgcccctggcacccagtttgtgaagcccaccgtgggcgtgccccaggtgttcagccagatgacccctgtgcggcccggcagcaccatgcctgtgcggcccaccaccaacaccttcaccaccgtcatcccagccaccctgaccatccgcagcacagtgccccagagccagagccagcagaccaagagcacccccagcaccagcaccacccccacagccacccagcccaccagcctgggccagctggccgtgcagagccctggccagagcaaccagaccaccaaccccaagctggcccccagcttccccagccccccagctgtgtccatcgccagctttgtgacagtgaagaggcctggggtgactggagagaacagcaatgaggtggccaagctggtgaacaccctgaacaccatccccagcctgggccagagccctggccctgtggtggtgagcaacaacagcagcgcccacggcagccagaggaccagcggccctgagagctccatgaaggtgaccagcagcatccctgtgtttgacctgcaggacggcggcaggaagatctgcccccgctgcaatgcccagttccgggtgacagaggccctgcggggccacatgtgctactgctgcccagagatggtggagtaccagaagaagggcaagagcctggacagcgagcccagcgtgcccagcgctgccaagccacccagccctgagaagacagcccctgtggccagcacccccagcagcacccccatcccagccctgagcccccccaccaaggtgcctgagcccaatgaaaatgtgggagatgctgtgcagaccaagctgatcatgctggtggatgacttctactacggcagagatggcggcaaggtggcccagctgaccaacttccccaaggtggccaccagcttccgctgcccccactgcaccaagaggctgaagaacaacatccgcttcatgaaccacatgaagcaccacgtggagctggaccagcagaatggagaggtggatggccacaccatctgccagcactgctaccggcagttcagcacccccttccagctgcagtgccacctggagaatgtgcacagcccctatgagagcaccaccaagtgcaagatctgtgagtgggcctttgagagcgagcccctcttcctgcagcacatgaaggacacccacaagccaggagagatgccctacgtgtgccaggtgtgccagtaccgcagcagcctgtacagcgaggtggatgtgcacttcaggatgattcatgaggacaccaggcacctgctgtgcccctactgcctgaaggtgttcaagaatggaaatgccttccagcagcactacatgaggcaccagaagagaaatgtgtaccactgcaacaagtgccgcctgcagttcctgtttgccaaggacaagattgagcacaagctgcagcaccacaagaccttcaggaagcccaagcagctggagggcctgaagccaggcaccaaggtgaccatccgggccagccggggccagcccaggacagtgcctgtgagcagcaatgacaccccaccttctgccctgcaggaggccgcccccctgaccagctccatggaccccctgcctgtgttcctgtacccacctgtgcagaggagcatccagaagagagctgtgaggaagatgtctgtgatgggccggcagacctgcctggagtgcagctttgagatcccagacttccccaaccacttccccacctacgtgcactgcagcctgtgccgctacagcacctgctgcagccgggcctatgccaaccacatgatcaacaaccacgtgcccaggaagagccccaagtacctggccctcttcaagaacagcgtgtctggcatcaagctggcctgcaccagctgcacctttgtgacctctgtgggagatgccatggccaagcacctggtgttcaaccccagccacaggagcagcagcatcctgccccggggcctgacctggatcgcccacagcagacatggccagacccgggacagagtgcatgacagaaatgtgaagaacatgtacccacctccttccttccccaccaacaaggccgccaccgtgaagtctgctggggccaccccagctgagcctgaggagctgctgacccccctggccccagccctgcccagccctgccagcacagccaccccaccacccacccccacccacccccaggccctggccctgccccccctggccacagaaggagcagaatgtctgaatgtggatgaccaggatgagggcagccctgtgacccaggagcctgagctggccagcggcggcggcggcagcggaggagtgggcaagaaggagcagctgtctgtgaagaagctgcgggtggtgctgtttgccctgtgctgcaacacagagcaggccgctgagcacttcaggaacccccagaggcgcatccgccgctggctgcggcgcttccaggccagccagggcgagaacctggagggcaagtacctgagctttgaggccgaggagaagctggccgagtgggtgctgacccagcgggagcagcagctgcctgtgaatgaggagaccctcttccagaaggccaccaagattggccgcagcctggagggcggcttcaagatctcctatgagtgggccgtgcgcttcatgctgcggcaccacctgacccctcatgccaggagagctgtggcccacaccctgcccaaggatgtggccgagaatgccggcctcttcatcgactttgtgcagaggcagatccacaaccaggacctgcccctgtccatgattgtggccattgatgagatcagcctcttcctggacacagaggtgctgagcagtgatgacagaaaagaaaatgccctgcagacagtgggcactggagagccctggtgtgatgtggtgctggccatcctggctgatggcaccgtgctgcccaccctggtgttctaccggggccagatggaccagcctgccaacatgccagacagcatcctgctggaggccaaggagagcggctacagtgatgatgagatcatggagctgtggagcaccagggtgtggcagaagcacacagcctgccagaggagcaagggcatgctggtgatggactgccacaggacccacctgtctgaggaggtgctggccatgctgagcgccagcagcaccctgcctgctgtggtgcctgctggctgcagcagcaagatccagcccctggatgtgtgcatcaagaggacagtgaagaacttcctgcacaagaagtggaaggagcaggcccgggagatggctgacacagcctgtgacagtgatgtgctgctgcagctggtgctggtgtggctgggggaggtgctgggcgtgattggagactgcccagagctggtgcagaggagcttcctggtggcctctgtgctgcccggcccagatggcaacatcaacagccccaccagaaatgctgacatgcaggaggagctgattgccagcctggaggagcagctgaagctgtctggagagcacagcgagagcagcaccccccggcccaggagcagccctgaggagaccatcgagcctgagagcctgcaccagctgtttgaaggagagagcgagacagagagcttctacggctttgaggaggccgacctggacctgatggagatctag

SEQ ID NO: 19741 - DNA, 2406 bp, synthetic construct
  source 1..2406: mol_type = other DNA; note = Synthetic coding sequence
atgggagacacagtggtggagcccgcccccctgaagcccaccagcgagcccaccagcggccccccaggcaacaatggaggcagcctgctgagcgtcatcacagagggcgtgggggagctgtctgtgattgatcctgaggtggcccagaaggcctgccaggaggtgctggagaaggtgaagctgctgcatggaggagtggccgtgagcagccggggcacccccctggagctggtgaatggagatggagtggacagcgagatccgctgcctggatgatcctccagcccagatccgggaggaggaggatgagatgggcgctgctgtggccagcggcacagccaagggggccaggagaagacggcagaacaacagcgccaagcagagctggctgctgcggctgtttgagagcaagctgtttgacatctccatggccatctcctacctgtacaacagcaaggagcccggggtgcaggcctacatcggcaacagactcttctgcttcagaaatgaagatgtggacttctacctgccccagctgctgaacatgtacatccacatggatgaagatgtgggagatgccatcaagccctacatcgtgcaccgctgccggcagagcatcaacttcagcctgcagtgtgccctgctgctgggcgcctacagcagtgacatgcacatcagcacccagaggcacagccggggcaccaagctgaggaagctgatcctgagtgatgagctgaagccagcccacaggaagcgggagctgcccagcctgagccctgccccagacaccggcctgagccccagcaagaggacccaccagaggagcaagagtgatgccacagccagcatcagcctgagcagcaacctgaagaggacagccagcaaccccaaggtggagaatgaagatgagcctgtgcggctggcccctgagcgggagttcatcaagagcctgatggccatcggcaagaggctggccaccctgcccaccaaggagcagaagacccagaggctcatcagcgagctgagcctgctgaaccacaagctgcctgcccgggtgtggctgcccacagctggctttgaccaccacgtggtgcgggtgccccacacccaggccgtggtgctgaacagcaaggacaaggccccctacctgatctacgtggaggtgctggagtgtgagaactttgacaccacctctgtgcctgcccgcatcccagaaaatcgcatccgcagcaccaggtctgtggagaacctgcctgaatgtggcatcacccatgagcagagagctggcagcttcagcacagtgcccaactatgacaatgatgatgaggcctggagcgtggatgacattggagagctgcaggtggagctgcctgaggtgcacaccaacagctgtgacaacatcagccagttctctgtggacagcatcaccagccaggagagcaaggagcctgtgttcatcgccgccggggacatcagaagaaggctgtctgagcagctggcccacacccccacagccttcaagagggaccctgaggaccccagcgctgtggccctgaaggagccctggcaggagaaggtgcggcgcatccgggagggcagcccctacggccacctgcccaactggaggctgctgtctgtgattgtgaagtgtggagatgacctgcggcaggagctgctggccttccaggtgctgaagcagctgcagagcatctgggagcaggagcgggtgcccctgtggatcaagccctacaagatcctggtgatctctgctgacagcggcatgattgagcctgtggtgaatgctgtgtccatccaccaggtgaagaagcagagccagctgagcctgctggactacttcctgcaggagcacggcagctacaccacagaggccttcctgagcgcccagaggaactttgtgcagagctgtgccggctactgcctggtgtgctacctgctgcaggtgaaggacagacacaatggaaacatcctgctggatgctgagggccacatcatccacatcgactttggcttcatcctgagcagcagccccaggaacctgggctttgagaccagcgccttcaagctgaccacagaatttgtggatgtgatgggcggcctggatggagacatgttcaactactacaagatgctgatgctgcagggcctgattgctgccaggaagcacatggacaaggtggtgcagatcgtggagatcatgcagcagggcagccagctgccctgcttccacggcagcagcaccatccggaacctgaaggagcgcttccacatgtccatgacagaggagcagctgcagctgctggtggagcagatggtggatggctccatgaggagcatcaccaccaagctgtatgatggcttccagtacctgaccaacggcatcatgtag

SEQ ID NO: 19742 - DNA, 2451 bp, synthetic construct
  source 1..2451: mol_type = other DNA; note = Synthetic coding sequence
atgggagacacagtggtggagcccgcccccctgaagcccaccagcgagcccaccagcggccccccaggcaacaatggaggcagcctgctgagcgtcatcacagagggcgtgggggagctgtctgtgattgatcctgaggtggcccagaaggcctgccaggaggtgctggagaaggtgaagctgctgcatggaggagtggccgtgagcagccggggcacccccctggagctggtgaatggagatggagtggacagcgagatccgctgcctggatgatcctccagcccagatccgggaggaggaggatgagatgggcgctgctgtggccagcggcacagccaagggggccaggagaagacggcagaacaacagcgccaagcagagctggctgctgcggctgtttgagagcaagctgtttgacatctccatggccatctcctacctgtacaacagcaaggagcccggggtgcaggcctacatcggcaacagactcttctgcttcagaaatgaagatgtggacttctacctgccccagctgctgaacatgtacatccacatggatgaagatgtgggagatgccatcaagccctacatcgtgcaccgctgccggcagagcatcaacttcagcctgcagtgtgccctgctgctgggcgcctacagcagtgacatgcacatcagcacccagaggcacagccggggcaccaagctgaggaagctgatcctgagtgatgagctgaagccagcccacaggaagcgggagctgcccagcctgagccctgccccagacaccggcctgagccccagcaagaggacccaccagaggagcaagagtgatgccacagccagcatcagcctgagcagcaacctgaagaggacagccagcaaccccaaggtggagaatgaagatgaggagctgagcagcagcacagagagcattgacaacagcttcagcagccctgtgcggctggcccctgagcgggagttcatcaagagcctgatggccatcggcaagaggctggccaccctgcccaccaaggagcagaagacccagaggctcatcagcgagctgagcctgctgaaccacaagctgcctgcccgggtgtggctgcccacagctggctttgaccaccacgtggtgcgggtgccccacacccaggccgtggtgctgaacagcaaggacaaggccccctacctgatctacgtggaggtgctggagtgtgaaaattttgacaccacctctgtgcctgcccgcatccctgagaaccgcatccgcagcaccaggtctgtggagaacctgcctgaatgtggcatcacccatgagcagagagctggcagcttcagcacagtgcccaactatgacaatgatgatgaggcctggagcgtggatgacatcggggagctgcaggtggagctgcctgaggtgcacaccaacagctgtgacaacatcagccagttctctgtggacagcatcaccagccaggagagcaaggagcccgtcttcatcgctgctggggacatcagaagaaggctgtctgagcagctggcccacacccccacagccttcaagagggaccctgaggaccccagcgctgtggccctgaaggagccctggcaggagaaggtgcggcgcatccgggagggcagcccctacggccacctgcccaactggaggctgctgagcgtcatcgtgaagtgtggagatgacctgcggcaggagctgctggccttccaggtgctgaagcagctgcagagcatctgggagcaggagcgggtgcccctgtggatcaagccctacaagatcctggtgatctctgctgacagcggcatgattgagcctgtggtgaatgctgtgtccatccaccaggtgaagaagcagagccagctgagcctgctggactacttcctgcaggagcacggcagctacaccacagaggccttcctgagcgcccagaggaactttgtgcagagctgtgccggctactgcctggtgtgctacctgctgcaggtgaaggacagacacaacggcaacatcctgctggatgctgagggccacatcatccacatcgactttggcttcatcctgagcagcagccccaggaacctgggctttgagaccagcgccttcaagctgaccacagaatttgtggatgtgatgggcggcctggatggagacatgttcaactactacaagatgctgatgctgcagggcctgattgctgccaggaagcacatggacaaggtggtgcagatcgtggagatcatgcagcagggcagccagctgccctgcttccacggcagcagcaccatccggaacctgaaggagcgcttccacatgtccatgacagaggagcagctgcagctgctggtggagcagatggtggatggctccatgaggagcatcaccaccaagctgtatgatggcttccagtacctgaccaacggcatcatgtag

SEQ ID NO: 19743 - DNA, 2406 bp, synthetic construct; identical to SEQ ID NO: 19741
  source 1..2406: mol_type = other DNA; note = Synthetic coding sequence

SEQ ID NO: 19744 - DNA, 2487 bp, synthetic construct; identical to SEQ ID NO: 18559
  source 1..2487: mol_type = other DNA; note = Synthetic coding sequence

SEQ ID NO: 19745 - DNA, 1143 bp, synthetic construct
  source 1..1143: mol_type = other DNA; note = Synthetic coding sequence
atggtgctggagagcaccatggtgtgtgtggacaacagcgagtacatgagaaatggagacttcctgcccacccggctgcaggcccagcaggatgctgtgaacatcgtgtgccacagcaagaccaggagcaaccctgagaacaacgtgggcctcatcaccctggccaatgactgtgaggtgctgaccaccctgaccccagacaccggccgcatcctgagcaagctgcacacagtgcagcccaagggcaagatcaccttctgcaccggcatccgggtggcccacctggccctgaagcaccggcagggcaagaaccacaagatgaggatcatcgcctttgtgggcagccctgtggaggacaatgagaaggacctggtgaagctggccaagaggctgaagaaggagaaggtgaatgtggacatcatcaactttggagaggaggaggtgaacacagagaagctgacagcctttgtgaacaccctgaatggcaaggatggcaccggcagccacctggtgacagtgcccccaggccccagcctggctgatgccctgatcagcagccccatcctggccggggagggcggggccatgctgggcctgggcgccagtgactttgaatttggagtggaccccagcgctgaccctgagctggccctggccctgcgggtgtccatggaggagcagaggcagaggcaggaggaggaggcccggcgggctgctgctgccagcgctgctgaggccggcatcgccaccactggaacagaaggagagcgggacagtgatgatgccctgctgaagatgaccatcagccagcaggagtttggaagaacaggcctgcctgacctgagctccatgacagaggaggagcagatcgcctatgccatgcagatgagcctgcagggcgctgagtttggccaggccgagagcgctgacattgatgccagcagcgccatggacaccagcgagcccgccaaggaggaggatgattatgatgtgatgcaggaccctgagttcctgcagagcgtgctggagaacctgcccggggtggaccccaacaatgaggccatcagaaatgccatgggcagcctggccagccaggccaccaaggatggcaagaaggacaagaaggaggaggacaagaagtag

SEQ ID NO: 19746 - DNA, 1134 bp, synthetic construct
  source 1..1134: mol_type = other DNA; note = Synthetic coding sequence
atggtgctggagagcaccatggtgtgtgtggacaacagcgagtacatgagaaatggagacttcctgcccacccggctgcaggcccagcaggatgctgtgaacatcgtgtgccacagcaagaccaggagcaaccctgagaacaacgtgggcctcatcaccctggccaatgactgtgaggtgctgaccaccctgaccccagacaccggccgcatcctgagcaagctgcacacagtgcagcccaagggcaagatcaccttctgcaccggcatccgggtggcccacctggccctgaagcaccggcagggcaagaaccacaagatgaggatcatcgcctttgtgggcagccctgtggaggacaatgagaaggacctggtgaagctggccaagaggctgaagaaggagaaggtgaatgtggacatcatcaactttggagaggaggaggtgaacacagagaagctgacagcctttgtgaacaccctgaatggcaaggatggcaccggcagccacctggtgacagtgcccccaggccccagcctggctgatgccctgatcagcagccccatcctggccggggagggcggggccatgctgggcctgggcgccagtgactttgaatttggagtggaccccagcgctgaccctgagctggccctggccctgcgggtgtccatggaggagcagaggcagaggcaggaggaggaggcccggcgggctgctgctgccagcgctgctgaggccggcatcgccaccactggaacagaggacagtgatgatgccctgctgaagatgaccatcagccagcaggagtttggccgcacaggcctgcctgacctgagctccatgacagaggaggagcagatcgcctatgccatgcagatgagcctgcagggcgctgagtttggccaggccgagagcgctgacattgatgccagcagcgccatggacaccagcgagcccgccaaggaggaggatgattatgatgtgatgcaggaccctgagttcctgcagagcgtgctggagaacctgcccggggtggaccccaacaatgaggccatcagaaatgccatgggcagcctggccagccaggccaccaaggatggcaagaaggacaagaaggaggaggacaagaagtag

SEQ ID NO: 19747 - DNA, 933 bp, synthetic construct
  source 1..933: mol_type = other DNA; note = Synthetic coding sequence
atgaggcctgcccggcactgggagaccaggtttggagcccgggactttggaggcttccaggactgcttcttccgggaccggctgatggacacagccagaattgctgtggtgggcgccggcgtggtgggcctgagcacagctgtgtgcatcagcaagctggtgccccgctgcagcgtgaccatcatcagtgacaagttcaccccagacaccaccagtgatgtggccgccggcatgctgatcccccacacctacccagacacccccatccacacccagaagcagtggttccgggagaccttcaaccacctgtttgccatcgccaacagcgctgaggccggagatgctggggtgcacctggtgtctggcatcaagggcagcggcggctggaccctgaccaggagaattgaggacctgtgggagctgcaccccagctttgatattgtggtgaactgcagcggcctgggcagccggcagctggccggggacagcaagatcttccctgtgcggggccaggtgctgcaggtgcaggccccctgggtggagcacttcatcagagatggcagcggcctgacctacatctacccaggcaccagccacgtgaccctgggcggcacccggcagaagggggactggaacctgagcccagatgctgagaacagccgggagatcctgagccgctgctgtgccctggagcccagcctgcatggagcctgcaacatccgggagaaggtgggcctgcggccctacagacctggggtgcggctgcagacagagctgctggccagagatggccagaggctgcctgtggtgcaccactacggccacggcagcggcggcatctctgtgcactggggcacagccctggaggccgcccggctggtgtctgaatgtgtgcacgccctgcggacccccatccccaagagcaacctgtag

SEQ ID NO: 19748 - DNA, 1110 bp, synthetic construct
  source 1..1110: mol_type = other DNA; note = Synthetic coding sequence
atgaggcctgcccggcactgggagaccaggtttggagcccgggactttggaggcttccaggactgcttcttccgggaccggctgatggacacagccagaattgctgtggtgggcgccggcgtggtgggcctgagcacagctgtgtgcatcagcaagctggtgccccgctgcagcgtgaccatcatcagtgacaagttcaccccagacaccaccagtgatgtggccgccggcatgctgatcccccacacctacccagacacccccatccacacccagaagcagtggttccgggagaccttcaaccacctgtttgccatcgccaacagcgctgaggccggagatgctggggtgcacctggtgtctggctggcagatcttccagagcacccccacagaggaggtgcccttctgggcagatgtggtgctgggcttcaggaagatgacagaggccgagctgaagaagttcccccagtatgtgtttggccaggccttcaccaccctgaagtgtgagtgcccagcctacctgccctggctggagaagaggatcaagggcagcggcggctggaccctgaccaggagaattgaggacctgtgggagctgcaccccagctttgacatcgtggtgaactgcagcggcctgggcagccggcagctggccggggacagcaagatcttccctgtgcggggccaggtgctgcaggtgcaggccccctgggtggagcacttcatcagagatggcagcggcctgacctacatctacccaggcaccagccacgtgaccctgggcggcacccggcagaagggggactggaacctgagcccagatgctgagaacagccgggagatcctgagccgctgctgtgccctggagcccagcctgcacggggcctgcaacatccgggagaaggtgggcctgcggccctacagacctggggtgcggctgcagacagagctgctggccagagatggccagaggctgcctgtggtgcaccactacggccacggcagcggcggcatctctgtgcactggggcacagccctggaggccgcccggctggtgtctgaatgtgtgcacgccctgcggacccccatccccaagagcaacctgtag

SEQ ID NO: 19749 - DNA, 1026 bp, synthetic construct
  source 1..1026: mol_type = other DNA; note = Synthetic coding sequence
atggacacagccagaattgctgtggtgggcgccggcgtggtgggcctgagcacagctgtgtgcatcagcaagctggtgccccgctgcagcgtgaccatcatcagtgacaagttcaccccagacaccaccagtgatgtggccgccggcatgctgatcccccacacctacccagacacccccatccacacccagaagcagtggttccgggagaccttcaaccacctgtttgccatcgccaacagcgctgaggccggagatgctggggtgcacctggtgtctggctggcagatcttccagagcacccccacagaggaggtgcccttctgggcagatgtggtgctgggcttcaggaagatgacagaggccgagctgaagaagttcccccagtatgtgtttggccaggccttcaccaccctgaagtgtgagtgcccagcctacctgccctggctggagaagaggatcaagggcagcggcggctggaccctgaccaggagaattgaggacctgtgggagctgcaccccagctttgacatcgtggtgaactgcagcggcctgggcagccggcagctggccggggacagcaagatcttccctgtgcggggccaggtgctgcaggtgcaggccccctgggtggagcacttcatcagagatggcagcggcctgacctacatctacccaggcaccagccacgtgaccctgggcggcacccggcagaagggggactggaacctgagcccagatgctgagaacagccgggagatcctgagccgctgctgtgccctggagcccagcctgcacggggcctgcaacatccgggagaaggtgggcctgcggccctacagacctggggtgcggctgcagacagagctgctggccagagatggccagaggctgcctgtggtgcaccactacggccacggcagcggcggcatctctgtgcactggggcacagccctggaggccgcccggctggtgtctgaatgtgtgcacgccctgcggacccccatccccaagagcaacctgtag

SEQ ID NO: 19750 - DNA, 1074 bp, synthetic construct
  source 1..1074: mol_type = other DNA; note = Synthetic coding sequence
atgggcaccatccaggaggccggcaagaagacagatgtgggcgtgcgggagattgctgaggcccctgagctgggcgccgccctgcggcacggggagctggagctgaaggaggagtggcaggatgaggagttcccccggctgctgcctgaggaggccggcaccagcgaggaccctgaggaccccaagggggacagccaggccgctgctggcacccccagcaccctggccctgtgtggccagaggcccatgaggaagaggctgagcgcccctgagctgcggctgagcctgaccaagggccctggaaatgatggagccagccccacccagagcgcccccagcagcccagatggcagcagtgacctggagattgatgagctggagacccccagcgacagcgagcagctggacagcggccatgaatttgagtgggaggatgagctgcccagggctgagggcctgggcaccagcgagacagctgagcggctgggccggggctgcatgtgggatgtgactggagaagatggccaccactggagggtcttcaggatgggcccccgggagcagagggtggacatgacagtgattgagccctacaagaaggtgctgagccacggcggctaccatggagatggcctgaatgctgtgatcctgtttgccagctgctacctgcccaggagcagcatccccaactacacctacgtgatggagcacctgttccgctacatggtgggcaccctggagctgctggtggccgagaactacctgctggtgcacctgagcggcggcaccagccgggcccaggtgccccccctgtcctggatccggcagtgctaccgcaccctggaccggcggctgaggaagaacctgcgggccctggtggtggtgcacgccacctggtacgtgaaggccttcctggccctgctgcggcccttcatcagcagcaagttcaccaggaagatccgcttcctggacagcctgggggagctggcccagctgatcagcctggaccaggtgcacatccctgaggccgtgcggcagctggaccgggacctgcacggcagcggcggcacctag

SEQ ID NO: 19751 - DNA, 1269 bp, synthetic construct
  source 1..1269: mol_type = other DNA; note = Synthetic coding sequence
atgctgaagttcctggccaagggggaggtgcccaagggcagctgtgaagatgagcccatggacagcaccatggatgatgctgtggccggggactttgccctgatcaacaagctggacatccagtgtgacctgaagaccctgagtgatgacatcaaggagagcctggagagcgagggcaagaacagcaagaaggaggagccccaggagctgctgcagagccaggactttgtgggggagaagctgggcagcggggagcccagccacagcgtgaaggtgcacacagtgcccaagccaggaaaaggagctgacctgagcaagccaccctgcaggaaggccaaggagatcaggaaggagaggaagaggctgaagctgatgcagcagaacccagctggggagctggagggcttccaggcccagggccacccccccagcctcttcccccccaaggccaagagcaaccagcccaagagcctggaggacctgatctttgagagcctgcctgaaaatgccagccacaagctggaggtgcggctggtgcctgtgtcctttgaggaccctgagttcaagagcagcttcagccagagcttcagcctgtatgtgaagtaccaggtggccatccaccaggaccccccagatgaatgtgggaagacagagttcacccgcttcctgtgcagcagccccctggaggccgagaccccaccaaatggaccagactgtggctacggcagcttccaccagcagtactggctggatggcaagatcatcgctgtgggcgtcatcgacatcctgcccaactgtgtgtcctctgtgtacctgtactatgaccctgactacagcttcctgagcctgggcgtgtacagcgccctgcgggagatcgccttcacccggcagctgcacgagaagaccagccagctgagctactactacatgggcttctacatccacagctgccccaagatgaagtacaagggccagtaccggcccagcgacctgctgtgcccagagacctacgtgtgggtgcccatcgagcagtgcctgcccagcctggagaacagcaagtactgccgcttcaaccaggaccctgaggccgtggatgaggacaggagcacagagccagaccggctgcaggtgttccacaagagggccatcatgccctacggcgtgtacaagaagcagcagaaggaccccagcgaggaggccgctgtgctgcagtatgccagcctggtgggccagaagtgcagcgagaggatgctgctcttcagaaattag

SEQ ID NO: 19752 - DNA, 1557 bp, synthetic construct
  source 1..1557: mol_type = other DNA; note = Synthetic coding sequence
atggccttctgggccggcggcagccccagcgtggtggactacttccccagcgaggacttctaccgctgtggctactgcaagaatgaaagtggcagccgcagcaatggcatgtgggcccacagcatgacagtgcaggactaccaggacctgattgaccggggctggaggagaagtggcaagtatgtgtacaagcctgtgatgaaccagacctgctgcccccagtacaccatccgctgccggcccctgcagttccagcccagcaagagccacaagaaggtgctgaagaagatgctgaagttcctggccaagggggaggtgcccaagggcagctgtgaagatgagcccatggacagcaccatggatgatgctgtggccggggactttgccctgatcaacaagctggacatccagtgtgacctgaagaccctgagtgatgacatcaaggagagcctggagagcgagggcaagaacagcaagaaggaggagccccaggagctgctgcagagccaggactttgtgggggagaagctgggcagcggggagcccagccacagcgtgaaggtgcacacagtgcccaagccaggaaaaggagctgacctgagcaagccaccctgcaggaaggccaaggagatcaggaaggagaggaagaggctgaagctgatgcagcagaacccagctggggagctggagggcttccaggcccagggccacccccccagcctcttcccccccaaggccaagagcaaccagcccaagagcctggaggacctgatctttgagagcctgcctgaaaatgccagccacaagctggaggtgcggctggtgcctgtgtcctttgaggaccctgagttcaagagcagcttcagccagagcttcagcctgtatgtgaagtaccaggtggccatccaccaggaccccccagatgaatgtgggaagacagagttcacccgcttcctgtgcagcagccccctggaggccgagaccccaccaaatggaccagactgtggctacggcagcttccaccagcagtactggctggatggcaagatcatcgctgtgggcgtcatcgacatcctgcccaactgtgtgtcctctgtgtacctgtactatgaccctgactacagcttcctgagcctgggcgtgtacagcgccctgcgggagatcgccttcacccggcagctgcacgagaagaccagccagctgagctactactacatgggcttctacatccacagctgccccaagatgaagtacaagggccagtaccggcccagcgacctgctgtgcccagagacctacgtgtgggtgcccatcgagcagtgcctgcccagcctggagaacagcaagtactgccgcttcaaccaggaccctgaggccgtggatgaggacaggagcacagagccagaccggctgcaggtgttccacaagagggccatcatgccctacggcgtgtacaagaagcagcagaaggaccccagcgaggaggccgctgtgctgcagtatgccagcctggtgggccagaagtgcagcgagaggatgctgctcttcagaaattag

SEQ ID NO: 19753 - DNA, 3003 bp, synthetic construct
  source 1..3003: mol_type = other DNA; note = Synthetic coding sequence
atggccgagaggaagcccaatggaggcagcggcggggccagcaccagcagcagcggcaccaacctgctcttcagcagcagcgccacagagttctccttcaacgtgcccttcatccctgtgacccaggccagcgccagccctgccagcctgctgctgcctggagaggacagcacagatgtgggggaggaggacagcttcctgggccagaccagcatccacaccagcgccccccagaccttctcctacttcagccaggtgagcagcagcagtgacccctttggaaacatcggccagagccccctgaccacagctgccacctctgtgggccagagcggcttccccaagcccctgacagccctgcccttcaccaccggcagccaggatgtgtccaatgccttcagccccagcatcagcaaggcccagcccggggccccacccagcagcctgatgggcatcaacagctacctgcccagccagcccagcagcctgccccccagctacttcggcaaccagccccagggcatcccccagcccggctacaacccctaccgccacaccccaggcagcagccgggccaacccctacatcgccccaccccagctgcagcagtgccagaccccaggccccccagcccaccccccacccagcggcccccctgtgcagatgtaccagatgcctcctggcagcctgccccctgtgcccagctctgtgcagagccctgcccagcagcaggtgcctgcccggcctggggcccccagcgtgcaggtgcccagccccttcctgctgcagaaccagtatgagcctgtgcagccccactggttctactgcaaggaggtggagtacaagcagctgtggatgcccttctctgtgtttgacagcctgaacctggaggagatctacaacagcgtgcagcctgaccctgagagcgtggtgctgggcacagatggcggccgctatgatgtgtacctgtatgaccgcatcaggaaggccgcctactgggaggaggagcctgctgaggtgcggcgctgcacctggttctacaagggggacacagacagccgcttcatcccctacacagaggagttcagcgagaagctggaggccgagtacaagaaggctgtgaccaccaaccagtggcaccggcggctggagttccccagcggggagaccatcgtgatgcacaaccccaaggtgattgtgcagttccagcccagctctgtgcctgatgagtggggcaccacccaggacggccagacccggccccgggtggtgaagaggggcattgatgacaacctggatgagatcccagatggagagatgccccaggtggaccacctggtgtttgtggtgcatggaattggccctgtgtgtgacctgcgcttccgcagcatcattgaatgtgtggatgacttccgggtggtgtccctgaagctgctgcggacccacttcaagaagagcctggatgatggcaaggtgtcccgggtggagttcctgcctgtgcactggcacagcagcctgggcggagatgccactggagtggacaggaacatcaagaagatcaccctgcccagcatcggccgcttccgccacttcaccaatgagaccctgctggacatcctcttctacaacagccccacctactgccagaccatcgtggagaaggtgggcatggagatcaaccacctgcacgccctcttcatgagcagaaatccagacttcaagggcggcgtgtctgtggccggccacagcctgggcagcctcatcctgtttgacatcctgagcaaccagaaggacctgaacctgagcaaatgtcctggccccctggccgtggccaacggggtggtgaagcagctgcacttccaggagaagcagatgcctgaggagcccaagctgaccctggatgagagctatgacctggtggtggagaacaaggaggtgctgaccctgcaggagaccctggaggccctgagcctgtctgagtacttcagcacctttgagaaggagaagattgacatggagagcctgctgatgtgcaccgtggatgacctgaaggagatgggcatccccctgggccccaggaagaagatcgccaactttgtggagcacaaggccgccaagctgaagaaggccgccagcgagaagaaggctgtggccgccaccagcaccaagggccaggagcagagcgcccagaagaccaaggacatggccagcctgcccagcgagagcaatgagcccaagaggaagctgcctgtgggcgcctgtgtgtcctctgtgtgtgtgaactatgagagctttgaggtgggcgccggccaggtgtctgtggcctacaacagcctggactttgagcctgagatcttctttgccctgggcagccccatcgccatgttcctgaccatccggggcgtggacagaattgatgagaactacagcctgcccacctgcaagggcttcttcaacatctaccaccccctggaccctgtggcctaccgcctggagcccatgattgtgcctgacctggacctgaaggctgtgctgatcccccaccacaagggcaggaagaggctgcacctggagctgaaggagagcctgagcaggatgggcagtgacctgaagcagggcttcatcagcagcctgaagagcgcctggcagaccctgaatgaatttgcccgggcccacaccagcagcacccagctgcaggaggagctggagaaggtggccaaccagatcaaggaggaggaggagaagcaggtggtggaggccgagaaggtggtggagagcccagacttcagcaaggatgaggactacctgggcaaggtgggcatgctgaatggaggaagaagaattgattatgtgctgcaggagaagcccatcgagagcttcaatgagtacctgtttgccctgcagagccacctgtgctactgggagagcgaggacacagccctgctgctgctgaaggagatctaccgcaccatgaacatcagccctgagcagccccagcactag

SEQ ID NO: 19754 - DNA, 495 bp, synthetic construct
  source 1..495: mol_type = other DNA; note = Synthetic coding sequence
atggtgaacagcgtggtgttctttgacatcaccgtggatggcaagcccctgggccgcatcagcatcaagctgtttgctgacaagatcctgaagacagctgagaacttccgggccctgagcactggagagaagggcttccgctacaagggcagctgcttccaccgcatcatccctggcttcatgtgccagggcggggacttcaccaggcacaatggaactggagacaagagcatctatggagagaagtttgatgatgagaacctgatcaggaagcacactggaagtggcatcctgtccatggccaatgccggccccaacaccaacggcagccagttcttcatctgtgccgccaagacagagtggctggatggcaagcacgtggccttcggcaaggtgaaggagcgggtgaacatcgtggaggccatggagcacttcggctacagaaacagcaagaccagcaagaagatcaccatcgctgactgtggccagttctag

SEQ ID NO: 19755 - DNA, 426 bp, synthetic construct
  source 1..426: mol_type = other DNA; note = Synthetic coding sequence
atgaagatcctggatgtgggctgcggcggcggcctgctgacagagcccggcggcagcctcttcatcaccaccatcaacaagacccagctgtcctatgccctgggcatcgtgttttctgagcagatcgccagcatcgtgcccaagggcacccacacctgggagaagtttgtgtccccagagaccctggagagcatcctggagagcaatggcctgtctgtgcagacagtggtgggcatgctgtacaaccccttcagcggctactggcactggagcgagaacaccagcctgaactatgctgcctatgctgtgaagagccgggtgcaggagcacccagccagcgctgagtttgtgctgaagggggagacagaggagctgcaggccaatgcctgcaccaacccagctgtgcatgagaagctgaagaagtag

SEQ ID NO: 19756 - DNA, 426 bp, synthetic construct; identical to SEQ ID NO: 19755
  source 1..426: mol_type = other DNA; note = Synthetic coding sequence

SEQ ID NO: 19757 - DNA, 2157 bp, synthetic construct
  source 1..2157: mol_type = other DNA; note = Synthetic coding sequence
atgctgatgaccctggagatgacagagctgacagacccccaccacaccatgggagactacaaggtggcccacccccaggacccccaccaccccagcgagaagcctgtgatccactgccacaagtgtggggagccctgcaagggggaggtgctgcgggtgcagaccaagcacttccacatcaagtgcttcacctgcaaggtgtgtggctgtgacctggcccagggcggcttcttcatcaagaatggagagtacctgtgcaccctggactaccagaggatgtatggcacccgctgccacggctgtggggagtttgtggagggggaggtggtgacagccctgggcaagacctaccaccccaactgctttgcctgcaccatctgcaagaggcccttccccccaggggacagagtgaccttcaacggccgggactgcctgtgccagctgtgtgcccagcccatgagcagcagccccaaggagaccaccttcagcagcaactgtgccggctgcggccgggacatcaagaatggccaggccctgctggccctggacaagcagtggcacctgggctgcttcaagtgcaagagctgtgggaaggtgctgactggagagtacatcagcaaggatggagccccctactgtgagaaggactaccagggcctgtttggagtgaagtgtgaggcctgccaccagttcatcaccgggaaggtgctggaggccggggacaagcactaccaccccagctgtgcccgctgcagccgctgcaaccagatgttcacagaaggagaggagatgtacctgcagggcagcacagtgtggcacccagactgcaagcagagcaccaagacagaggagaagctgcggcccaccaggaccagcagcgagagcatctacagccggcccggcagcagcatccctggcagccctggccacaccatctatgccaaggtggacaatgagatcctggactacaaggacctggccgccatccccaaggtgaaggccatctatgacatcgagaggccagacctgatcacctatgagcccttctacaccagcggctatgatgacaagcaggagcggcagagcctgggggagagccccaggaccctgagccccaccccatctgctgagggctaccaggatgtgcgggacaggatgatccacaggagcaccagccagggcagcatcaacagccctgtgtacagccgccacagctacacccccaccaccagccgcagcccccagcacttccacaggcctggaaatgagcccagcagcggcaggaacagccccctgccctacagaccagacagccggcccctgacccccacctacgcccaggcccccaagcacttccacgtgcctgaccagggcatcaacatctacaggaagccacccatctacaagcagcacgccgccctggccgcccagagcaagagcagcgaggacatcatcaagttcagcaagtttcctgctgcccaggccccagaccccagcgagacccccaagattgaaacagaccactggccaggcccccccagctttgctgtggtgggccctgacatgaagaggaggagcagcggccgggaggaggatgatgaggagctgctgcggcggcggcagctgcaggaggagcagctgatgaagctgaacagcggcctgggccagctgatcctgaaggaggagatggagaaggagagccgggagaggagcagcctgctggccagccgctatgacagccccatcaacagcgccagccacatccccagcagcaagacagccagcctgcccggctatggaagaaatggcctgcacaggcctgtgtccacagactttgcccagtacaacagctatggagatgtgtctgggggcgtgcgggactaccagaccctgcctgatggccacatgcctgccatgaggatggaccggggcgtgtccatgcccaacatgctggagcccaagatcttcccctatgagatgctgatggtgaccaacagaggaagaaacaagatcctgcgggaggtggacaggacccggctggagcggcacctggcccctgaggtgttccgggagatcttcggcatgagcatccaggagtttgaccggctgcccctgtggaggagaaatgacatgaagaagaaggccaagctgttctag

SEQ ID NO: 19758 - DNA, 1593 bp, synthetic construct
  source 1..1593: mol_type = other DNA; note = Synthetic coding sequence
atgttcacagaaggagaggagatgtacctgcagggcagcacagtgtggcacccagactgcaagcagagcaccaagacagaggagaagctgcggctgcccaacatccgccgcagcagcagtgacttcttctacagcaagagcctcatccggaggacaggccgcagccccagcctgcagcccaccaggaccagcagcgagagcatctacagccggcccggcagcagcatccctggcagccctggccacaccatctatgccaaggtggacaatgagatcctggactacaaggacctggccgccatccccaaggtgaaggccatctatgacatcgagaggccagacctgatcacctatgagcccttctacaccagcggctatgatgacaagcaggagcggcagagcctgggggagagccccaggaccctgagccccaccccatctgctgagggctaccaggatgtgcgggacaggatgatccacaggagcaccagccagggcagcatcaacagccctgtgtacagccgccacagctacacccccaccaccagccgcagcccccagcacttccacaggcctgagctgctgagccctggggtgcagaggctgagctacctgcggaccagcagcctgagccccacccacagcgacagccggcccaacccccccttccgccaccacttcatcccccacatcaagggaaatgagcccagcagcggcaggaacagccccctgccctacagaccagacagccggcccctgacccccacctacgcccaggcccccaagcacttccacgtgcctgaccagggcatcaacatctacaggaagccacccatctacaagcagcacgccgccctggccgcccagagcaagagcagcgaggacatcatcaagttcagcaagtttcctgctgcccaggccccagaccccagcgagacccccaagattgaaacagaccactggccaggcccccccagctttgctgtggtgggccctgacatgaagaggaggagcagcggccgggaggaggatgatgaggagctgctgcggcggcggcagctgcaggaggagcagctgatgaagctgaacagcggcctgggccagctgatcctgaaggaggagatggagaaggagagccgggagaggagcagcctgctggccagccgctatgacagccccatcaacagcgccagccacatccccagcagcaagacagccagcctgcccggctatggaagaaatggcctgcacaggcctgtgtccacagactttgcccagtacaacagctatggagatgtgtctgggggcgtgcgggactaccagaccctgcctgatggccacatgcctgccatgaggatggaccggggcgtgtccatgcccaacatgctggagcccaagatcttcccctatgagatgctgatggtgaccaacagaggaagaaacaagatcctgcgggaggtggacaggacccggctggagcggcacctggcccctgaggtgttccgggagatcttcggcatgagcatccaggagtttgaccggctgcccctgtggaggagaaatgacatgaagaagaaggccaagctgttctag

SEQ ID NO: 19759 - DNA, 2109 bp, synthetic construct
  source 1..2109: mol_type = other DNA; note = Synthetic coding sequence
atggtgaaggagaaggtggcccacccccaggacccccaccaccccagcgagaagcctgtgatccactgccacaagtgtggggagccctgcaagggggaggtgctgcgggtgcagaccaagcacttccacatcaagtgcttcacctgcaaggtgtgtggctgtgacctggcccagggcggcttcttcatcaagaatggagagtacctgtgcaccctggactaccagaggatgtatggcacccgctgccacggctgtggggagtttgtggagggggaggtggtgacagccctgggcaagacctaccaccccaactgctttgcctgcaccatctgcaagaggcccttccccccaggggacagagtgaccttcaacggccgggactgcctgtgccagctgtgtgcccagcccatgagcagcagccccaaggagaccaccttcagcagcaactgtgccggctgcggccgggacatcaagaatggccaggccctgctggccctggacaagcagtggcacctgggctgcttcaagtgcaagagctgtgggaaggtgctgactggagagtacatcagcaaggatggagccccctactgtgagaaggactaccagggcctgtttggagtgaagtgtgaggcctgccaccagttcatcaccgggaaggtgctggaggccggggacaagcactaccaccccagctgtgcccgctgcagccgctgcaaccagatgttcacagaaggagaggagatgtacctgcagggcagcacagtgtggcacccagactgcaagcagagcaccaagacagaggagaagctgcggcccaccaggaccagcagcgagagcatctacagccggcccggcagcagcatccctggcagccctggccacaccatctatgccaaggtggacaatgagatcctggactacaaggacctggccgccatccccaaggtgaaggccatctatgacatcgagaggccagacctgatcacctatgagcccttctacaccagcggctatgatgacaagcaggagcggcagagcctgggggagagccccaggaccctgagccccaccccatctgctgagggctaccaggatgtgcgggacaggatgatccacaggagcaccagccagggcagcatcaacagccctgtgtacagccgccacagctacacccccaccaccagccgcagcccccagcacttccacaggcctggaaatgagcccagcagcggcaggaacagccccctgccctacagaccagacagccggcccctgacccccacctacgcccaggcccccaagcacttccacgtgcctgaccagggcatcaacatctacaggaagccacccatctacaagcagcacgccgccctggccgcccagagcaagagcagcgaggacatcatcaagttcagcaagtttcctgctgcccaggccccagaccccagcgagacccccaagattgaaacagaccactggccaggcccccccagctttgctgtggtgggccctgacatgaagaggaggagcagcggccgggaggaggatgatgaggagctgctgcggcggcggcagctgcaggaggagcagctgatgaagctgaacagcggcctgggccagctgatcctgaaggaggagatggagaaggagagccgggagaggagcagcctgctggccagccgctatgacagccccatcaacagcgccagccacatccccagcagcaagacagccagcctgcccggctatggaagaaatggcctgcacaggcctgtgtccacagactttgcccagtacaacagctatggagatgtgtctgggggcgtgcgggactaccagaccctgcctgatggccacatgcctgccatgaggatggaccggggcgtgtccatgcccaacatgctggagcccaagatcttcccctatgagatgctgatggtgaccaacagaggaagaaacaagatcctgcgggaggtggacaggacccggctggagcggcacctggcccctgaggtgttccgggagatcttcggcatgagcatccaggagtttgaccggctgcccctgtggaggagaaatgacatgaagaagaaggccaagctgttctag

SEQ ID NO: 19760 - DNA, 1206 bp, synthetic construct
  source 1..1206: mol_type = other DNA; note = Synthetic coding sequence
atgttcacagaaggagaggagatgtacctgcagggcagcacagtgtggcacccagactgcaagcagagcaccaagacagaggagaagctgcgggccaaggtggacaatgagatcctggactacaaggacctggccgccatccccaaggtgaaggccatctatgacatcgagaggccagacctgatcacctatgagcccttctacaccagcggctatgatgacaagcaggagcggcagagcctgggggagagccccaggaccctgagccccaccccatctgctgagggctaccaggatgtgcgggacaggatgatccacaggagcaccagccagggcagcatcaacagccctgtgtacagccgccacagctacacccccaccaccagccgcagcccccagcacttccacaggccagaccagggcatcaacatctacaggaagccacccatctacaagcagcacgccgccctggccgcccagagcaagagcagcgaggacatcatcaagttcagcaagtttcctgctgcccaggccccagaccccagcgagacccccaagattgaaacagaccactggccaggccccccatcctttgctgtggtgggccctgacatgaagagaagaagcagcggccgggaggaggatgatgaggagctgctgcggcggcggcagctgcaggaggagcagctgatgaagctgaacagcggcctgggccagctgatcctgaaggaggagatggagaaggagagccgggagaggagcagcctgctggccagccgctatgacagccccatcaacagcgccagccacatccccagcagcaagacagccagcctgcccggctacggcagaaatggcctgcacaggcctgtgtccacagactttgcccagtacaacagctatggagatgtgtctggaggagtgcgggactaccagaccctgcctgatggccacatgcctgccatgaggatggacagaggagtgtccatgcccaacatgctggagcccaagatcttcccctatgagatgctgatggtgaccaacagaggaagaaacaagatcctgcgggaggtggacaggacccggctggagcggcacctggcccctgaggtgttccgggagatcttcggcatgagcatccaggagtttgaccggctgcccctgtggaggagaaatgacatgaagaagaaggccaagctgttctag

SEQ ID NO: 19761 - DNA, 1968 bp, synthetic construct
  source 1..1968: mol_type = other DNA; note = Synthetic coding sequence
atggtgaaggagaaggtggcccacccccaggacccccaccaccccagcgagaagcctgtgatccactgccacaagtgtggggagccctgcaagggggaggtgctgcgggtgcagaccaagcacttccacatcaagtgcttcacctgcaaggtgtgtggctgtgacctggcccagggcggcttcttcatcaagaatggagagtacctgtgcaccctggactaccagaggatgtatggcacccgctgccacggctgtggggagtttgtggagggggaggtggtgacagccctgggcaagacctaccaccccaactgctttgcctgcaccatctgcaagaggcccttccccccaggggacagagtgaccttcaacggccgggactgcctgtgccagctgtgtgcccagcccatgagcagcagccccaaggagaccaccttcagcagcaactgtgccggctgcggccgggacatcaagaatggccaggccctgctggccctggacaagcagtggcacctgggctgcttcaagtgcaagagctgtgggaaggtgctgactggagagtacatcagcaaggatggagccccctactgtgagaaggactaccagggcctgtttggagtgaagtgtgaggcctgccaccagttcatcaccgggaaggtgctggaggccggggacaagcactaccaccccagctgtgcccgctgcagccgctgcaaccagatgttcacagaaggagaggagatgtacctgcagggcagcacagtgtggcacccagactgcaagcagagcaccaagacagaggagaagctgcggcccaccaggaccagcagcgagagcatctacagccggcccggcagcagcatccctggcagccctggccacaccatctatgccaaggtggacaatgagatcctggactacaaggacctggccgccatccccaaggtgaaggccatctatgacatcgagaggccagacctgatcacctatgagcccttctacaccagcggctatgatgacaagcaggagcggcagagcctgggggagagccccaggaccctgagccccaccccatctgctgagggctaccaggatgtgcgggacaggatgatccacaggagcaccagccagggcagcatcaacagccctgtgtacagccgccacagctacacccccaccaccagccgcagcccccagcacttccacaggcctggaaatgagcccagcagcggcaggaacagccccctgccctacagaccagacagccggcccctgacccccacctacgcccaggcccccaagcacttccacgtgcctgaccagggcatcaacatctacaggaagccacccatctacaagcagcacggccctgacatgaagagaagaagcagcggccgggaggaggatgatgaggagctgctgcggcggcggcagctgcaggaggagcagctgatgaagctgaacagcggcctgggccagctgatcctgaaggaggagatggagaaggagagccgggagaggagcagcctgctggccagccgctatgacagccccatcaacagcgccagccacatccccagcagcaagacagccagcctgcccggctacggcagaaatggcctgcacaggcctgtgtccacagactttgcccagtacaacagctatggagatgtgtctggaggagtgcgggacttccagaccctgcctgatggccacatgcctgccatgaggatggacagaggagtgtccatgcccaacatgctggagcccaagatcttcccctatgagatgctgatggtgaccaacagaggaagaaacaagatcctgcgggaggtggacaggacccggctggagcggcacctggcccctgaggtgttccgggagatcttcggcatgagcatccaggagtttgaccggctgcccctgtggaggagaaatgacatgaagaagaaggccaagctgttctag

SEQ ID NO: 19762 - DNA, 2541 bp, synthetic construct
  source 1..2541: mol_type = other DNA; note = Synthetic coding sequence
atgcctgccttcctgggcctgaagtgcctgggcaagctgtgcagcagcgagaagagcaaggtgaccagcagcgagaggaccagcgcccggggcagcaacaggaagaggctcatcgtggaggaccggcgggtgtctggcaccagcttcaccgcccacagaagagccaccatcacccacctgctgtacctgtgccccaaggactactgcccccggggccgggtgtgcaacagcgtggacccctttgtggcccacccccaggacccccaccaccccagcgagaagcctgtgatccactgccacaagtgtggggagccctgcaagggggaggtgctgcgggtgcagaccaagcacttccacatcaagtgcttcacctgcaaggtgtgtggctgtgacctggcccagggcggcttcttcatcaagaatggagagtacctgtgcaccctggactaccagaggatgtatggcacccgctgccacggctgtggggagtttgtggagggggaggtggtgacagccctgggcaagacctaccaccccaactgctttgcctgcaccatctgcaagaggcccttccccccaggggacagagtgaccttcaacggccgggactgcctgtgccagctgtgtgcccagcccatgagcagcagccccaaggagaccaccttcagcagcaactgtgccggctgcggccgggacatcaagaatggccaggccctgctggccctggacaagcagtggcacctgggctgcttcaagtgcaagagctgtgggaaggtgctgactggagagtacatcagcaaggatggagccccctactgtgagaaggactaccagggcctgtttggagtgaagtgtgaggcctgccaccagttcatcaccgggaaggtgctggaggccggggacaagcactaccaccccagctgtgcccgctgcagccgctgcaaccagatgttcacagaaggagaggagatgtacctgcagggcagcacagtgtggcacccagactgcaagcagagcaccaagacagaggagaagctgcggctgcccaacatccgccgcagcagcagtgacttcttctacagcaagagcctcatccggaggacaggccgcagccccagcctgcagcccaccaggaccagcagcgagagcatctacagccggcccggcagcagcatccctggcagccctggccacaccatctatgccaaggtggacaatgagatcctggactacaaggacctggccgccatccccaaggtgaaggccatctatgacatcgagaggccagacctgatcacctatgagcccttctacaccagcggctatgatgacaagcaggagcggcagagcctgggggagagccccaggaccctgagccccaccccatctgctgagggctaccaggatgtgcgggacaggatgatccacaggagcaccagccagggcagcatcaacagccctgtgtacagccgccacagctacacccccaccaccagccgcagcccccagcacttccacaggcctgagctgctgagccctggggtgcagaggctgagctacctgcggaccagcagcctgagccccacccacagcgacagccggcccaacccccccttccgccaccacttcatcccccacatcaagggaaatgagcccagcagcggcaggaacagccccctgccctacagaccagacagccggcccctgacccccacctacgcccaggcccccaagcacttccacgtgcctgaccagggcatcaacatctacaggaagccacccatctacaagcagcacgccgccctggccgcccagagcaagagcagcgaggacatcatcaagttcagcaagtttcctgctgcccaggccccagaccccagcgagacccccaagattgaaacagaccactggccaggcccccccagctttgctgtggtgggccctgacatgaagaggaggagcagcggccgggaggaggatgatgaggagctgctgcggcggcggcagctgcaggaggagcagctgatgaagctgaacagcggcctgggccagctgatcctgaaggaggagatggagaaggagagccgggagaggagcagcctgctggccagccgctatgacagccccatcaacagcgccagccacatccccagcagcaagacagccagcctgcccggctatggaagaaatggcctgcacaggcctgtgtccacagactttgcccagtacaacagctatggagatgtgtctgggggcgtgcgggagtaccagaccctgcctgatggccacatgcctgccatgaggatggaccggggcgtgtccatgcccaacatgctggagcccaagatcttcccctatgagatgctgatggtgaccaacagaggaagaaacaagatcctgcgggaggtggacaggacccggctggagcggcacctggcccctgaggtgttccgggagatcttcggcatgagcatccaggagtttgaccggctgcccctgtggaggagaaatgacatgaagaagaaggccaagctgttctag

SEQ ID NO: 19763 - DNA, 2109 bp, synthetic construct
  source 1..2109: mol_type = other DNA; note = Synthetic coding sequence
atggtgcctgaccctgtggcccacccccaggacccccaccaccccagcgagaagcctgtgatccactgccacaagtgtggggagccctgcaagggggaggtgctgcgggtgcagaccaagcacttccacatcaagtgcttcacctgcaaggtgtgtggctgtgacctggcccagggcggcttcttcatcaagaatggagagtacctgtgcaccctggactaccagaggatgtatggcacccgctgccacggctgtggggagtttgtggagggggaggtggtgacagccctgggcaagacctaccaccccaactgctttgcctgcaccatctgcaagaggcccttccccccaggggacagagtgaccttcaacggccgggactgcctgtgccagctgtgtgcccagcccatgagcagcagccccaaggagaccaccttcagcagcaactgtgccggctgcggccgggacatcaagaatggccaggccctgctggccctggacaagcagtggcacctgggctgcttcaagtgcaagagctgtgggaaggtgctgactggagagtacatcagcaaggatggagccccctactgtgagaaggactaccagggcctgtttggagtgaagtgtgaggcctgccaccagttcatcaccgggaaggtgctggaggccggggacaagcactaccaccccagctgtgcccgctgcagccgctgcaaccagatgttcacagaaggagaggagatgtacctgcagggcagcacagtgtggcacccagactgcaagcagagcaccaagacagaggagaagctgcggcccaccaggaccagcagcgagagcatctacagccggcccggcagcagcatccctggcagccctggccacaccatctatgccaaggtggacaatgagatcctggactacaaggacctggccgccatccccaaggtgaaggccatctatgacatcgagaggccagacctgatcacctatgagcccttctacaccagcggctatgatgacaagcaggagcggcagagcctgggggagagccccaggaccctgagccccaccccatctgctgagggctaccaggatgtgcgggacaggatgatccacaggagcaccagccagggcagcatcaacagccctgtgtacagccgccacagctacacccccaccaccagccgcagcccccagcacttccacaggcctggaaatgagcccagcagcggcaggaacagccccctgccctacagaccagacagccggcccctgacccccacctacgcccaggcccccaagcacttccacgtgcctgaccagggcatcaacatctacaggaagccacccatctacaagcagcacgccgccctggccgcccagagcaagagcagcgaggacatcatcaagttcagcaagtttcctgctgcccaggccccagaccccagcgagacccccaagattgaaacagaccactggccaggcccccccagctttgctgtggtgggccctgacatgaagaggaggagcagcggccgggaggaggatgatgaggagctgctgcggcggcggcagctgcaggaggagcagctgatgaagctgaacagcggcctgggccagctgatcctgaaggaggagatggagaaggagagccgggagaggagcagcctgctggccagccgctatgacagccccatcaacagcgccagccacatccccagcagcaagacagccagcctgcccggctatggaagaaatggcctgcacaggcctgtgtccacagactttgcccagtacaacagctatggagatgtgtctgggggcgtgcgggagtaccagaccctgcctgatggccacatgcctgccatgaggatggaccggggcgtgtccatgcccaacatgctggagcccaagatcttcccctatgagatgctgatggtgaccaacagaggaagaaacaagatcctgcgggaggtggacaggacccggctggagcggcacctggcccctgaggtgttccgggagatcttcggcatgagcatccaggagtttgaccggctgcccctgtggaggagaaatgacatgaagaagaaggccaagctgttctag
